United States Patent Application Publication US 2011/0183924 A1 - sequence listing, part 75

SEQ ID NO: 270965 - DNA, 517 bp, Homo sapiens
caggataagatgtttcaaaggtcagcagagtctgctttagagagccggactcttccactttgtcagattcattgatccaggtgcaccacgaggtgttgacagtggcacagactctccttggctggccagctggaagtccagggctatgcagctgctcaaatactcaaaccaaagagctgaggctgatctgttgtgtctccaaaactaaggtagtgttgttaatgacctcagtgatggtaagagacaggtgcacaaccttttctcactgagggacctgagcagtgggaaaaaccacccagagcatacacatgagcaaagagggtcagcagtgcttctcacccggtaagccctccaagtaaccagggtaggcttggttctggagctcatgccttactcagcctggtgcaacatgctccttgggagaggttgcttggaatatttgaaaaactcttattaatgccccattcgtgcagattacaaggctatcaaaaaggaaggtaaaggcctggtgtttaga

SEQ ID NO: 270966 - DNA, 448 bp, Homo sapiens
tttagcctgttacctgtttccttattcattcaatacatgcttacaaaaaaatatgtattagacactgctttagacacaagggatacaccaattagcaagacagacacagtctccaccctcagcaaccctatattctagtgggtggagaccaaaaaaaagtatgtaaacaaatgaaataatttaagacaccaatgaattctatgaaaaaaattaaacagagtagtgtgatgggaaatcactggtgtgatgggaaaaactcccttgagattagcttcaaattacctccttatagaggagctatttgagttgacacttcaatgtcaaagatccactcacctgaagatcaagtggaagaacagtcaaggaagaaaaaaagcaagtttaaagtccccaagatgggaaaaagcttgtaatattcaagggacaggaaaaaaacaaacaaacaaac

SEQ ID NO: 270967 - DNA, 559 bp, Homo sapiens
aggctgaggtaggagaatcactgaacccaggaggtggaggtttcagtgggccaagattgtgccattgcactccagcctgggtgagactctgtctctaaaaaaacaaaaataataatattgaagtaaaatgagtatttataaagtgcctattaaatgcctgattgatcactggcctgctcacttcaagggctgttcttattctaggattagaccaataaagcagccacaactggtaaattgtcactcatgaaggccgagggaaagacagcctttgagggtcttttgctgggaattaaacgttctgcctcaaaaactatacatgtcatttccattcactagtctttgagacgtcacatggccacccaggagtgtgatagcagacatgtaatcctaccataattctgggatgggaagagctggcgatattttggaataacattaaagactgccacaaacattgtaaagatagtgttatcatcacgcttcaaaagaaactgcaacacgggggtgaggtgacctgtccgtaatcattcagtgagtaaataaagcaacaaggatt

SEQ ID NO: 270968 - DNA, 394 bp, Homo sapiens
gaaaaggcaaaactgtggggacagtaaaaaccatcagtggttacgggggtggagggtgggggaggaacgggcagagccaagggttttcaggtcaatgaaaccattttgcattctctgtaaatggcggacccgtgtcctacatttgtccgaatctacggaatggctaacaccaagagtgggctctaacggatgccgtggactcggggtgatggcgcatccgtgtgggttggctgccttaataaatgtgtgctctggcgggcgggggtgtgcgggggtgatggtgagggaggccgtgcatgcgtgggggcagggagtgtgtgggactctctgtaccttctgctccattttgccatgaagctaagactgcactagaaaataaagtctatttaaaaca

SEQ ID NO: 270969 - DNA, 928 bp, Homo sapiens
gctcttatcatgcaaaccggtccaagaagcagacacatccaccttgagccagatttatttgcaaggaatgggttcaaagtcatgaaaagaggagagttcacatagactcaatttcaacaaaaagtagctctcataggggtgaatgggtttaggttgctcaagaagagagagattccaaagatggagcttgagttgaagcccccaggagctccccctgcagaaagagcagaggctcaggctgaggacagctccctgaatggccacctgaaacctgaaacccgtgatgggaacgcagaggggaccatggagcaaaaacgccagggaactctatatggtggaaaggagatagccagatgtggtggcacacccctgtagtcccagctactggggaggctgagataggaggatcacttgagcccaggagtttgagactagaatgagccatgattgtgccactgcactccagcctggtgaaagagtgataccctgttttcataagaaaaaaataacaaaaacaaaaacaagaaaggagagagttggctaagctttatcacctttgtgggtttggaacccttacttgatccttcactaaagtacttcttgggcatccagtgaggttcagtgtgtattgagaggatggtgaggatggcagccaggcgtgggacctgtattcaagaagaagctgccccactcgctggccttctatggatttccagccaacaagcatttccaaccacctatggatttccaacaactgagaactcatgagactggctgcccagtctttcctctctgccagagcatgaagaggcctccatcatttcaggttgatgctctggttcgagtagagcacactcttcagtggcttcctgagaaaatgtgcaagacaagtccattttctggctctccatagaagacccacttcacc

SEQ ID NO: 270970 - DNA, 356 bp, Homo sapiens
cacaccccaatattcagcccagctgctcagaggcaaagagctggcacagcagaaaccgagcctgcgcagggccactctgcatgggcaggtgtgacaagcttgtctctcccccagttcaccacaccttgtcccccactggtttctctcctgtaagacattgccgagctgttggtagaatttcagacaatggaggaaggtgacgaagccaagggaagggaagtctcagtttgttgcctgtggaagcccagccgcctctgtttataagagctccccattctgcccccttctcactcaaacgtctgggtgtctctgatacaaagagcctggcatagtccctgataaacagcaagtgccta

SEQ ID NO: 270971 - DNA, 535 bp, Homo sapiens
cttgtctacacagaagtgggcaatgacatgtgccatctatggcacacggtgtgcacttaatcatcatgttttagcattttgatcttctgcttatggcgctcaatttctttctgcagacgctcaatctccttcttatgatgaacgatttcttcttcatggtgttttttcaaagctgccagtataaacaagagtaatacaaagatgtataaggcaaagttgattactatgaccaattattcatttttctttacttttcttttagaatctcccctcaggcaaaattttccttctgcttcttaacatctgttccttgtacttttgagagataatcttatcttcccagttttctgcaaattctgcatattgtaggaattcaaaagaggtgaaatatagtaaaaactgaaagtgttttttattatgtcagcatggtgtctttgtggaacgttgagaagcttgaaccaatttttgagtggatcagattagaaggaatataaaatcttgtagttacatctaggaccttgacagacaagaaagt

SEQ ID NO: 270972 - DNA, 626 bp, Homo sapiens
tagaattctcgctgcactgtagtagttcttagacattttccatccccagccttaatctgagctttagctatcccaattccacacgtggcttgcttctgggctgtggactagtattagcagcccttagtccttgtcaaattaaaaccacctgttaaccttaagaaaaaaatcattcagtctctgccctcaatttactgaatcagtttctacaagaaaaacctggacttatatatattttaaaccattatagttggttctggtgttcaatcagggtggaagaccaatacactggttcctggcttccactctttctcatgactatggctgtatcttctctctcagtagtttaatctctgtgatgtccctctgctttcacaatttttctacatgaattattcggtttaaaacattcattttaccatttgttaacttcattctttatatatttcatttattttccttggaagttatttttaccttgtcggcagtgttcagttcaaccctgccttgttcacttcattgaacaaattggtcaacattttatagcaccaggcattctaaaacatccagcctccatcaaagatcactaattttaatctttctactctgtccttcctttgtaaagg

SEQ ID NO: 270973 - DNA, 443 bp, Homo sapiens
ggcgaggtgcggaaggcgtcgcgctggctactctggtacccccaggacggggtctcagtgacgaggcagggtctccacgcactggaatagtgtcaaaccacacacaagggcacagaacccagggacacagggcggctgagacacgcagctggtgatggccctcaggacggtgtcaaccagtatgtaatcacattccacacggcaccaattggacagcggcctccggtcagcctcactctgactgcaaccccctctcactggacagcatcacctggacacagagcctcacctagtctgtgtcccgtggacacaactttgctttggacagtgacaccaagaatactcacccctttacttagccagaccacaggcagccaccgggacacaaacatctctccagagtcaccctccacacagactccacagcagaactcccagggagg

SEQ ID NO: 270974 - DNA, 708 bp, Homo sapiens
tatgcttgaactgaggtcttctaacccctaatcctttacacttttcactctgccacaactaatctgagaagacttcttagaagaggtgggatttcaggattaaacacaatggcccaacaggacaggagtggatgggtaagggttacactgggatgggctgaatgtcacaaggttgacttcgtaggtgttcaggagccaggtcactgggcggaattccctgatatccgcccatctctccatcctcctctgcttagtcactgccctattcaaccacctttcattccatccccaccccaagttagttagaaaaacataaactgcccctgggtgaagctgctttatttccaagcatcccattctcagcatatactcagatggatggactgtgttttaaaagttggatagctggaagttccctaaatccatggaaaatatccccatcctatacccgttatggtgaggggagaaaaagagaaaagagaaagagaaatagcttcataaatctccggatgcaaattgtttgcatggaaaaggcctccaagtgcagctcttttttccttcatgcctgactctaggagctaatccctccattctgttaattaatttaagatgtttattgagcactggctttgtgtcagatgctgtggcacggcaccagatgcagcactgggaatccagtggtgaacaagacaggtaaaggctttccat

SEQ ID NO: 270975 - DNA, 364 bp, Homo sapiens
gtgatccgacgaacttaagagggaggggtgattttctgggttttcaacgtcttggtcctcgtctcaaaagtgtatcttcggccgggcgcggtgtctcacgtctatcatcccagcactttgggaggccaagttgggtggatcatttgaggtcaggagttcgagaccagcctggccaacatagtgaaatctttactaaaaatacaaaaattagccaggtgtggtggtgcgcacctgtaatcccagctactcgggaggctgaggcaggagaatcgcttgaacccgggaggcggaggttgcagtgagccgaggtcacaccattgcactccagcctgggagacaagagcaagactctgtctcgaaaaaa

SEQ ID NO: 270976 - DNA, 1539 bp, Homo sapiens
aaagaggttaaagtcacttgtcgaagttcacagaggtaggagttattggggttaggattcaggtccagggcagttttccccccagagcccatagaggtagaacaagaagcagcttttgggctacagagcagcttcactgtgatttacctcctcctcctactttctgcacgaccagtttcctctctccagtgacaaaacagctgaagccaccagatctacagaaggaagggggctgaaggcccaggctgagggcagttaggaggactacgtgacagggtgtggacgtgcactgtgtgtgcgtgcgtgcgtttgtgtgcatgtgtgtttgtgtgtgtgcacgtgtgtgtgtgtgtgtgctgggagaaggacaaagcttcctccagtgctaaagccttcagcaattgtatgaaaagcatgtgttgcaaaacaatccagcatcaggcgtttgcagggctttaagtaaaagctgcccaagcacgggtgtgtttgttttttccctagctctgatacccttttgatctggtttccttttttctttgggctttatctggagacgtgtgaagaattggaggccgcgctggctgtgtgttttggcggtgctactctggttagccatgtgtgccggagctctggggacttctggggggtgagccacgtggcagctccttagggctccttcttagcgagtctcccagcagatctgccagagcagcaggtcggcagcaggagcccaggtccagcgttgcaggggtggggaaaaccatttcctggctggagaaggctgctgctgggctgggtgggcaagtcctgacacattagcgatcagccaactgttttattaccaggtctcccatggagaaaacacttcgtaaatcgaggagctgttacaaaagtcgaatggcagcatcattagtgcccagctttctggaaatgtggatttcctgacagttttctcaccttctcatcttatagatttcctgtcagcctggatcatagccatgacagcctccccgttccctgtcctctctgtgcatgcacctgtgcatgtgtgtataaagacagaattatttagacaaatggctttcagaagttccgtcacagatataccccatgttcgtttacagtgagtttcacccaacatttgagtctatttactgagaaatggttgggaaggagctgaagagccactgcaaatgattgtagatggatgtggtaactttttggggtgaaagatttagcagctcagatgataaggttagattaagatagcatttaaaatgacatctgcaaagagaggcagttttaattaagagaatctacttccaaactccctactcatggggaaactaaggctcatgtacagcggcagaatgagggtgatcagtcttctttctatttattgacagaagactctatttaataaagagtgtatgggctgcctataattccagcactttgggaggccgaggcagaaggatcacttgagcccaagaattcaagactagcctgggcaacaaagcaagaccccgtgtctaccaa

SEQ ID NO: 270977 - DNA, 453 bp, Homo sapiens
gccacgaaacatccaatatttgaaagtgttctatggacctcaaagggcaagagacaccttaaaatgtttgctggatggctgtaggagggtagagccctggtgggcacacctggtggtgagcttggaggcgaggctctgctgctcatgttcatggagtcccacgtccaccaggccctttgaatctcgagtttctggcttcagatgcccccaggtttccagaagtcaagatttctaacaaatggacccaaaccccaagccagcacctggaagtggcagcaacacggctgtgtggaccccggtgctgggaaccttctggaggcagctggacacaggggctgccagtgtggagagggacgctgctcattttgacatttcatctgaataacgttccaagtgttctaatgaaagcctctgcgctccctttgaaatactagcaattacaaagatgaataa

SEQ ID NO: 270978 - DNA, 486 bp, Homo sapiens
acccactacacattcaggatgaataaaaatgtccccaaacagccccaaacaaaagcctttgggaaacagattcttgcatacatcttttgtctatgcttaaaaagtgggcattatactaactttcaaaatttttttttttttaaattctacatgcaaagatgaagcatcactaagaatgcaactttattttaaaaattatttcattttttcacgcctgtaatcccagcactttgggaggccgaggcgggcggatcacgaggtcaggagatcgagaccatcccggctaaaacggtgaaaccccgtctctactaaaaatacaaaaaaattagccgggcgtagtggcgggcgcctgtagtcccagctacttgggaggctgaggcaggagaatggcgtgaacccgggaggcagagcttgcagtgagccgagatcccgccactgcactccagcctgggcgacagagcgagactccgtctcaaaaaaaaaaaa

SEQ ID NO: 270979 - DNA, 322 bp, Homo sapiens
gaaagatgaagtccattatgtgctggttcatgctacccaccatgtcaggatcatccaggaggacaaagaactaggcaagtgtttgctggtgtttgattcagttaatagtattaacagcagccacttttactatgctcttgattctgtgtcaagctttcttgttatttatttttgagacagagtctcactcagtgcccaggctagagtgcagttttattgtgctcttgattctgtgtgtgtgcccggcctgttcctgctgctcgtggcgctggaccgcatggagtacgtgcgcaccttaccaagcgcgaggacctcgcggccc

SEQ ID NO: 270980 - DNA, 217 bp, Homo sapiens
gctttttccaaagctagtgcttcatagtattggcttctgtgcccatggggcagcaaaaccatttgcttgataaaaatgcggtggctctcgccagtaatcccagcactttgggaggccgaggcgggcagatcacctgaggtcgggagttcgagaccagcctgaccaacatggagaaaccccgtctctactaaaaatacaaaattagccgggtgtggtg

SEQ ID NO: 270981 - DNA, 807 bp, Homo sapiens
  misc_feature (220)..(220): n is a, c, g, or t
  misc_feature (307)..(307): n is a, c, g, or t
  misc_feature (784)..(784): n is a, c, g, or t
gaggagcgtggctctctcctctccaccatggcatgtgctcgcctactaatatcggtgtactctgaaagtggggagtcatctggcaaaaatgtcactttgcctgctgtattcaaggctcctattcgaccagatattgtgaactttgttcacaccaacttgcgcaaaaacaacagacagccctatgctgtcagtgaattagcagcgacagttgcctgctgtnagtaagctggtacagaaggttgacgaaaattcttactgagcaagaaataaccttgttgtaattactaaaatttgagaaatgtgattnttgactggaaaaatagatgtgtcgtggaggccgaatgtttgcaccaaccaaaacctgacgccgttggcatcgtagagtgaacacaacccaaaaacgatacgccatctgttctgccctggctgcctcagccttaccagcactggtcatgtctaaaggtcatcgtattgaggaagttcctgaacttcctttggtagttgaagataaagttgaagggtacaagaagaccaaggaagctgttttgcttcttaagaaacttaaagcctggaatgatatcaaaaaggactatgcctctcagcgaatgagagctggcaagggcaaaatgagaaaccgtcattgtatccagtgcacaggcccctacatcatctataatgaggataatggtatcatcaaggccttcagaaacatccctggaattactctgcttaatgtaagcaagctgaacattttgaagcttgctcctggttgggcatgttggangtttctgcatttggactgaaagt

SEQ ID NO: 270982 - DNA, 475 bp, Homo sapiens
caacactattaataggatctaatcgatattcataaagcactgaattcaactatagcagaatatatatatattttttcaagtgcccacagaacatataccaagatagaccatatcccgggtcataaaacaaactttagcaaatataaaataattgaagccatgtagaatgttttacctaacctcaatgaaacaaactataaatcagtcacagaaagataatagaaaaatctccaaacacttggaaacttaacaacacacttcttaataatctatgggtcaaagaggaatctcaagggaatttaaaaatacattaaactaaatggaaagataaatatataaaaatttgtgggacacagctaaagcagtgctgaaagggaaatgaatataaaagggggaaaagtctcaaataaatagtttaacgttttatctcaagaaaagataaagaagagagaaataggcccaaagcaagcagaag

SEQ ID NO: 270983 - DNA, 433 bp, Homo sapiens
gtttggaagagaaaaaggtaaaaaggttgcaagagtgcaagatttcaagattcatctttgaaagctaggttaatggattagtctgccaaaaatatgaaaatataaaaatattataaattagtcagatgtccatggctgtaatctgtttgcctgatgccagatgtacttatgataggaaaaacaggcggcttaaaaatagctagaaaatgttaagtacttatataacacatttttttgttttaagtatcaaatgggttgttatcttattagggtttccagtaaaagaagtgcctatgatttaacttggaccaatggtaagttttcccattttaggatttcagtgttcatttagggaactataatactatgtagtacaaatcctttattaaatcaatgcattcattatctgaaataaaagttttattcaatcact

SEQ ID NO: 270984 - DNA, 424 bp, Homo sapiens
gacacagtctcactctatcacccagactggagtgcagtggcacaatcttggctcactgcaacctccgcctcccgggttcaagcgattctcctgcctcagccttccaagtagccgggattacaggcatgcaccaccacgcctggctaatttttgtatttttggtagagacagagtttcaccatttagccaggctggtcttgaactcctgacctcaggtgatctgcctgcctcagcctcccaaagtgctgagattacaggtgtgagccactgtgcctggccaggttcttacgtttcaatatctcagaaagctaattaaagatcttaatctcatttaaatctcttgattttacacagtaataacagcaaacacatggtgaaatctggccaacttaactcagaaacttcattttaggatgatatttca

SEQ ID NO: 270985 - DNA, 524 bp, Homo sapiens
cacaccagcaggcgatagaagtggcattcagggactgctgtcattgctgctgagatccaagactcctcttggtgcactgtgatttgcagggaaagctgtgtctctctgacttgcaggccagaggttctgaagattgcttgaggttgcaagtacctccaagcttgagcagcagttttgaagtgtggagatgggaggtgagttattcacatctctaacaaaggagctgctgcttctggcttcaggaggggctgagaggcccctgattcactatctcatcactgggctggaagctccacagggatcagttaggcctgtgggccatgctttcagcacttggaggagaagatcccttagactcagcctttggctccatgccactcttgacaatgtacagggaagccacttggacctgatgctggagtttaatcaacagacaaggaagaggccccagtgtgtactgggcaaaagaacgggacgggtgtgctgaaaagcgtctcataaacagactttgttttcctgtgttt

SEQ ID NO: 270986 - DNA, 169 bp, Homo sapiens
tgaggtcaggaaaccgaagacatagcaaaggccatgatagtcttatgttcaagaggaaaatcaagataataaataatcctgtgtttttgtgtagcctgctctatagttcacgaagtaccagcaccttgtctcatatctatccttttctctccattcccccatcaaccag

SEQ ID NO: 270987 - DNA, 779 bp, Homo sapiens
ggcatgaggaggctggccggcaaaacagttttcaggtgtagccgagtgactgctgaaccccgtgttgcgattgcaggttgtcacaaccagtggccacaaaaattgggagctaggtttcacttagttttcactccttattccatgctggagttggtgatggttaataccttaaccagcctttgtatctcaagtagagagtgacccagggcttggctgcacagtggtcagtggttttcaggaggtaggggtgaggggagatgtcggtcaacatgggacacccaggcttgcactgatgtttctttctgggtcttctcattgctttggtaagcggtgtgtgagacacttttcctgccactgcatccccttttcctggctgacactttgatctgagactttaattagtaattagacccagatccatcttttggttaatcaccacgtagtaaaagaaaaagcacattggaggctggtgctggaaagtgcctttggaccttttactcagattaacgtaatatattctttttcaggtgatagtaatctagatgttccatgagtctggttttgtgtaaagatataatagtatttggggcatgaccaaagattgcagaatggaacagataacttaaccagaggagaattgtataatttgaaaggacatagaattttagggcttagagatgatctcacctatcatagcattgttgtttaagagcctgggttctttctgatttactttctctaaaatggggataagaacagtatctacttcaagggtacaa

SEQ ID NO: 270988 - DNA, 433 bp, Homo sapiens
cacagggccagaatacataaggactataaacatcatcggtatttggagtccagaatcatcacaaattgttaatcctggtaatagataaaggggaggacatgggcaggccaacaggcacttaagttactgtctactaaaataacacactctgtttactgaatcacaactgctctggggaaaccagggctgaccagtgaaagcttacagacccctcttcagccacaaactggaattatgaagtggcctccagatatgacatattttgatgttcagttcagtgcttcactttcctcagaactacttggctacagaatactttgatcctggcccttctgtgactgctccctgatggaatatttggacaaaatcccaacactgaattaagatgaaggtatgctgtaatgtcttatatgaaaaataacatcagatcaaa

SEQ ID NO: 270989 - DNA, 1518 bp, Homo sapiens
  misc_feature (1080)..(1080): n is a, c, g, or t
  misc_feature (1133)..(1133): n is a, c, g, or t
tgtttctgaaaaagtgctaataaacatacattctgtgggcattttctcacttccctataggtgacatgcttcgttatattcaggagagtaaggaacgagctgcagaaatggtaaaagcagaggtactgcgagaacgtcaagaaaccgcccgaaagatgcgcaaatattatttgatttgcctccaacagattttgcaggatgatggaaaagaagggtgagttcagtctgaacaatgtgtcctgagattaccaggacaacatgttatcatttttaaagcattttccttaaccactaaattaactatttctacatgatcagccatagggggttaagagaggtttatggctgtgctaccctaaatgttggcagagccaataggaaaacagaaaccatggggctaaggcaactcattttttcctttaaactatatttttaatattctggaattccccacagggctgagaaaaagattatgaatgctgctagcaaacttgctacaatggcaaaattactggaaacacctatttctagtaagtcccaaagcaaaactacacagtcaggtatgtcaaagtgagtcgccaaatggtttttctatcttttcttctttagctatttaatattttcagtatgaagaaggcagggaaggtaaggagtgagagttaatttgtgaagttttgtatgttttacttaaactagaagtttacgcaaaaagagtacacagtttccaatttaagtaggcagactgagcatgcccatcagtttcctattgctgcttccatccctcgaaatgatagaaaagattttaaacagcaaataaagaatgagaaaaagaagaaattataagtgggttttaaaaagttgcagtgggccaggcatcatggctcacacctgtaatcccagcactttgggaggctgaggtgggaggatcccttgatcccaggaatttgaggttgcagtaagctatgattgtgccactgtactccagcctgggtgacagagtgaggccctgtctcaaaaaaaaaaaaaaaaagtttgcagtggatagaccagaagctacaagaaatccctgagagaaagaanacagtataggatggaagatggaaacctcagttcaaaaccaccgggagatgacnattgcaattaggagcaatatcaaaactgttccacatatgagggtgatatgttccaggagaaatagagggcctaggggatatgaatggggtaattagttggtgttctaaaccaacagcaaccaggtggggttaatcctctctttatttcttcttctcccctcctttccccaacctcaatattgagctgggcaacaacaacaggaacaaagaatctgggagcagggcagtgctccaggtggctagccatatcaagcaggaactgggagccgacttgccttgggaggctgagatgggaggatcacttgagtccgggaggtcaaggctgcagtgagctgtgatcgcaccactgcactccagcctgggaaacagagcagaccctgtctca

SEQ ID NO: 270990 - DNA, 577 bp, Homo sapiens
acagtatgaagagcctcgaacaaccattttactccgtgccagtacacatgggaaagggttgaaaggatatgtgaacctgccgccaccaattccttgattattcactggaaccctttcagccagagaagatagacacagtactgggctttactgaggactgggtggcgctgtctttaggggcaggttaataatatacacctaagtgacaagaacactcacacccgaggaaattagagtagtaaatagacacgtggaaaaatgtgccatcttatcagtaattaaagaagcaaaaatgtaaacaaagcggcacctagtaaggtagaagacaaagcaaaatatctaaggctgttaaataatggggaagcaggcgccttagaaaacaagggcaaatgtaaaaaacctctaaggcaagagttcggtggggaatctgcgggattctgtgtgctgaagcgcaggaggcacgagtcacctttgcagtctccggtaccaaacgggcaaggggtccccgtaagactgctgcaccctggccgaaggtagcgggtgaagcgcctcggcgtctctaggcaaccgatcagcc

SEQ ID NO: 270991 - DNA, 617 bp, Homo sapiens
atgacattaaatatttttataaaatataattttttgttttgttttgtttgagacagggtctcactctgtcactcaggctggagtacagtggtgtgatctcacctcactggagcctccccctttttaatggcttaattgtatacagacattatattatttgacctgaatgaaaagatagaaataaataaacctcttatttgacatataaattgttttcagcctttcacataaatgtttacataaaaagaggtcatagaacaagaattaaaaattagaaggggatcagacttctcacttgcaacaaataaaattagaaaacagtggaacagtgcttttacacttctgatggaaaaagaccttcaattcataatccagtactcagcctgccaatttaataataatgcaatgcctttaaaaatttactatttccaggtacaatagctcacacctgtaatcccagcactttgggaggctaacgtgggcaaatcacttgagcccaggagttcccgaccaacctgggcaacatggtgaaaccccatttctacaaaaaaaatacaaaaattaggtgggcgtgatggcatgcacctgcagtcccagctacttgggaggctgaggca

SEQ ID NO: 270992 - DNA, 4572 bp, Homo sapiens
tcggcgattgaaggatgcgagtgctccttaagggcctccgccccgtgagttcggttgtgactaggaaggagctagtggactagagccagggtaaggggatctgctagaagttggtcttccgccaggactagagtttcctcgcggtaacagcctccgtggcctccggaggaccatgtcattagactttggcagtgtggcactaccagtgcaaaatgaagatgaagagtatgacgaagaggactatgaaagagagaaagagttgcagcagttactcacagaccttccccatgacatgctggatgacgacctctcctctccagagctccagtattcggactgcagcgaggatggcacagacggacaaccacatcatcctgagcaattggagatgagctggaatgagcaaatgctgcccaaatctcaaagtgtaaatggctataatgaaattcagagtttatatgctggagaaaaatgtggtaatgtctgggaagaaaatagaagtaaaactgaagaccgacatcctgtgtaccatcctgaagaaggtggagatgaaggtggaagtggttatagtcctccaagtaaatgtgaacagactgatttatatcaccttcctgaaaactttaggccatataccaatggtcagaagcaggaatttaataaccaagcaaccaatgtaattaaattttcagatcctcaatggaaccattttcagggtcccagttgtcaaggtttggaaccgtataataaagtgacatataaaccttatcagtcttctgcccagaataatggctcaccagcccaggagataacaggaagtgacacattcgaaggcctgcaacaacaatttttaggagctaatgagaactctgcagaaaatatgcagattattcaacttcaggttcttaacaaagcaaaagagagacaactggagaacttaattgaaaagttaaatgaaagtgaacgtcaaattcgatatctgaatcaccagcttgtaataataaaagatgaaaaggatggtttgactctcagccttcgagaatcacagaaactctttcagaatggaaaagaaagagagatacagcttgaagctcaaataaaagcactggagactcagatacaagcattaaaagtcaatgaagaacagatgatcaagaagtccagaacaactgaaatggctctggaaagcttgaagcagcagctggtggaccttcatcattctgaatcacttcaacgagctagagaacagcatgagagcattgttatgggcctcacaaagaagtacgaagagcaagtattgtccttacaaaagaatttggatgccacagtcaccgcacttaaagaacaggaagacatttgctctcgtctgaaagatcacgtgaaacaactggaaaggaatcaagaagcaatcaagttagaaaagactgagatcattaataagttgacaagaagtctagaggagagtcaaaagcagtgtgcccacttgttgcagtccgggtcagtacaagaggtggctcagctacagttccagctgcagcaagcacagaaggcacatgctatgagtgcaaacatgaacaaggctttgcaagaagaattaacagaactaaaagatgaaatttctctctatgaatctgctgcaaaactaggaatacatccaagtgactcagaaggagaattaaatatagaactcactgaatcgtatgtggatttgggtattaaaaaggtcaactggaaaaaatccaaagttaccagcattgtacaagaagaagacccaaatgaagagctttcaaaagatgagttcattctgaagttaaaggcagaagtacagcgtttgctgggtagcaactcaatgaagcgtcatctggtgtctcagttacaaaatgacctcaaagactgtcataagaaaattgaagatctccaccaagtgaagaaggatgaaaaaagcattgaggttgagactaaaacagatacctcagaaaaaccaaagaatcaattatggcctgagtcttctacttctgatgttgtcagagatgatattctgctgcttaaaaatgaaattcaagttttacaacaacaaaatcaggaacttaaagaaactgaaggaaaactgagaaatacaaatcaagacttatgtaatcaaatgagacaaatggtacaagattttgaccatgacaaacaagaagctgtggataggtgtgaaaggacttatcagcagcaccatgaagccatgaaaactcaaatacgtgaaagcctattagcaaagcatgctttggagaagcagcagctctttgaggcttatgagagaactcatttgcaactgaggtctgagttggataagttgaataaggaggtgactgctgtgcaggaatgttacctagaagtgtgcagagagaaggataatctagaattgactctcaggaagaccactgaaaaggagcaacagactcaggagaagatcaaagaaaaactcattcaacagcttgaaaaggagtggcagtctaagctggatcaaactataaaggcaatgaaaaagaagaccttagattgtggcagccaaactgaccaagtaaccaccagtgatgttatttccaagaaagagatggcaattatgatagaagagcagaagtgcacaatccagcaaaacttagaacaagagaaggacatagccatcaagggggctatgaagaaactcgaaattgaattggaactcaaacattgtgaaaatattaccaaacaggtagaaatagctgtgcaaaatgctcatcagcgatggctgggagaactaccagagctggcagagtatcaagcacttgtgaaggcagaacagaaaaagtgggaagaacagcatgaggtctctgtgaacaaaaggatatcatttgctgtttctgaagctaaagagaaatggaagagtgagcttgaaaatatgaggaaaaatatacttcctggaaaggaattggaagagaagattcattctcttcagaaggaacttgagttaaagaacgaagaagtccctgtggtcatcagggctgagttagctaaggctcggagtgaatggaacaaagaaaagcaagaagaaatccacagaatccaagaacaaaatgagcaagattaccggcaatttttagatgatcaccgaaataaaattaatgaggtgcttgcggcagctaaagaagactttatgaaacaaaaaactgaactacttcttcagaaggagacagaattacaaacttgtctagaccagagtcgtagagaatggactatgcaggaagccaagcggatccaactggaaatctatcagtatgaggaagacatcctgactgtacttggggttcttttaagtgatacccaaaaggagcacatcagtgattctgaggacaagcagcttttggaaatcatgtcgacttgttcttcaaaatggatgtctgtgcaatattttgaaaaactaaagggctgcatacagaaagcatttcaagatacacttcctctgcttgtagaaaacgctgacccagaatggaaaaagagaaatatggccgagctctctaaggattctgccagccagggcactggccaaggagaccctggacctgctgctggacaccatgctcagcccttggccttacaagcaacagaagcagaagctgataagaaaaaggtccttgaaattaaggatttatgctgtggacactgcttccaagaacttgaaaaggcaaagcaggaatgtcaagatctgaaaggaaaactggagaaatgctgtaggcatcttcagcatttagaaaggaagcacaaagctgtagtggaaaaaattggagaagagaataataaagttgttgaagaattaatagaagaaaacaacgacatgaagaataaattggaagaattgcaaacactttgtaaaacaccaccaaggtcattgtcagcaggggccattgaaaatgcttgcctgccatgcagtgggggagccttggaagaacttcgtgggcagtacattaaagctgtaaaaaaaattaaatgtgacatgcttcgttatattcaggagagtaaggaacgagctgcagaaatggtaaaagcagaggtactgcgagaacgtcaagaaaccgcccgaaagatgcgcaaatattatttgatttgcctccaacagattttgcaggatgatggaaaagaaggggctgagaaaaagattatgaatgctgctagcaaacttgctacaatggcaaaattactggaaacacctatttctagtgaagaagctaagtctcagaaagataactcacccaagaggacacaaggataaacctgatacccatggcagtagaaagcctacacttacccactcagatgctcatcaatggaggagagacttatgcctggaggaacttggaaatcaaactcagtacaatagctcacacctgtaatcccagcactttgggaggctaacgtgggcaaatcacttgagcccaggagttcccgaccaacctgggcaacatggtgaaaccccatttctacaaaaaaaatacaaaaattaggtgggcgtgatggcatgcacctgcagtcccagctacttgggaggctgaggca

SEQ ID NO: 270993 - DNA, 768 bp, Homo sapiens
tgtgctgaagcgcaggaggcacgagtcacctttgcagtctccggtaccaaacgggcaaggggtccccgtaagactgctgcaccctggccgaaggtagcgggtgaagcgcctcggcgtctctaggcaaccgatcagcccgcccactccggggtgacttcctcgtaattggctctcgaatccaccaatgggcgcacagggggagcttcccgccacctctggcgcccgctttcaaacagccgtactttgcaactgcaggtggacttctcaaccaagcttgaggaaggcggagacttctgcctcctcgctctgccctgagctggcacggctccgcccaccgggcgagcttctagtcggcgattgaaggatgcgagtgctccttaagggcctccgccccgtgagttcggttgtgactaggaaggagctagtggactagagccagggtaaggggatctgctagaagttggtcttccgccaggactagagtttcctcgcggtaacagcctccgtggcctccggtaagttctgattcacgggtgagcttggacctggggttagaggagttgcggggtcctcgggatgctggctgagggttcctgggggggctgacctgccccctccccaaatcccgcggtggtggactgcccgcatgttgcgggctcagcttttaccttaacgtgtcatttagacctcttcattcctccaatatcctacttagaagtgacatatgggaagcccgcctcgtttccaggctgctggggtcgccctgag

SEQ ID NO: 270994 - DNA, 405 bp, Homo sapiens
agaagaagatgggatacagattttaagtgctgagaaaacagagcaagggaatggtctgagtagggtttctaaggggatgaacgttacagaaaagcgactggaaattgcacagtctcttctataaacatttgtattgggaacttaagggaaaagaaggcttaaaaaatttttaactgtctaatatactataaactttctgttatagaagagaataataaagttgttgaagaattaatagaagaaaacaacgacatgaagaataaattggaagaattgcaaacactttgtaaaacaccaccaaggtatacttttactattttaaagtgctattttaaagaaatctaagtacaagtatctttaaatttttttaagtatcaattttttttgttatacagcaaaaagtat

SEQ ID NO: 270995 - DNA, 4944 bp, Homo sapiens
  misc_feature (4506)..(4506): n is a, c, g, or t
  misc_feature (4559)..(4559): n is a, c, g, or t
tcggcgattgaaggatgcgagtgctccttaagggcctccgccccgtgagttcggttgtgactaggaaggagctagtggactagagccagggtaaggggatctgctagaagttggtcttccgccaggactagagtttcctcgcggtaacagcctccgtggcctccggaggaccatgtcattagactttggcagtgtggcactaccagtgcaaaatgaagatgaagagtatgacgaagaggactatgaaagagagaaagagttgcagcagttactcacagaccttccccatgacatgctggatgacgacctctcctctccagagctccagtattcggactgcagcgaggatggcacagacggacaaccacatcatcctgagcaattggagatgagctggaatgagcaaatgctgcccaaatctcaaagtgtaaatggtcccagttgtcaaggtttggaaccgtataataaagtgacatataaaccttatcagtcttctgcccagaataatggctcaccagcccaggagataacaggaagtgacacattcgaaggcctgcaacaacaatttttaggagctaatgagaactctgcagaaaatatgcagattattcaacttcaggttcttaacaaagcaaaagagagacaactggagaacttaattgaaaagttaaatgaaagtgaacgtcaaattcgatatctgaatcaccagcttgtaataataaaagatgaaaaggatggtttgactctcagccttcgagaatcacagaaactctttcagaatggaaaagaaagagagatacagcttgaagctcaaataaaagcactggagactcagatacaagcattaaaagtcaatgaagaacagatgatcaagaagtccagaacaactgaaatggctctggaaagcttgaagcagcagctggtggaccttcatcattctgaatcacttcaacgagctagagaacagcatgagagcattgttatgggcctcacaaagaagtacgaagagcaagtattgtccttacaaaagaatttggatgccacagtcaccgcacttaaagaacaggaagacatttgctctcgtctgaaagatcacgtgaaacaactggaaaggaatcaagaagcaatcaagttagaaaagactgagatcattaataagttgacaagaagtctagaggagagtcaaaagcagtgtgcccacttgttgcagtccgggtcagtacaagaggtggctcagctacagttccagctgcagcaagcacagaaggcacatgctatgagtgcaaacatgaacaaggctttgcaagaagaattaacagaactaaaagatgaaatttctctctatgaatctgctgcaaaactaggaatacatccaagtgactcagaaggagaattaaatatagaactcactgaatcgtatgtggatttgggtattaaaaaggtcaactggaaaaaatccaaagttaccagcattgtacaagaagaagacccaaatgaagagctttcaaaagatgagttcattctgaagttaaaggcagaagtacagcgtttgctgggtagcaactcaatgaagcgtcatctggtgtctcagttacaaaatgacctcaaagactgtcataagaaaattgaagatctccaccaagtgaagaaggatgaaaaaagcattgaggttgagactaaaacagatacctcagaaaaaccaaagaatcaattatggcctgagtcttctacttctgatgttgtcagagatgatattctgctgcttaaaaatgaaattcaagttttacaacaacaaaatcaggaacttaaagaaactgaaggaaaactgagaaatacaaatcaagacttatgtaatcaaatgagacaaatggtacaagattttgaccatgacaaacaagaagctgtggataggtgtgaaaggacttatcagcagcaccatgaagccatgaaaactcaaatacgtgaaagcctattagcaaagcatgctttggagaagcagcagctctttgaggcttatgagagaactcatttgcaactgaggtctgagttggataagttgaataaggaggtgactgctgtgcaggaatgttacctagaagtgtgcagagagaaggataatctagaattgactctcaggaagaccactgaaaaggagcaacagactcaggagaagatcaaagaaaaactcattcaacagcttgaaaaggagtggcagtctaagctggatcaaactataaaggcaatgaaaaagaagaccttagattgtggcagccaaactgaccaagtaaccaccagtgatgttatttccaagaaagagatggcaattatgatagaagagcagaagtgcacaatccagcaaaacttagaacaagagaaggacatagccatcaagggggctatgaagaaactcgaaattgaattggaactcaaacattgtgaaaatattaccaaacaggtagaaatagctgtgcaaaatgctcatcagcgatggctgggagaactaccagagctggcagagtatcaagcacttgtgaaggcagaacagaaaaagtgggaagaacagcatgaggtctctgtgaacaaaaggatatcatttgctgtttctgaagctaaagagaaatggaagagtgagcttgaaaatatgaggaaaaatatacttcctggaaaggaattggaagagaagattcattctcttcagaaggaacttgagttaaagaacgaagaagtccctgtggtcatcagggctgagttagctaaggctcggagtgaatggaacaaagaaaagcaagaagaaatccacagaatccaagaacaaaatgagcaagattaccggcaatttttagatgatcaccgaaataaaattaatgaggtgcttgcggcagctaaagaagactttatgaaacaaaaaactgaactacttcttcagaaggagacagaattacaaacttgtctagaccagagtcgtagagaatggactatgcaggaagccaagcggatccaactggaaatctatcagtatgaggaagacatcctgactgtacttggggttcttttaagtgatacccaaaaggagcacatcagtgattctgaggacaagcagcttttggaaatcatgtcgacttgttcttcaaaatggatgtctgtgcaatattttgaaaaactaaagggctgcatacagaaagcatttcaagatacacttcctctgcttgtagaaaacgctgacccagaatggaaaaagagaaatatggccgagctctctaaggattctgccagccagggcactggccaaggagaccctggacctgctgctggacaccatgctcagcccttggccttacaagcaacagaagcagaagctgataagaaaaaggtccttgaaattaaggatttatgctgtggacactgcttccaagaacttgaaaaggcaaagcaggaatgtcaagatctgaaaggaaaactggagaaatgctgtaggcatcttcagcatttagaaaggaagcacaaagctgtagtggaaaaaattggagaagagaataataaagttgttgaagaattaatagaagaaaacaacgacatgaagaataaattggaagaattgcaaacactttgtaaaacaccaccaaggtcattgtcagcaggggccattgaaaatgcttgcctgccatgcagtgggggagccttggaagaacttcgtgggcagtacattaaagctgtaaaaaaaattaaatgtgacatgcttcgttatattcaggagagtaaggaacgagctgcagaaatggtaaaagcagaggtactgcgagaacgtcaagaaaccgcccgaaagatgcgcaaatattatttgatttgcctccaacagattttgcaggatgatggaaaagaaggggctgagaaaaagattatgaatgctgctagcaaacttgctacaatggcaaaattactggaaacacctatttctagtaagtcccaaagcaaaactacacagtcaggtatgtcaaagtgagtcgccaaatggtttttctatcttttcttctttagctatttaatattttcagtatgaagaaggcagggaaggtaaggagtgagagttaatttgtgaagttttgtatgttttacttaaactagaagtttacgcaaaaagagtacacagtttccaatttaagtaggcagactgagcatgcccatcagtttcctattgctgcttccatccctcgaaatgatagaaaagattttaaacagcaaataaagaatgagaaaaagaagaaattataagtgggttttaaaaagttgcagtgggccaggcatcatggctcacacctgtaatcccagcactttgggaggctgaggtgggaggatcccttgatcccaggaatttgaggttgcagtaagctatgattgtgccactgtactccagcctgggtgacagagtgaggccctgtctcaaaaaaaaaaaaaaaaagtttgcagtggatagaccagaagctacaagaaatccctgagagaaagaanacagtataggatggaagatggaaacctcagttcaaaaccaccgggagatgacnattgcaattaggagcaatatcaaaactgttccacatatgagggtgatatgttccaggagaaatagagggcctaggggatatgaatggggtaattagttggtgttctaaaccaacagcaaccaggtggggttaatcctctctttatttcttcttctcccctcctttccccaacctcaatattgagctgggcaacaacaacaggaacaaagaatctgggagcagggcagtgctccaggtggctagccatatcaagcaggaactgggagccgacttgccttgggaggctgagatgggaggatcacttgagtccgggaggtcaaggctgcagtgagctgtgatcgcaccactgcactccagcctgggaaacagagcagaccctgtctca

SEQ ID NO: 270996 - DNA, 5223 bp, Homo sapiens
  misc_feature (4785)..(4785): n is a, c, g, or t
  misc_feature (4838)..(4838): n is a, c, g, or t
tcggcgattgaaggatgcgagtgctccttaagggcctccgccccgtgagttcggttgtgactaggaaggagctagtggactagagccagggtaaggggatctgctagaagttggtcttccgccaggactagagtttcctcgcggtaacagcctccgtggcctccggaggaccatgtcattagactttggcagtgtggcactaccagtgcaaaatgaagatgaagagtatgacgaagaggactatgaaagagagaaagagttgcagcagttactcacagaccttccccatgacatgctggatgacgacctctcctctccagagctccagtattcggactgcagcgaggatggcacagacggacaaccacatcatcctgagcaattggagatgagctggaatgagcaaatgctgcccaaatctcaaagtgtaaatggctataatgaaattcagagtttatatgctggagaaaaatgtggtaatgtctgggaagaaaatagaagtaaaactgaagaccgacatcctgtgtaccatcctgaagaaggtggagatgaaggtggaagtggttatagtcctccaagtaaatgtgaacagactgatttatatcaccttcctgaaaactttaggccatataccaatggtcagaagcaggaatttaataaccaagcaaccaatgtaattaaattttcagatcctcaatggaaccattttcagggtcccagttgtcaaggtttggaaccgtataataaagtgacatataaaccttatcagtcttctgcccagaataatggctcaccagcccaggagataacaggaagtgacacattcgaaggcctgcaacaacaatttttaggagctaatgagaactctgcagaaaatatgcagattattcaacttcaggttcttaacaaagcaaaagagagacaactggagaacttaattgaaaagttaaatgaaagtgaacgtcaaattcgatatctgaatcaccagcttgtaataataaaagatgaaaaggatggtttgactctcagccttcgagaatcacagaaactctttcagaatggaaaagaaagagagatacagcttgaagctcaaataaaagcactggagactcagatacaagcattaaaagtcaatgaagaacagatgatcaagaagtccagaacaactgaaatggctctggaaagcttgaagcagcagctggtggaccttcatcattctgaatcacttcaacgagctagagaacagcatgagagcattgttatgggcctcacaaagaagtacgaagagcaagtattgtccttacaaaagaatttggatgccacagtcaccgcacttaaagaacaggaagacatttgctctcgtctgaaagatcacgtgaaacaactggaaaggaatcaagaagcaatcaagttagaaaagactgagatcattaataagttgacaagaagtctagaggagagtcaaaagcagtgtgcccacttgttgcagtccgggtcagtacaagaggtggctcagctacagttccagctgcagcaagcacagaaggcacatgctatgagtgcaaacatgaacaaggctttgcaagaagaattaacagaactaaaagatgaaatttctctctatgaatctgctgcaaaactaggaatacatccaagtgactcagaaggagaattaaatatagaactcactgaatcgtatgtggatttgggtattaaaaaggtcaactggaaaaaatccaaagttaccagcattgtacaagaagaagacccaaatgaagagctttcaaaagatgagttcattctgaagttaaaggcagaagtacagcgtttgctgggtagcaactcaatgaagcgtcatctggtgtctcagttacaaaatgacctcaaagactgtcataagaaaattgaagatctccaccaagtgaagaaggatgaaaaaagcattgaggttgagactaaaacagatacctcagaaaaaccaaagaatcaattatggcctgagtcttctacttctgatgttgtcagagatgatattctgctgcttaaaaatgaaattcaagttttacaacaacaaaatcaggaacttaaagaaactgaaggaaaactgagaaatacaaatcaagacttatgtaatcaaatgagacaaatggtacaagattttgaccatgacaaacaagaagctgtggataggtgtgaaaggacttatcagcagcaccatgaagccatgaaaactcaaatacgtgaaagcctattagcaaagcatgctttggagaagcagcagctctttgaggcttatgagagaactcatttgcaactgaggtctgagttggataagttgaataaggaggtgactgctgtgcaggaatgttacctagaagtgtgcagagagaaggataatctagaattgactctcaggaagaccactgaaaaggagcaacagactcaggagaagatcaaagaaaaactcattcaacagcttgaaaaggagtggcagtctaagctggatcaaactataaaggcaatgaaaaagaagaccttagattgtggcagccaaactgaccaagtaaccaccagtgatgttatttccaagaaagagatggcaattatgatagaagagcagaagtgcacaatccagcaaaacttagaacaagagaaggacatagccatcaagggggctatgaagaaactcgaaattgaattggaactcaaacattgtgaaaatattaccaaacaggtagaaatagctgtgcaaaatgctcatcagcgatggctgggagaactaccagagctggcagagtatcaagcacttgtgaaggcagaacagaaaaagtgggaagaacagcatgaggtctctgtgaacaaaaggatatcatttgctgtttctgaagctaaagagaaatggaagagtgagcttgaaaatatgaggaaaaatatacttcctggaaaggaattggaagagaagattcattctcttcagaaggaacttgagttaaagaacgaagaagtccctgtggtcatcagggctgagttagctaaggctcggagtgaatggaacaaagaaaagcaagaagaaatccacagaatccaagaacaaaatgagcaagattaccggcaatttttagatgatcaccgaaataaaattaatgaggtgcttgcggcagctaaagaagactttatgaaacaaaaaactgaactacttcttcagaaggagacagaattacaaacttgtctagaccagagtcgtagagaatggactatgcaggaagccaagcggatccaactggaaatctatcagtatgaggaagacatcctgactgtacttggggttcttttaagtgatacccaaaaggagcacatcagtgattctgaggacaagcagcttttggaaatcatgtcgacttgttcttcaaaatggatgtctgtgcaatattttgaaaaactaaagggctgcatacagaaagcatttcaagatacacttcctctgcttgtagaaaacgctgacccagaatggaaaaagagaaatatggccgagctctctaaggattctgccagccagggcactggccaaggagaccctggacctgctgctggacaccatgctcagcccttggccttacaagcaacagaagcagaagctgataagaaaaaggtccttgaaattaaggatttatgctgtggacactgcttccaagaacttgaaaaggcaaagcaggaatgtcaagatctgaaaggaaaactggagaaatgctgtaggcatcttcagcatttagaaaggaagcacaaagctgtagtggaaaaaattggagaagagaataataaagttgttgaagaattaatagaagaaaacaacgacatgaagaataaattggaagaattgcaaacactttgtaaaacaccaccaaggtcattgtcagcaggggccattgaaaatgcttgcctgccatgcagtgggggagccttggaagaacttcgtgggcagtacattaaagctgtaaaaaaaattaaatgtgacatgcttcgttatattcaggagagtaaggaacgagctgcagaaatggtaaaagcagaggtactgcgagaacgtcaagaaaccgcccgaaagatgcgcaaatattatttgatttgcctccaacagattttgcaggatgatggaaaagaaggggctgagaaaaagattatgaatgctgctagcaaacttgctacaatggcaaaattactggaaacacctatttctagtaagtcccaaagcaaaactacacagtcaggtatgtcaaagtgagtcgccaaatggtttttctatcttttcttctttagctatttaatattttcagtatgaagaaggcagggaaggtaaggagtgagagttaatttgtgaagttttgtatgttttacttaaactagaagtttacgcaaaaagagtacacagtttccaatttaagtaggcagactgagcatgcccatcagtttcctattgctgcttccatccctcgaaatgatagaaaagattttaaacagcaaataaagaatgagaaaaagaagaaattataagtgggttttaaaaagttgcagtgggccaggcatcatggctcacacctgtaatcccagcactttgggaggctgaggtgggaggatcccttgatcccaggaatttgaggttgcagtaagctatgattgtgccactgtactccagcctgggtgacagagtgaggccctgtctcaaaaaaaaaaaaaaaaagtttgcagtggatagaccagaagctacaagaaatccctgagagaaagaanacagtataggatggaagatggaaacctcagttcaaaaccaccgggagatgacnattgcaattaggagcaatatcaaaactgttccacatatgagggtgatatgttccaggagaaatagagggcctaggggatatgaatggggtaattagttggtgttctaaaccaacagcaaccaggtggggttaatcctctctttatttcttcttctcccctcctttccccaacctcaatattgagctgggcaacaacaacaggaacaaagaatctgggagcagggcagtgctccaggtggctagccatatcaagcaggaactgggagccgacttgccttgggaggctgagatgggaggatcacttgagtccgggaggtcaaggctgcagtgagctgtgatcgcaccactgcactccagcctgggaaacagagcagaccctgtctca

SEQ ID NO: 270997 - DNA, 712 bp, Homo sapiens
gcaagctgcagaacagtatgcagaatagtatgactgcatttccttaaaaacttacatgcaatgtttgtgagcaatgtgtttgtatgctggggaataggattttcaccttgggcttcacatgtgtgtattaaggaattttcacaacagatacacataaattcgaaatttaagaaagccacaattaaaacaatttttaacattttaagttttaaacacacatatcccctcagaagctgcctgccaggaaggaatggaagacagtcttctgtctaggttttctctgcaaagtggagaatgaatccacatccaagaacatccctctgctccacggttatttccacctctaggaataaggggtatcacatcagtaccaggcatttcaagaacagcaagttactgacaatccttgaagttaaatgctgggtgcatggattcattaaaacattctctctacttttgtgtacgtttcacaattttctttttgttttcgcccaagctagagtgcagtggcgcgatctcagctcaccacaacctctgcctcccaggttcaagcaattctcctgcatcagcctcccaagtagccaggattacaggagcctgccaccacaactggctaatttttgttttttttgtttgtttgttttttgtgttttgagacggagcccaggctggagtgcaatggcacgatcctggctcactgcaacctctgcct

SEQ ID NO: 270998 - DNA, 633 bp, Homo sapiens
tagaagagggtgcttgagggattaaacatttagccttgtgtatgcatgcatgcaagtggttgccttcatacgtgcccagatttataccagctgtgcacttgttcatcttttgtggaggggggtggggttgagggttttcctctgatgcagagacattccagatggacaagaatgtaaatgccaggttgcatttttaggggcttactaatggagccacagcagattaagagggtaaaaaaaattatgaccgcatgtatttgtagggaagtgtggactggacactattagatttgctatctgtgagatcctcttgtattgacattttataaagtaattgggtattttcaactctctctgaggagtaagaatgagattcttgatgccggcttttgtcaaaataatattttaaggaacattttagtaaagccacttattgaattgtagttttaaaattaatttttaatcttgcaataagacaaaaaaagaaaaaaatttaatttgtgcacataaatgactcatttggatggtagacttattctatatgcattattattattattttttttctgagacagggtctcactttgatacccagcctggagtgcagtagcacaatcacagtttactgcagct

SEQ ID NO: 270999 - DNA, 461 bp, Homo sapiens
ccctgccgctccctctacaccaacttgccagccagccggcagctcagccctttggagcccaagctctacatgtctgcctgcaccggcatgggttccagtccccccaagtccaaggacatggacaatgagggccgtgataaagccgagattgaagatgaagatgaggatgagttcaaggatgaagaccaggatgaggacaaggatgaggatggagtctagagcctcccagagcctggagaggaggcctcggtcagccactccgtggacgtgggccacggtgacccaccatgaagtccccactagccactcgattccctgctctgtcagagttgctgcacatcacaccagcccctgccaagagcaggagtcaccacaggctgaatgcccacgaggagctctgctgagactctcaagggagccagtgaaagaaatagaaataaagcctgtgttgctgggacaca

SEQ ID NO: 271000 - DNA, 384 bp, Homo sapiens
tcctttcctgtctcattggtctgaaatgaaccccatactcatgtcttagcccgtccattctcgaggcactcctggggctgcgttacaccaggaaaggatgggtaagcacattggggattttgttagataacttggtagttaacaaaccctgaccactacaggttttcttaataataggtaaaatatattgagcacttactatttgccaggctaagtgttctaagtattttatgtgcattatgccatttaatccttttaacagtgtgctaaggtaggtgcagaaactgaggcaggagaatggcgtgaacctgggaggtagagcttgcagtgagccgagatcgcgccactgcactccagcctggcaacagagcgagactccatctc

SEQ ID NO: 271001 - DNA, 494 bp, Homo sapiens
taaaccaataaatacagtaacaaaatactacaaagaaaattaagggtaaagggcaatgacttataccataaccctgttttacatatagttttttggggatcaatatgggcttagttgtttgggctaatcattacaaagcagaaatgggacaaatctcagatcactcattcaaaacaagcactccaggccaggcatgcaaatctactcattggccgggcacagtggctcacgcctgtaatcccaacactttgggaggccaaggcgggtggatcacgaggtcaggacatcgagaccatcctggctaacatggtgaaaccacatctctactaaaaatacaaaacattagccaggtgtggtggcgggtgcctgtagtcccagctactcgggaggctgtggcaggagaatggtgtgaacccgggaggtggagcttgcagggagccgagatcgtgccactgcactccagcgtgggcgacagagcaagactccgcctcaaa

SEQ ID NO: 271002 - DNA, 553 bp, Homo sapiens
taaaccaataaatacagtaacaaaatactacaaagaaaattaagggtaaagggcaatgacttataccataaccctgttttacatatagttttttggggaaaaaaaaacagataaaaatcagtcaatctactttgggaatagtaaccaagatccagacatcaatatgggcttagttgtttgggctaatcattacaaagcagaaatgggacaaatctcagatcactcattcaaaacaagcactccaggccaggcatgcaaatctactcattggccgggcacagtggctcacgcctgtaatcccaacactttgggaggccaaggcgggtggatcacgaggtcaggacatcgagaccatcctggctaacatggtgaaaccacatctctactaaaaatacaaaacattagccaggtgtggtggcgggtgcctgtagtcccagctactcgggaggctgtggcaggagaatggtgtgaacccgggaggtggagcttgcagggagccgagatcgtgccactgcactccagcgtgggcgacagagcaagactccgcctcaaa

SEQ ID NO: 271003 - DNA, 515 bp, Homo sapiens
gagattggactacaatgctggaaactctgattttcatagctgggacagtaggaatcactcctccttaaaaattccgaagtctttgtacaaattacccttaatttaagatgaattggtgtagcataattcaggggtcaccacgtactcccctctgaataagaaggctgaatctcagtggtcagcaatgagggagattcattttggtatttttttctttttttttttttacaggcaatctttcttctcatccttctagattaacaggattctttcagtcagctttcaaaactcattcagcgtagatctggtttgttttcttccttgaaaaaaattattaatataataccacagtctctgcgctgaacatcatgatgcatgcctataatcgcagctactcaggaggctgaggtgggagaatcacttgacaccaagagtttgagcattttttagagatgggaccccatttcttaaaataaataaataaataaataaataaataaataaataaataaata

SEQ ID NO: 271004 - DNA, 461 bp, Homo sapiens
aactcttttctattctgtataaccactttttcaccaaaatgatactaaataaatatgctataggaagctatattttgacatgactgttttaggcaaagatacactcaccaacttactccacaagagtttctaatcagagaatatcatatggatctatttgaattgctcccatgcttggctgagcccaaaataatttactgtgcatatgtacaccaagtgagaaggttgaggaggtgtcacttgtacatctctttattcttttttttttgtatgtgtgtgttattttcatgtgttttgaaaggctctcttgcttagcttttattttgccattaaagatttttttctgtgctataactgtatttttaagtctggtttgagttcaagaaatccacaaattcacaaaagattaggaataatttgtgaacaaaatgatgcagaaataaaaaatgcattttccaaat

SEQ ID NO: 271005 - DNA, 486 bp, Homo sapiens
tttacctgtaactgttaaactgccacttatatacatgtgacatttgatacttgtaaaatacatttttattatattttctactattgaatatattttatttttcagagtgggacaatttttagttttagttgcctttttttgttttgtttttgtttttgtttttgtttttgtttttgttatgttacccaggctggtgttgaactcctgggctcaagcttggactatgggagttgctgtattcttttaattgaagtaagggaattgttcactttaatgttgtgtgatttaaaggaaatacatttataaactaccttttcctaaataacttgcatactaaagtctggcacatttttcttggtgttggggcaacggtggtgaagaagacaaagtccttgtggtcaaggagtttttcccttgtaatgggtagtaataggcaatattcatttaagcaaatacatgagataatttcagattgtggcaagtata

SEQ ID NO: 271006 - DNA, 373 bp, Homo sapiens
cctgggtggtgagcccaccaccatgaccagaggggcagggttctatcactgagagctccttcagaactgcatggaatgcgagggtggttcctcaagatgtagtgggcagacaaaagcaggtgagccatcccagacacccaaaacgaaagctatgtgtgcctaggacacacttcccttacattttttctccattcaaggtcttttcaggagctcctcaaactacagatgagagtttttgtaaatataaattcacaagattacacaatttacatgtaaaatgggaccagttttctcacgagattcataaaccagctctgaagcaattctaaaggaattgttgcaaaattgtttttagcattagcaatattactac

SEQ ID NO: 271007 - DNA, 347 bp, Homo sapiens
actggctgggaagactgagagttcactttctggggtgacataatagtgtagatcttggctgggcacggtggttcacgcctgtaatcccaacgctttgggaggccgaggcgggcggatcacctgaggtcaggagttcaaaaccagcctgaccaacatggagaaaccctatctctactaaaaatacaaaattagctgggagtggtggcacatgtctgtaatcccagccacccgggaggctgaggcaggagaatcgctcaaacctgggaagcagaggttgcggtgagctgatattgccccattgcactccagcctgggcaacaagggagaaactgtctcaaaaaaataaa

SEQ ID NO: 271008 - DNA, 318 bp, Homo sapiens
cttacactttacaaactgtgaagcctgtcttcctacccaatctctctctctacttacattacaaaattctccatggctgatgatctctctttcttcatccatgtgccactggcaccaccttcctagtttcacttcttcctgtttccttctttcctttccatctctgtcctgaactttttacccgcttagtggagtcacaatatggaaacgaaaggtttttaaaacagtctcattttttaatatatttggataaattttggtagcctgtttttaaaatcaggtaagtaaaactttacatgtatctttgtatttatcaaa

SEQ ID NO: 271009 - DNA, 471 bp, Homo sapiens
ctatgtgagagttatctttatttagagacagaaaaattgcagcttttgtcccagcaagtgaacaagagtttccgccctcttgggatggaaaagaaaatgaaaaagcaatagaagcaagaaaaaagcacacataaataccttgatcagttatcctttcatcttaatgctcctacaattattgcaaaacaatcatttatgaactcaaactggggacggtaacaaatttgttatgggctgggcacttgccatgctgtgtaaaacctgggtagattcatgtctcaagataatttttaaaaatgtaaacttcctactaaaaggacagcataaggcagtggttaagagcacagagtcaggtgggcacagtggctcatgcctgtaatcccaacagtttgggaggttgaggcaggaggattgcttgagcccaggagtgagagacctgcctggacaacatagctagactcagtctctata

SEQ ID NO: 271010 - DNA, 400 bp, Homo sapiens
ctcacacattgtaattgggattaaatgaatcaggtctagagtgtttaggagattgtctggtacatagtaagcatctaagacgtgttagcaataatattgacagtaatgataagagatgacatgatggtgattatgatggtattaacacatcattggctgtgactgattggacaagtaacgcttttatccaaaggctaccaatccagaagctgcatgttgtcttacagttcctctggctggttgcaaaagatgagctaggccagagtcctctcaaaaaaccaaccaactgtggccaaaaaagtcataggctgggatggacattgtgtggcattgtgaaggttaaaattgggaggcaaaaaagtatttaaaagaagagtgagtaaaaaagaagagacattgt

SEQ ID NO: 271011 - DNA, 396 bp, Homo sapiens
gaggacacacgagggagattataagcatgtgtgtgtgttcgtgtgcatgtgtacacgtatacgttggagattggacattgcgctttttagaaaggtgaagaagttggaaaggtaagaaagggcctggacttgaagggctttgttaggctagctaaaccatttgaaattaattctgagaacaatgaagaactgtttaaaagttttaagtagtactctgcccgccttggcctcccaggagttcgagaccagcctggccaacatggtgaaacccagtctctactaaaaatacaaaaattagccggacgtggtggcgggctcctgtaatcccagctacttggaaggctgaggcaggcgaattgcttgaacctgggaggcagaggttgcagtgagctgaga

SEQ ID NO: 271012 - DNA, 455 bp, Homo sapiens
aaaaagggctgcttttcggtgggggcagatgaaggctcacaggagccctttctcttagagggggcaagtacccttcccttatatctttaatttgaggaatgtatgagataacagttgcagttactgaaatgccactggaatttgaaaacttgacttttttttctttccttttttttttttttttttttttaaaaaaagaaacaaaaaacccacaaaaactacttgcccctcctagggaagctgtgtgccaaagaaccagtgtcataacccctccctcctgctgagctgacgttgcattgttgcatatcccagctactctgtgggttttgtgaagctgtgtgtgaagtctctacctcattgtagtatatgcaggcaagactgcactctcctacagatgtgtggagtaagctgtggtgtagtttttttggcacataataaacacgttgcagcagagt

SEQ ID NO: 271013 - DNA, 359 bp, Homo sapiens
cacccgactccaaaggcttgtttctatgttagactgccttttggatgggcaagaggtctgttcagatatagccagaactggcacagtgacagaatatctccagggacagtaaactgtcagtcagggtagcattgagggattgttgcagatgcaaaactccccacctccctctgccacaactcaacaatggacatctctgtgcccttcataaaattaagtcatcacagaatcttttctcccaattatgcattccttatcatgactggatattcatgtttggtgaatttttgtttttttgtaagctaagaatgtatgcttaggggaggtgctgtttgtggaataaataggtttaaattatt

SEQ ID NO: 271014 - DNA, 162 bp, Homo sapiens
cttgttttcttaaaaattaagccccagattattaaattttaatatgggagtacttttaattttggtgtttaagatggttggcaattatttaaaaaactaaagaacaaagataaattattttccatcttgagactgtagtgaatttttttaagaagcgggggg

SEQ ID NO: 271015 - DNA, 529 bp, Homo sapiens
gttgatggagaaaacttaatgtttgtattagtaaccctggggacagggatgagctgagggtctggccaacagcaaaaaaggcttgctggggagttggttgttctgaccagatctaatgcagctgagctgtgacttcattctgaaacacccattcctaccaccatctgggattcattcacatctaggtgtgccaggcactgttctgggcactagggacacaggtgtgaacaaaacagataaaagagagaaaacagataaaactccttggggagtttacattctggtaggagtattggctcaggccggcacatggcagagccttgtttttaaggtcttgtctacaggtgggcttctcagagtaggggagccccttgagattgtagatgtgtttgtgtgtgtatgaggagaatgtccctgtattttagcaatcccattatcccttaccttagaaaacaggtttatgtactcttaacctattgtaaaaaattattttaaaataacataaactgaaaattccactaaaaaacca

SEQ ID NO: 271016 - DNA, 535 bp, Homo sapiens
atgtgtggggacagggggcatacggaaaatctctataactttcctctcagttttgctctgaatctaaaactaccctttaagaagtcttcttttaaaacaatttacaaagcatgaggtgatacagatgtgggagtttggctcctgtctctgcccaactctgtgacattcgataaattacttaacatgtctctgtttcagtttcctcatctataactgggaaaaataacacctgtcttatagagttgccatggggatgacatgaggcatgtgtctcgttcatatcccatgctcagtgaattagtagcagcagccactgtgtgtttgtgtgtctttatccctcctgggttaatgagctccttgtgggcagggactcacccattctgtaaccaccccatctaacacactgcctggcacttgggctccgcagaagtttgccgagtgaatacttagtaagccctaacctaggcttttctctctggtggacatttgggttgtttctagggtttttgctatgaataaaacacatttcaaagcc

SEQ ID NO: 271017 - DNA, 329 bp, Homo sapiens
aaagaaactaaaatatcttaacagtatttaatttatcacaagtgtcagatgctaagtagaaaaggttgtacttctaagtacagtatcatcccttggcctgttgtcttggaccctctgtgaaaatctaggtaacacaactctccaggaaataatttcttggacaggctagcagcccatctttgcttgtgtgccttatcatcttgatagctttcactgtttttgatttttaacttgtctacagtcttttatcctcactatatagatgataaccaaccacccagtttgccccagacaattcctattctatccttgacagtgctacgtcttta

SEQ ID NO: 271018 - DNA, 346 bp, Homo sapiens
tttttaaacgagaataaataagcattaacatttaaattctgagacattggtactgaagtggagatttctattgctgtggttagagatgaaatagaaataaatgtctttggccgggtttggtggctcatgcttgtaatcccaacactttgggaggccgaggagggcggatcatgaggtccggggttcgagaccagcctgatcaacatggtgaagccctgtctctactaaaaataaaaaaattagcaggcatggtggtgtgcacctgtaatctcagctactcaggaggctgaggcaggagaatcgcttgaacccagggggcggaggttgcagtgagccgagatcgtac

SEQ ID NO: 271019 - DNA, 462 bp, Homo sapiens
tattcttaatgtgcccactgtctcctggagaatgccagcctcccttccataagaatagagggaagagcgaacgttgcagagaattagaactcagtttgtagaaagttaggagcacagcgcagagagtttttgtttttgtttttgttttgagacagtttctctgtttgcctctgcactccagcctggcaacagtgcgagactccatcttaaaaaaaaaaaaaaaaattgacaggcataaatgtatttatggtacattgctcagacaactttaatataaacaacttacagagaaaattgagtcttttgggtaggtgacttgcctgagctgactttgtgataggttttttctgttttttttgtttttgaaatggagtctcactctgtcatgcaggctggagtgcagtggccccatcttggcccactgcactccagcctggcaacagtgcgagactccatctaaaa

SEQ ID NO: 271020 - DNA, 496 bp, Homo sapiens
gtgtgtgtgtgtgtgtgtgtgtgtgtgttccctgtgatggactggagtcctgtctaggatgggttcccgccttgccttctgagctgctaaaataggctgcagcgatccactactgtaaactggaataagcatgtaaataattatcttgttcttattgttcttaattctatgcatagcttatatttatttcagtgtttaatattagaagtattttagtctttagaagtttggtgatgctgtaaccagaaatatttggtaggaacttaactcttatctatttcaattagcctgttggtaaaattggtttccttatgtgtcgcttaacttaaaattacagtttctaaaaatctgtcaacgatgttaagtgaggacttactgtactttatttcttctaatgcctgaataatattctgttaatataccacattatgtttgttgatgggcatttgggttttctccatgttttttcaattataaacaataatgctgtgaacat

SEQ ID NO: 271021 - DNA, 553 bp, Homo sapiens
tagagcagctgtatgtggccagtccctgattttgctttagcctggaaggcttggctgaaataccactgcttcccctccttggcttgcgcagctcttagctattcccccaaggcttcccaacacttacttgacctctgttgatgaaaggtgggactgaattgcgtggatcttattggccactggtagctgaaagagtgaccgtatcagaaactgaagtctcaactaacagacagtggtagatgagaggtgctgtagtacgtgaattcagggaattaggttggttactctaccagcatcttccatccttggtcactggagtgcctggaatcaggctggctctaattctgcccatcctcacacccaactgctctgcacacggagtagactccattcctggaaccagcctaagccaacagaagagaaaaaggaagcatgctgattttagtgtggggtggaactgaacctttgccaaagaaaaaaggtagaatccaagaggaatgggtatttagcaaaagcctagaagcaagtcagttctgctgcatagaaaaaaaaa

SEQ ID NO: 271022 - DNA, 497 bp, Homo sapiens
gtcaatgccaaggggaattgtaaggttggcacactgatatggtttggctgtgtccccacacaaatctcaccttgatttgtaacaatctccacgtgtcaaaggtggggccaggtggagataattaaatcgtggcagtggtttccctcatactattctagtggtagtgaataagttccctgagatctgatggttttataaatgggagttgcactgcacaagctctcttgtctgctgccatataagatttgactttgcccctcatttgccttctgccatggttgtgagccccaccccacggtggaactgtgagtcaattaaacccctttcctttataaattacccagtctcgggtatgtctttattagcagtgtgagaacagattaatacacattccccacacagagttcccaatggggcacactgcctagtggagctgtgagaagagggccaccatcctccagatccaagaatggtagatccaacagcagcttgcaccc

SEQ ID NO: 271023 - DNA, 445 bp, Homo sapiens
ggtagaggtggggtttcaccatgtttcccaggctggtcttgaactcctagactcaagtgatctgcccaccttgacctcccaaagtgctgggattacaagcatgagccaccgcacctggctgtgttattctttatagccaaagatgaattgctttgctagaaggagtaagaatttttaaagccagtttccctttctttccaagactgtctatgtcttacagtgtgcatttgtgacactgctggccagaataagggctccagcaaacagaactctctccggggtaaaaggggctgctgtgtctgtgagtaaccagccgacacttgcatgcacctcagcccttgccctttccaagtgaccagtcagccctgacagtttaacaccaaacacagcctgtcagcctgtaaaaaatgcacagttctttgaaaggtctttttttaaaaacaac

SEQ ID NO: 271024 - DNA, 542 bp, Homo sapiens
acatttttaagggggatttatttgagaaacataaaaacataacagaacacttcataggctactttacatgataaaataggcaaaaacaacatacatattttgcaagcataaacacttgggtatactaatgacagtcatacaggtataagttatgagcagacaaggtgtattcataaaaaaatagcttatataactgcagtcatctgaaataccacgacaaacaacctaagtcttaagatcaatcaaaaaccatgatgggctttttgctgtaggcccgagtggttgctgccgaaatgggcaagttcatgaaacctgggaaggtggtgcttgtcctggctggacgctactctggatgcaaagccgtcatcgtgaagaacattgatgatagcacctcagattgcccctacagccatgctctggtgtctggaattgaccactacccctgcaaagtgacagctgccatgggcaagaagaagatcaccaaggggtcaaagatcaagtcttttgcgaaagtttgtaactacaatcacctaatgcccaaa

SEQ ID NO: 271025 - DNA, 437 bp, Homo sapiens
tatgtaaagtatttgaagaaaagattattttacggccccgtcaaaagtagcttcaagcaagagctattgttcaggaccttttatagacatagatgaaattccttttgccatttgaacagtgtttacattcgggaaagttcacagttaagtctttgacatactgtgaaaggatcttttgttctctacaaaaacatacttcctcatcctttgagtcaccttgtttttattcccttgtttacttttctggggaaataatgcccacctcccaagtaatgtcaagggaagaactatttcagaaatctaagttgttctgtatgaggaaagagggcttggattttggcagaaaaaaatcagaaatatttttaaaacctgaaccagataaataatgtaatctcaagcttccaaaaattatttgggtagggttttttccaatgcta

SEQ ID NO: 271026 - DNA, 390 bp, Homo sapiens
caaggactgtgccaggagaggtgattaagcaattagaatattttgaagtctaaaataactgtagtatcaggagaacaactgaacgagaaaataaattactgagagtaaagcagtctgtagattttgggaagattcgtaggtgtgtgagaaacaagacattttggaatcttaatgtaatctgagaagtaaaatagacctgtattcctgtcattctctttctcattttcttcctcctcaccaaatcatgatgttgaaggtcagtgagaagagtcaattcgggctgtttctcacgaaggtgtacaccagtcatccggaatgtcagtatcccttattcagagtgattttgataaatgtgcttaaataaataaacactctcatttcaactaaata

SEQ ID NO: 271027 - DNA, 308 bp, Homo sapiens
cccaacctccagaactgtgagaaataaatttccgatgtttataagctacccagtttatggtgttttgttatagcagcctgaacagactaaaacaatatttaaataaataatgctcagaaacttctcaaatttgaggaaaaacattaaccacatttaagaagctcaagaaactccaagtaggataaactacaccaagacacacgataatcaaactgtcaaaaggtaaagagagaatgttgaaagcatcaagagaagtaactcatcacatgcaaggatccttgctaagattaatagctgatttctcatca

SEQ ID NO: 271028 - DNA, 502 bp, Homo sapiens
agtactaggaatgataactgaaacccctactgaataattccaagtactgactaccttctaaaatagggaaagacactagcattcatttacaaatctattttatgccaaaatctgtgaacagttcctatacatagctaaatatattataaaataatcatgtttataattatagtatagcagaaatacattaagaatatgcgggtaaatgaattttttatatctgaattagtagatagaagatacaatttgagtgggtactccttttccccaatataacagtttcttcaagcctcttctggggctgtttggcacattaaaagactattttggggacagggaagctggttaattaataccgattgactagaccatgcatgctagaagtagtcctcaatgtaattacccaaccgtctcatttagaaaagaaatgcagcataggttcagttcacaaatgcagagtaggttttttttgtttgtttgcattgctacttaaaaggttgcc

SEQ ID NO: 271029 - DNA, 365 bp, Homo sapiens
ttcaagtgaagctgggcttcagggaggctttgtggaatggtgagaagaacagtgtgactaaggcacagaaggctgagtgatgccctgcagtactattgtagggttggaggccagctgggaaagaaagaaccattgcattagagaatgggaacatgccttcggatatagaaatggcaaatccatgagatagtttaaagtgagaatactagaagcattcccaccaaacatggtgtgtcttggtgcctgctgtatcccaggctccacgagatgctggagtcagcactgaacaaacagagtttcctctgctcgtggaaatgcgttccgttggggaagggatttttctgctgagtctggctattcatagt

SEQ ID NO: 271030 - DNA, 342 bp, Homo sapiens
caggcagaatagcctgaaggccttgccattcaggagctcacagctgaacagtgcaggaagacacatgcaaccataacatgatatactagagctataacagcagttgattcttccctgtaattatttaagcaattactctcttggtaattactctaattgttattaaattcaaaaaattataaaaatagtatgtagatttaaaaaacacagaggtgcataaaatttaaaagtttcctgttaccaggtatgtatattcctcagacctttctatatacatattcaaactatatatacctatttgtacagtcatttaagaaaaactgaatcaaaatagaaatattg

SEQ ID NO: 271031 - DNA, 307 bp, Homo sapiens
taccccaacaaacacagtccacagcctacatcccagcagtgagtgacccccaaccttccctccacccctgatctgagcttggtctccacacatcaagcttatttctgtgccaaagagtacagcccagatgaacctgcttttctgatgtagcccccagaattctgctcaaacacaaattcctcatacatgtatggaaaggaatgcagacttttgacatgttaatatgtatatagtcatggatatgtaggacttgattaaggtatattttatgatacatgtaataaacagaaaaaaaagtaggtgatta

SEQ ID NO: 271032 - DNA, 471 bp, Homo sapiens
actcgagatgggttaggatgcacatgacaaactgttggaatgtggggctcttccaaaaggagagcaggagtgcaagacttttccagaaaggctggtggctttggcagagaaatggcacctaagcatatttgtaaagctttctcctcctctatgttagagtcagaagctgcatgccacccgtgtgcagagccaagtccagctcagctttcccacaggtttgcttacacttgctgggtgaccccagcctggctggaggtgcaagggagcacgtttgtaccttgtaatgatttctctctagagtagtgcagatgttcgcagggataatgtcaactgccacagcaactggaattctatctgcaaacttttatttgctgtgttggaatcattagttaattaggacttttttttttttttttggaaatggaatttcactccagcctgggtgacagagcaagactctgtctcaaaaaa

SEQ ID NO: 271033 - DNA, 471 bp, Homo sapiens
caggagttcaggaccagctggggcaacatagcaagactctgtctcttgaaaaaaaaaacttaaaaaattagcaggttgtggtagtgcacactgatattcccagctacttgggaggcccaggtgggagggctgcttgagcctaggagtttgaggctgcagagacctatggtcataccagcgcactccagcctggttgacagagcagattccaactctttaggaaagaaccaaaacactcatccctcaactacataaaatagttataagttattattttccctgaagtctctagcagtcacttcgtccatgatggatatttctggcagggaactgtgctacatgaaggaagtgaatgaaagtcctgaaaatcaggataatggtgattacccttgattcaatcaaactgtactcaattctaagtcttcttatactgtctttatattttcttgagacacacttatgacattcctc

SEQ ID NO: 271034 - DNA, 285 bp, Homo sapiens
ctcaccacctaacacattttatagcgagtctgcactttctaggaaaatgagtcaaatatacagtaagtcagtcatcctgtctctttcttgagggacctggaggagggacttgaaccagtgcctggaatgtgagtgcagaatgctgtctcgcctgcacttcattattgtctgattgggcccaagaaggtctgtgggagagctcaatggataagattatttgtttatattaatcgagttgtatgtggttaatgtatctgccttcacaaaactgacattttccctgtg

SEQ ID NO: 271035 - DNA, 3597 bp, Homo sapiens
ggcacgaggagccctgagagtccgccgccaacgcgcaggtgctagcggccccttcgccctgcagcccctttgcttttactctgtccaaagttaacatgtcactgaaaaacgagccacgggtaaatacctctgcactgcagaaaattgctgctgacatgagtaatatcatagaaaatctggacacgcgggaactccactttgagggagaggaggtagactacgacgtgtctcccagcgatcccaagatacaagaagtgtatatccctttctctgctatttataacactcaaggatttaaggagcctaatatacagacgtatctctccggctgtccaataaaagcacaagttctggaagtggaacgcttcacatctacaacaagggtaccaagtattaatctttacactattgaattaacacatggggaatttaaatggcaagttaagaggaaattcaagcattttcaagaatttcacagagagctgctcaagtacaaagcctttatccgcatccccattcccactagaagacacacgtttaggaggcaaaacgtcagagaggagcctcgagagatgcccagtttgccccgttcatctgaaaacatgataagagaagaacaattccttggtagaagaaaacaactggaagattacttgacaaagatactaaaaatgcccatgtatagaaactatcatgccacaacagagtttcttgatataagccagctgtctttcatccatgatttgggaccaaagggcatagaaggtatgataatgaaaagatctggaggacacagaataccaggcttgaattgctgtggtcagggaagagcctgctacagatggtcaaaaagatggttaatagtgaaagattcctttttattgtatatgaaaccagacagcggtgccattgccttcgtcctgctggtagacaaagaattcaaaattaaggtggggaagaaggagacagaaacgaaatatggaatccgaattgataatctttcaaggacacttattttaaaatgcaacagctatagacatgctcggtggtggggaggggctatagaagaattcatccagaaacatggcaccaactttctcaaagatcatcgatttgggtcatatgctgctatccaagagaatgctttagctaaatggtatgttaatgccaaaggatattttgaagatgtggcaaatgcaatggaagaggcaaatgaagagatttttatcacagactggtggctgagtccagaaatcttcctgaaacgcccagtggttgagggaaatcgttggaggttggactgcattcttaaacgaaaagcacaacaaggagtgaggatcttcataatgctctacaaagaggtggaactcgctcttggcatcaatagtgaatacaccaagaggactttgatgcgtctacatcccaacataaaggtgatgagacacccggatcatgtgtcatccaccgtctatttgtgggctcaccatgagaagcttgtcatcattgaccaatcggtggcctttgtgggagggattgacctggcctatggaaggtgggacgacaatgagcacagactcacagacgtgggcagtgtgaagcgggtcacttcaggaccgtctctgggttccctcccacctgccgcaatggagtctatggaatccttaagactcaaagataaaaatgagcctgttcaaaacctacccatccagaagagtattgatgatgtggattcaaaactgaaaggaataggaaagccaagaaagttctccaaatttagtctctacaagcagctccacaggcaccacctgcacgacgcagatagcatcagcagcattgacagcacctccagttattttaatcactatagaagtcatcacaatttaatccatggtttaaaaccccacttcaaactctttcacccgtccagtgagtctgagcaaggactcactagacctcatgctgataccgggtccatccgtagtttacagacaggtgtgggagagctgcatggggaaaccagattctggcatggaaaggactactgcaatttcgtcttcaaagactgggttcaacttgataaaccttttgctgatttcattgacaggtactccacgccccggatgccctggcatgacattgcctctgcagtccacgggaaggcggctcgtgatgtggcacgtcacttcatccagcgctggaacttcacaaaaattatgaaatcaaaatatcggtccctttcttatccttttctgcttccaaagtctcaaacaacagcccatgagttgagatatcaagtgcctgggtctgtccatgctaacgtacagttgctccgctctgctgctgattggtctgctggtataaagtaccatgaagagtccatccacgccgcttacgtccatgtgatagagaacagcaggcactatatctatatcgaaaaccagtttttcataagctgtgctgatgacaaagttgtgttcaacaagataggcgatgccattgcccagaggatcctgaaagctcacagggaaaaccagaaataccgggtatatgtcgtgataccacttctgccagggttcgaaggagacatttcaaccggcggaggaaatgctctacaggcaatcatgcacttcaactacagaaccatgtgcagaggagaaaattccatccttggacagttaaaagcagagcttggtaatcagtggataaattacatatcattctgtggtcttagaacacatgcagagctcgaaggaaacctagtaactgagcttatctatgtccacagcaagttgttaattgctgatgataacactgttattattggctctgccaacataaatgaccgcagcatgctgggaaagcgtgacagtgaaatggctgtcattgtgcaagatacagagactgttccttcagtaatggatggaaaagagtaccaagctggccggtttgcccgaggacttcggctacagtgctttagggttgtccttggctatcttgatgacccaagtgaggacattcaggatccagtgagtgacaaattcttcaaggaggtgtgggtttcaacagcagctcgaaatgctacaatttatgacaaggttttccggtgccttcccaatgatgaagtacacaatttaattcagctgagagactttataaacaagcccgtattagctaaggaagatcccattcgagctgaggaggaactgaagaagatccgtggatttttggtgcaattccccttttatttcttgtctgaagaaagcctactgccttctgttgggaccaaagaggccatagtgcccatggaggtttggacttaagagatattcattggcagctcaaagacttccaccctggagaccacactgcacacagtgacttcctggggatgtcatagccaaagccaggcctgacgcattctcgtatccaacccaaggaccttttggaatgactggggagggctgcagtcacattgatgtaaggactgtaaacatcagcaagactttataattccttctgcctaacttgtaaaaagggggctgcattcttgttggtagcatgtactctgttgagtaaaacacatattcaaattccgta

SEQ ID NO: 271036 - DNA, 495 bp, Homo sapiens
ttctcatagaagcacttgttctgtttttacttgtgttaggattaaacctacagatactgcatgggattggttgttttgaaacctctgtaattattttctcctttacatattttcagaaccatgtgcagaggagaaaattccatccttggacagttaaaagcagagcgtaagtaactgctttttttctcatatcattgttttttattatgaaggtgaggtatcagtaatcattaatgttttcacagtgtgattatagaactctgtttataaaaggtaccccacaaaatgttcacctgtaataaagtatttattctcattaagttgcccaaaccattattcaaatgaagacaccaagactaaataggtaataaaaaccgagcatctttgtaatttctatttatttttatttatatatagttgttttaataataacaatcatctttatgaggtattatagttgtttgttcttctttatctactggatacaatttttta

SEQ ID NO: 271037 - DNA, 1054 bp, Homo sapiens
ggcacgaggagccctgagagtccgccgccaacgcgcaggtgctagcggccccttcgccctgcagcccctttgcttttactctgtccaaagttaacatgtcactgaaaaacgagccacgggtaaatacctctgcactgcagaaaattgctgctgacatgagtaatatcatagaaaatctggacacgcgggaactccactttgagggagaggaggtagactacgacgtgtctcccagcgatcccaagatacaagaagtgtatatccctttctctgctatttataacactcaaggatttaaggagcctaatatacagacgtatctctccggctgtccaataaaagcacaagttctggaagtggaacgcttcacatctacaacaagggtaccaagtattaatctttacactattgaattaacacatggggaatttaaatggcaagttaagaggaaattcaagcattttcaagaatttcacagagagctgctcaagtacaaagcctttatccgcatccccattcccactagaagacacacgtttaggaggcaaaacgtcagagaggagcctcgagagatgcccagtttgccccgttcatctgaaaacatgataagagaagaacaattccttggtagaagaaaacaactggaagattacttgacaaagatactaaaaatgcccatgtatagaaactatcatgccacaacagagtttcttgatataagccagctgtctttcatccatgatttgggaccaaagggcatagaaggtatgataatgaaaagatctggaggacacagaataccaggcttgaattgctgtggtcagggaagagcctgctacagatggtcaaaaaggctgtcagaacccacctgtctgtgtgcacagcagtctgggaagtgtcaacagctcccaggagcagccatcagccaagaactgatcggagtccagccccatcctcctcagttggggtgactctgcagcagtctctacactgtctcccagaactccttagctggcttacagcacagctgcccacaataaaaagcgatcggcag

SEQ ID NO: 271038 - DNA, 3306 bp, Homo sapiens
cctttgtgttctgccatgattgtgaggcctccccagccatgtggaactttgctccgctctgctgctgattggtctgctggtataaagtaccatgaagagtccatccacgccgcttacgtccatgtgatagagaacagcaggcactatatctatatcgaaaaccagtttttcataagctgtgctgatgacaaagttgtgttcaacaagataggcgatgccattgcccagaggatcctgaaagctcacagggaaaaccagaaataccgggtatatgtcgtgataccacttctgccagggttcgaaggagacatttcaaccggcggaggaaatgctctacaggcaatcatgcacttcaactacagaaccatgtgcagaggagaaaattccatccttggacagttaaaagcagagcttggtaatcagtggataaattacatatcattctgtggtcttagaacacatgcagagctcgaaggaaacctagtaactgagcttatctatgtccacagcaagttgttaattgctgatgataacactgttattattggctctgccaacataaatgaccgcagcatgctgggaaagcgtgacagtgaaatggctgtcattgtgcaagatacagagactgttccttcagtaatggatggaaaagagtaccaagctggccggtttgcccgaggacttcggctacagtgctttagggttgtccttggctatcttgatgacccaagtgaggacattcaggatccagtgagtgacaaattcttcaaggaggtgtgggtttcaacagcagctcgaaatgctacaatttatgacaaggttttccggtgccttcccaatgatgaagtacacaatttaattcagctgagagactttataaacaagcccgtattagctaaggaagatcccattcgagctgaggaggaactgaagaagatccgtggatttttggtgcaattccccttttatttcttgtctgaagaaagcctactgccttctgttgggaccaaagaggccatagtgcccatggaggtttggacttaagagatattcattggcagctcaaagacttccaccctggagaccacactgcacacagtgacttcctggggatgtcatagccaaagccaggcctgacgcattctcgtatccaacccaaggaccttttggaatgactggggagggctgcagtcacattgatgtaaggactgtaaacatcagcaagactttataattccttctgcctaacttgtaaaaagggggctgcattcttgttggtagcatgtactctgttgagtaaaacacatattcaaattccgtataccaaaatccatttcctttgtaacaagaatttaccagtaactgtgatctaggttgccaaaagttgtctgaatctccttattcttctctgatcttcatttatgcagccaatgtctagctggacctgccctcatcttgcagttcatacaggcactgtttgagagattgtttattattagatgttgtaatgctgcttcaagattcttcatggttacatgggatgcccctgctcatctggtcctgaagtagtaacattcacccaaatgaggatatagtcattattccttttcagtcactgtacgaacacggcagactttagcctacacagtagactgtgttaggcacttctggtaacattgacactgtatcttgacaccactaagccaacaggaaggaataaattcccaatattgagacagagatttatttcattttgctcccaaaggcactgacaacatgagtccttgtgattaggcccacctgatcaaatgtaaaaacatgcatgggatatttgattacgtaacaaccagctaaaactgagagcacacagccttcggaaacccccaaggtgtcgaggaggatcagatccagataagagaagatgattccttctagtcctgtaaaatttcctgtcatccttagctgctgggttgattgaaatttgatctctacatttcaaaatcaaactagtgaatacagtttgtctttcaagagaatcagaggcatcgtaactcctaccaagttagtaagtatgagtctaaccttgtttgacattcaggtcttctgctacattatcttctttgagaaaaattaattgattataaaatatgtgctacttcacttacattattaaatatgtattaacgcctctcaccagggcttccagtgaagttacaatgccctagtctgtgaattagtctggaaacgtgtttttccttttcggatgttagagtaccctttgataaactaaattttactaagctgaacaactctgacagtctaaagagctaatgtgggttaccaaaaggcctgtacctgtaaaacaaaatgcaggtgtaatgattatacatgtctatggattacctggacatactctcatttgggttgttcttcaaagaagcaagcagccgatccctgttttcataaagctaatacttcagttggaaaaattaaacaggagcacaaagtcagggataggggttagcagaagagagaaatagtgtcacatcaagggcaggatctcatagctagggaacatttcacaaataaggtgagattttgtaaccaataataaaaatgaatgtttttataagtaaataacttatttttcatatggctaaagatggtaaaatgacttcattctatagccattgtaaataagaatttgctattgatgaaagaagttcagattggcatttgaagtattgagtgtatgggatctctaaggatttcttagattttatatttaaatattttttaaaccttagaggagtcaacaaactggctcttgattttcagcaccctactctcatgaaaaaagcctgaaaggaccctttcccttataagtaatttaatccaatttctccccattttatagatgaggaaactgaggctcagatcagatgagaactcacttaaatccactcaatgtgtagatggtagagctgggactagcaacattgctgcagcccattgttggcctctctcttcactttatcattgcccaagaatgaggatatgcagtaaacagaattcaggcaagatacctctaagctgttttgaaccctctgatattttgtatttatgtgtttgtctgtctccccctactagaatgtaagctccatggggcagggacttcactgtattttgttcatagtgtatccccagagcctggaccagtgcttggcacataggagatggcaataaatgcttgtagaattaataaacaaggtgaaggagagagctaatgaaatgaaaatcttagtc

SEQ ID NO: 271039 - DNA, 3206 bp, Homo sapiens
gagctcggtccctgttaaagcacacccgatagagaacagcaggcactatatctatcgaaaaccagtttttcataagctgtgctgatgacaaagttgtgttcaacaagataggcgatgccattgcccagaggatcctgaaagctcacagggaaaaccagaaataccgggtatatgtcgtgataccacttctgccagggttcgaaggagacatttcaaccggcggaggaaatgctctacaggcaatcatgcacttcaactacagaaccatgtgcagaggagaaaattccatccttggacagttaaaagcagagcttggtaatcagtggataaattacatatcattctgtggtcttagaacacatgcagagctcgaaggaaacctagtaactgagcttatctatgtccacagcaagttgttaattgctgatgataacactgttattattggctctgccaacataaatgaccgcagcatgctgggaaagcgtgacagtgaaatggctgtcattgtgcaagatacagagactgttccttcagtaatggatggaaaagagtaccaagctggccggtttgcccgaggacttcggctacagtgctttagggttgtccttggctatcttgatgacccaagtgaggacattcaggatccagtgagtgacaaattcttcaaggaggtgtgggtttcaacagcagctcgaaatgctacaatttatgacaaggttttccggtgccttcccaatgatgaagtacacaatttaattcagctgagagactttataaacaagcccgtattagctaaggaagatcccattcgagctgaggaggaactgaagaagatccgtggatttttggtgcaattccccttttatttcttgtctgaagaaagcctactgccttctgttgggaccaaagaggccatagtgcccatggaggtttggacttaagagatattcattggcagctcaaagacttccaccctggagaccacactgcacacagtgacttcctggggatgtcatagccaaagccaggcctgacgcattctcgtatccaacccaaggaccttttggaatgactggggagggctgcagtcacattgatgtaaggactgtaaacatcagcaagactttataattccttctgcctaacttgtaaaaagggggctgcattcttgttggtagcatgtactctgttgagtaaaacacatattcaaattccgtataccaaaatccatttcctttgtaacaagaatttaccagtaactgtgatctaggttgccaaaagttgtctgaatctccttattcttctctgatcttcatttatgcagccaatgtctagctggacctgccctcatcttgcagttcatacaggcactgtttgagagattgtttattattagatgttgtaatgctgcttcaagattcttcatggttacatgggatgcccctgctcatctggtcctgaagtagtaacattcacccaaatgaggatatagtcattattccttttcagtcactgtacgaacacggcagactttagcctacacagtagactgtgttaggcacttctggtaacattgacactgtatcttgacaccactaagccaacaggaaggaataaattcccaatattgagacagagatttatttcattttgctcccaaaggcactgacaacatgagtccttgtgattaggcccacctgatcaaatgtaaaaacatgcatgggatatttgattacgtaacaaccagctaaaactgagagcacacagccttcggaaacccccaaggtgtcgaggaggatcagatccagataagagaagatgattccttctagtcctgtaaaatttcctgtcatccttagctgctgggttgattgaaatttgatctctacatttcaaaatcaaactagtgaatacagtttgtctttcaagagaatcagaggcatcgtaactcctaccaagttagtaagtatgagtctaaccttgtttgacattcaggtcttctgctacattatcttctttgagaaaaattaattgattataaaatatgtgctacttcacttacattattaaatatgtattaacgcctctcaccagggcttccagtgaagttacaatgccctagtctgtgaattagtctggaaacgtgtttttccttttcggatgttagagtaccctttgataaactaaattttactaagctgaacaactctgacagtctaaagagctaatgtgggttaccaaaaggcctgtacctgtaaaacaaaatgcaggtgtaatgattatacatgtctatggattacctggacatactctcatttgggttgttcttcaaagaagcaagcagccgatccctgttttcataaagctaatacttcagttggaaaaattaaacaggagcacaaagtcagggataggggttagcagaagagagaaatagtgtcacatcaagggcaggatctcatagctagggaacatttcacaaataaggtgagattttgtaaccaataataaaaatgaatgtttttataagtaaataacttatttttcatatggctaaagatggtaaaatgacttcattctatagccattgtaaataagaatttgctattgatgaaagaagttcagattggcatttgaagtattgagtgtatgggatctctaaggatttcttagattttatatttaaatattttttaaaccttagaggagtcaacaaactggctcttgattttcagcaccctactctcatgaaaaaagcctgaaaggaccctttcccttataagtaatttaatccaatttctccccattttatagatgaggaaactgaggctcagatcagatgagaactcacttaaatccactcaatgtgtagatggtagagctgggactagcaacattgctgcagcccattgttggcctctctcttcactttatcattgcccaagaatgaggatatgcagtaaacagaattcaggcaagatacctctaagctgttttgaaccctctgatattttgtatttatgtgtttgtctgtctccccctactagaatgtaagctccatggggcagggacttcactgtattttgttcatagtgtatccccagagcctggaccagtgcttggcacataggagatggcaataaatgcttgtagaattaataaacaaggtgaaggagagagctaatgaaatgaaaatcttagtc

SEQ ID NO: 271040 - DNA, 3144 bp, Homo sapiens
  misc_feature (3064)..(3064): n is a, c, g, or t
ggcacgaggagccctgagagtccgccgccaacgcgcaggtgctagcggccccttcgccctgcagcccctttgcttttactctgtccaaagttaacatgtcactgaaaaacgagccacgggtaaatacctctgcactgcagaaaattgctgctgacatgagtaatatcatagaaaatctggacacgcgggaactccactttgagggagaggaggtagactacgacgtgtctcccagcgatcccaagatacaagaagtgtatatccctttctctgctatttataacactcaaggatttaaggagcctaatatacagacgtatctctccggctgtccaataaaagcacaagttctggaagtggaacgcttcacatctacaacaagggtaccaagtattaatctttacactattgaattaacacatggggaatttaaatggcaagttaagaggaaattcaagcattttcaagaatttcacagagagctgctcaagtacaaagcctttatccgcatccccattcccactagaagacacacgtttaggaggcaaaacgtcagagaggagcctcgagagatgcccagtttgccccgttcatctgaaaacatgataagagaagaacaattccttggtagaagaaaacaactggaagattacttgacaaagatactaaaaatgcccatgtatagaaactatcatgccacaacagagtttcttgatataagccagctgtctttcatccatgatttgggaccaaagggcatagaaggtatgataatgaaaagatctggaggacacagaataccaggcttgaattgctgtggtcagggaagagcctgctacagatggtcaaaaagatggttaatagtgaaagattcctttttattgtatatgaaaccagacagcggtgccattgccttcgtcctgctggtagacaaagaattcaaaattaaggtggggaagaaggagacagaaacgaaatatggaatccgaattgataatctttcaaggacacttattttaaaatgcaacagctatagacatgctcggtggtggggaggggctatagaagaattcatccagaaacatggcaccaactttctcaaagatcatcgatttgggtcatatgctgctatccaagagaatgctttagctaaatggtatgttaatgccaaaggatattttgaagatgtggcaaatgcaatggaagaggcaaatgaagagatttttatcacagactggtggctgagtccagaaatcttcctgaaacgcccagtggttgagggaaatcgttggaggttggactgcattcttaaacgaaaagcacaacaaggagtgaggatcttcataatgctctacaaagaggtggaactcgctcttggcatcaatagtgaatacaccaagaggactttgatgcgtctacatcccaacataaaggtgatgagacacccggatcatgtgtcatccaccgtctatttgtgggctcaccatgagaagcttgtcatcattgaccaatcggtggcctttgtgggagggattgacctggcctatggaaggtgggacgacaatgagcacagactcacagacgtgggcagtgtgaagcgggtcacttcaggaccgtctctgggttccctcccacctgccgcaatggagtctatggaatccttaagactcaaagataaaaatgagcctgttcaaaacctacccatccagaagagtattgatgatgtggattcaaaactgaaaggaataggaaagccaagaaagttctccaaatttagtctctacaagcagctccacaggcaccacctgcacgacgcagatagcatcagcagcattgacagcacctccagttattttaatcactatagaagtcatcacaatttaatccatggtttaaaaccccacttcaaactctttcacccgtccagtgagtctgagcaaggactcactagacctcatgctgataccgggtccatccgtagtttacagacaggtgtgggagagctgcatggggaaaccagattctggcatggaaaggactactgcaatttcgtcttcaaagactgggttcaacttgataaaccttttgctgatttcattgacaggtactccacgccccggatgccctggcatgacattgcctctgcagtccacgggaaggcggctcgtgatgtggcacgtcacttcatccagcgctggaacttcacaaaaattatgaaatcaaaatatcggtccctttcttatccttttctgcttccaaagtctcaaacaacagcccatgagttgagatatcaagtgcctgggtctgtccatgctaacgtacagttgctccgctctgctgctgattggtctgctggtataaagtaccatgaagagtccatccacgccgcttacgtccatgtgatagagaacagcaggcactatatctatatcgaaaaccagtttttcataagctgtgctgatgacaaagttgtgttcaacaagataggcgatgccattgcccagaggatcctgaaagctcacagggaaaaccagaaataccgggtatatgtcgtgataccacttctgccagggttcgaaggagacatttcaaccggcggaggaaatgctctacaggcaatcatgcacttcaactacagaaccatgtgcagaggagaaaattccatccttggacagttaaaagcagagcttggtaatcagtggataaattacatatcattctgtggtcttagaacacatgcagagctcgaaggaaacctagtaactgagcttatctatgtccacagcaagttgttaattgctgatgataacactgttattattggctctgccaacataaatgaccgcagcatgctgggaaagcgtgacagtgaaatggctgtcattgtgcaagatacagagactgttccttcagtaatggatggaaaagagtaccaagctggccggtttgcccgaggacttcggctacagtgctttaggtctaaaatgactccaggtgtcgaagatccctgatctttggcaagaagatgcaaattttaaactaatctgtggtgaagcagagagantactgggctaggaagctgggctcgtttcagctgtgcgatcctaaataagtccattcaataaagtgttatttagaactttc

SEQ ID NO: 271041 - DNA, 364 bp, Homo sapiens
ggtttgcccgaggacttcggctacagtgctttaggtcagtccgccaaagtgtgtctctctgatgcatttccactgcagcagtcgctgggacccagccccgctagccctgagcacatgggtcatcctaggttcttcttcatctaaaacagtgtgtcccagaatataggatatgtaccaccagtagtatgcgaaatgactttaggtggtacatgaatattttttattttaatagctttttattactgtcacgtgcagtagaaaaaactgcagtggtgcagttacagctcattgcatccttgaattcctaggctcaagcaatcctcctggctcagcattccgagtagctgggactacaggcccgtgt

SEQ ID NO: 271042 - DNA, 5582 bp, Homo sapiens
ggcacgaggagccctgagagtccgccgccaacgcgcaggtgctagcggccccttcgccctgcagcccctttgcttttactctgtccaaagttaacatgtcactgaaaaacgagccacgggtaaatacctctgcactgcagaaaattgctgctgacatgagtaatatcatagaaaatctggacacgcgggaactccactttgagggagaggaggtagactacgacgtgtctcccagcgatcccaagatacaagaagtgtatatccctttctctgctatttataacactcaaggatttaaggagcctaatatacagacgtatctctccggctgtccaataaaagcacaagttctggaagtggaacgcttcacatctacaacaagggtaccaagtattaatctttacactattgaattaacacatggggaatttaaatggcaagttaagaggaaattcaagcattttcaagaatttcacagagagctgctcaagtacaaagcctttatccgcatccccattcccactagaagacacacgtttaggaggcaaaacgtcagagaggagcctcgagagatgcccagtttgccccgttcatctgaaaacatgataagagaagaacaattccttggtagaagaaaacaactggaagattacttgacaaagatactaaaaatgcccatgtatagaaactatcatgccacaacagagtttcttgatataagccagctgtctttcatccatgatttgggaccaaagggcatagaaggtatgataatgaaaagatctggaggacacagaataccaggcttgaattgctgtggtcagggaagagcctgctacagatggtcaaaaagatggttaatagtgaaagattcctttttattgtatatgaaaccagacagcggtgccattgccttcgtcctgctggtagacaaagaattcaaaattaaggtggggaagaaggagacagaaacgaaatatggaatccgaattgataatctttcaaggacacttattttaaaatgcaacagctatagacatgctcggtggtggggaggggctatagaagaattcatccagaaacatggcaccaactttctcaaagatcatcgatttgggtcatatgctgctatccaagagaatgctttagctaaatggtatgttaatgccaaaggatattttgaagatgtggcaaatgcaatggaagaggcaaatgaagagatttttatcacagactggtggctgagtccagaaatcttcctgaaacgcccagtggttgagggaaatcgttggaggttggactgcattcttaaacgaaaagcacaacaaggagtgaggatcttcataatgctctacaaagaggtggaactcgctcttggcatcaatagtgaatacaccaagaggactttgatgcgtctacatcccaacataaaggtgatgagacacccggatcatgtgtcatccaccgtctatttgtgggctcaccatgagaagcttgtcatcattgaccaatcggtggcctttgtgggagggattgacctggcctatggaaggtgggacgacaatgagcacagactcacagacgtgggcagtgtgaagcgggtcacttcaggaccgtctctgggttccctcccacctgccgcaatggagtctatggaatccttaagactcaaagataaaaatgagcctgttcaaaacctacccatccagaagagtattgatgatgtggattcaaaactgaaaggaataggaaagccaagaaagttctccaaatttagtctctacaagcagctccacaggcaccacctgcacgacgcagatagcatcagcagcattgacagcacctccagttattttaatcactatagaagtcatcacaatttaatccatggtttaaaaccccacttcaaactctttcacccgtccagtgagtctgagcaaggactcactagacctcatgctgataccgggtccatccgtagtttacagacaggtgtgggagagctgcatggggaaaccagattctggcatggaaaggactactgcaatttcgtcttcaaagactgggttcaacttgataaaccttttgctgatttcattgacaggtactccacgccccggatgccctggcatgacattgcctctgcagtccacgggaaggcggctcgtgatgtggcacgtcacttcatccagcgctggaacttcacaaaaattatgaaatcaaaatatcggtccctttcttatccttttctgcttccaaagtctcaaacaacagcccatgagttgagatatcaagtgcctgggtctgtccatgctaacgtacagttgctccgctctgctgctgattggtctgctggtataaagtaccatgaagagtccatccacgccgcttacgtccatgtgatagagaacagcaggcactatatctatatcgaaaaccagtttttcataagctgtgctgatgacaaagttgtgttcaacaagataggcgatgccattgcccagaggatcctgaaagctcacagggaaaaccagaaataccgggtatatgtcgtgataccacttctgccagggttcgaaggagacatttcaaccggcggaggaaatgctctacaggcaatcatgcacttcaactacagaaccatgtgcagaggagaaaattccatccttggacagttaaaagcagagcttggtaatcagtggataaattacatatcattctgtggtcttagaacacatgcagagctcgaaggaaacctagtaactgagcttatctatgtccacagcaagttgttaattgctgatgataacactgttattattggctctgccaacataaatgaccgcagcatgctgggaaagcgtgacagtgaaatggctgtcattgtgcaagatacagagactgttccttcagtaatggatggaaaagagtaccaagctggccggtttgcccgaggacttcggctacagtgctttagggttgtccttggctatcttgatgacccaagtgaggacattcaggatccagtgagtgacaaattcttcaaggaggtgtgggtttcaacagcagctcgaaatgctacaatttatgacaaggttttccggtgccttcccaatgatgaagtacacaatttaattcagctgagagactttataaacaagcccgtattagctaaggaagatcccattcgagctgaggaggaactgaagaagatccgtggatttttggtgcaattccccttttatttcttgtctgaagaaagcctactgccttctgttgggaccaaagaggccatagtgcccatggaggtttggacttaagagatattcattggcagctcaaagacttccaccctggagaccacactgcacacagtgacttcctggggatgtcatagccaaagccaggcctgacgcattctcgtatccaacccaaggaccttttggaatgactggggagggctgcagtcacattgatgtaaggactgtaaacatcagcaagactttataattccttctgcctaacttgtaaaaagggggctgcattcttgttggtagcatgtactctgttgagtaaaacacatattcaaattccgtataccaaaatccatttcctttgtaacaagaatttaccagtaactgtgatctaggttgccaaaagttgtctgaatctccttattcttctctgatcttcatttatgcagccaatgtctagctggacctgccctcatcttgcagttcatacaggcactgtttgagagattgtttattattagatgttgtaatgctgcttcaagattcttcatggttacatgggatgcccctgctcatctggtcctgaagtagtaacattcacccaaatgaggatatagtcattattccttttcagtcactgtacgaacacggcagactttagcctacacagtagactgtgttaggcacttctggtaacattgacactgtatcttgacaccactaagccaacaggaaggaataaattcccaatattgagacagagatttatttcattttgctcccaaaggcactgacaacatgagtccttgtgattaggcccacctgatcaaatgtaaaaacatgcatgggatatttgattacgtaacaaccagctaaaactgagagcacacagccttcggaaacccccaaggtgtcgaggaggatcagatccagataagagaagatgattccttctagtcctgtaaaatttcctgtcatccttagctgctgggttgattgaaatttgatctctacatttcaaaatcaaactagtgaatacagtttgtctttcaagagaatcagaggcatcgtaactcctaccaagttagtaagtatgagtctaaccttgtttgacattcaggtcttctgctacattatcttctttgagaaaaattaattgattataaaatatgtgctacttcacttacattattaaatatgtattaacgcctctcaccagggcttccagtgaagttacaatgccctagtctgtgaattagtctggaaacgtgtttttccttttcggatgttagagtaccctttgataaactaaattttactaagctgaacaactctgacagtctaaagagctaatgtgggttaccaaaaggcctgtacctgtaaaacaaaatgcaggtgtaatgattatacatgtctatggattacctggacatactctcatttgggttgttcttcaaagaagcaagcagccgatccctgttttcataaagctaatacttcagttggaaaaattaaacaggagcacaaagtcagggataggggttagcagaagagagaaatagtgtcacatcaagggcaggatctcatagctagggaacatttcacaaataaggtgagattttgtaaccaataataaaaatgaatgtttttataagtaaataacttatttttcatatggctaaagatggtaaaatgacttcattctatagccattgtaaataagaatttgctattgatgaaagaagttcagattggcatttgaagtattgagtgtatgggatctctaaggatttcttagattttatatttaaatattttttaaaccttagaggagtcaacaaactggctcttgattttcagcaccctactctcatgaaaaaagcctgaaaggaccctttcccttataagtaatttaatccaatttctccccattttatagatgaggaaactgaggctcagatcagatgagaactcacttaaatccactcaatgtgtagatggtagagctgggactagcaacattgctgcagcccattgttggcctctctcttcactttatcattgcccaagaatgaggatatgcagtaaacagaattcaggcaagatacctctaagctgttttgaaccctctgatattttgtatttatgtgtttgtctgtctccccctactagaatgtaagctccatggggcagggacttcactgtattttgttcatagtgtatccccagagcctggaccagtgcttggcacataggagatggcaataaatgcttgtagaattaataaacaaggtgaaggagagagctaatgaaatgaaaatcttagtc

SEQ ID NO: 271043 - DNA, 3800 bp, Homo sapiens
aacttgtaaggactgtaaaaccttgttagcccacagcctgtaatagaatggacagatgccaccctagttgtgtcttaagaaattaagaagcttttaggtgtttaataaatgagagttgagcctccctttctgggactcacctgaaccacagtctctgagggggtcttgctgcattcacagataccgggtccatccgtagtttacagacaggtgtgggagagctgcatggggaaaccagattctggcatggaaaggactactgcaatttcgtcttcaaagactgggttcaacttgataaaccttttgctgatttcattgacaggtactccacgccccggatgccctggcatgacattgcctctgcagtccacgggaaggcggctcgtgatgtggcacgtcacttcatccagcgctggaacttcacaaaaattatgaaatcaaaatatcggtccctttcttatccttttctgcttccaaagtctcaaacaacagcccatgagttgagatatcaagtgcctgggtctgtccatgctaacgtacagttgctccgctctgctgctgattggtctgctggtataaagtaccatgaagagtccatccacgccgcttacgtccatgtgatagagaacagcaggcactatatctatatcgaaaaccagtttttcataagctgtgctgatgacaaagttgtgttcaacaagataggcgatgccattgcccagaggatcctgaaagctcacagggaaaaccagaaataccgggtatatgtcgtgataccacttctgccagggttcgaaggagacatttcaaccggcggaggaaatgctctacaggcaatcatgcacttcaactacagaaccatgtgcagaggagaaaattccatccttggacagttaaaagcagagcttggtaatcagtggataaattacatatcattctgtggtcttagaacacatgcagagctcgaaggaaacctagtaactgagcttatctatgtccacagcaagttgttaattgctgatgataacactgttattattggctctgccaacataaatgaccgcagcatgctgggaaagcgtgacagtgaaatggctgtcattgtgcaagatacagagactgttccttcagtaatggatggaaaagagtaccaagctggccggtttgcccgaggacttcggctacagtgctttagggttgtccttggctatcttgatgacccaagtgaggacattcaggatccagtgagtgacaaattcttcaaggaggtgtgggtttcaacagcagctcgaaatgctacaatttatgacaaggttttccggtgccttcccaatgatgaagtacacaatttaattcagctgagagactttataaacaagcccgtattagctaaggaagatcccattcgagctgaggaggaactgaagaagatccgtggatttttggtgcaattccccttttatttcttgtctgaagaaagcctactgccttctgttgggaccaaagaggccatagtgcccatggaggtttggacttaagagatattcattggcagctcaaagacttccaccctggagaccacactgcacacagtgacttcctggggatgtcatagccaaagccaggcctgacgcattctcgtatccaacccaaggaccttttggaatgactggggagggctgcagtcacattgatgtaaggactgtaaacatcagcaagactttataattccttctgcctaacttgtaaaaagggggctgcattcttgttggtagcatgtactctgttgagtaaaacacatattcaaattccgtataccaaaatccatttcctttgtaacaagaatttaccagtaactgtgatctaggttgccaaaagttgtctgaatctccttattcttctctgatcttcatttatgcagccaatgtctagctggacctgccctcatcttgcagttcatacaggcactgtttgagagattgtttattattagatgttgtaatgctgcttcaagattcttcatggttacatgggatgcccctgctcatctggtcctgaagtagtaacattcacccaaatgaggatatagtcattattccttttcagtcactgtacgaacacggcagactttagcctacacagtagactgtgttaggcacttctggtaacattgacactgtatcttgacaccactaagccaacaggaaggaataaattcccaatattgagacagagatttatttcattttgctcccaaaggcactgacaacatgagtccttgtgattaggcccacctgatcaaatgtaaaaacatgcatgggatatttgattacgtaacaaccagctaaaactgagagcacacagccttcggaaacccccaaggtgtcgaggaggatcagatccagataagagaagatgattccttctagtcctgtaaaatttcctgtcatccttagctgctgggttgattgaaatttgatctctacatttcaaaatcaaactagtgaatacagtttgtctttcaagagaatcagaggcatcgtaactcctaccaagttagtaagtatgagtctaaccttgtttgacattcaggtcttctgctacattatcttctttgagaaaaattaattgattataaaatatgtgctacttcacttacattattaaatatgtattaacgcctctcaccagggcttccagtgaagttacaatgccctagtctgtgaattagtctggaaacgtgtttttccttttcggatgttagagtaccctttgataaactaaattttactaagctgaacaactctgacagtctaaagagctaatgtgggttaccaaaaggcctgtacctgtaaaacaaaatgcaggtgtaatgattatacatgtctatggattacctggacatactctcatttgggttgttcttcaaagaagcaagcagccgatccctgttttcataaagctaatacttcagttggaaaaattaaacaggagcacaaagtcagggataggggttagcagaagagagaaatagtgtcacatcaagggcaggatctcatagctagggaacatttcacaaataaggtgagattttgtaaccaataataaaaatgaatgtttttataagtaaataacttatttttcatatggctaaagatggtaaaatgacttcattctatagccattgtaaataagaatttgctattgatgaaagaagttcagattggcatttgaagtattgagtgtatgggatctctaaggatttcttagattttatatttaaatattttttaaaccttagaggagtcaacaaactggctcttgattttcagcaccctactctcatgaaaaaagcctgaaaggaccctttcccttataagtaatttaatccaatttctccccattttatagatgaggaaactgaggctcagatcagatgagaactcacttaaatccactcaatgtgtagatggtagagctgggactagcaacattgctgcagcccattgttggcctctctcttcactttatcattgcccaagaatgaggatatgcagtaaacagaattcaggcaagatacctctaagctgttttgaaccctctgatattttgtatttatgtgtttgtctgtctccccctactagaatgtaagctccatggggcagggacttcactgtattttgttcatagtgtatccccagagcctggaccagtgcttggcacataggagatggcaataaatgcttgtagaattaataaacaaggtgaaggagagagctaatgaaatgaaaatcttagtc

SEQ ID NO: 271044 - DNA, 4730 bp, Homo sapiens
ggcacgaggagccctgagagtccgccgccaacgcgcaggtgctagcggccccttcgccctgcagcccctttgcttttactctgtccaaagttaacatgtcactgaaaaacgagccacgggtaaatacctctgcactgcagaaaattgctgctgacatgagtaatatcatagaaaatctggacacgcgggaactccactttgagggagaggaggtagactacgacgtgtctcccagcgatcccaagatacaagaagtgtatatccctttctctgctatttataacactcaaggatttaaggagcctaatatacagacgtatctctccggctgtccaataaaagcacaagttctggaagtggaacgcttcacatctacaacaagggtaccaagtattaatctttacactattgaattaacacatggggaatttaaatggcaagttaagaggaaattcaagcattttcaagaatttcacagagagctgctcaagtacaaagcctttatccgcatccccattcccactagaagacacacgtttaggaggcaaaacgtcagagaggagcctcgagagatgcccagtttgccccgttcatctgaaaacatgataagagaagaacaattccttggtagaagaaaacaactggaagattacttgacaaagatactaaaaatgcccatgtatagaaactatcatgccacaacagagtttcttgatataagccagctgtctttcatccatgatttgggaccaaagggcatagaaggtatgataatgaaaagatctggaggacacagaataccaggcttgaattgctgtggtcagggaagagcctgctacagatggtcaaaaagatggttaatagtgaaagattcctttttattgtatatgaaaccagacagcggtgccattgccttcgtcctgctggtagacaaagaattcaaaattaaggtggggaagaaggagacagaaacgaaatatggaatccgaattgataatctttcaaggacacttattttaaaatgcaacagctatagacatgctcggtggtggggaggggctatagaagaattcatccagaaacatggcaccaactttctcaaagatcatcgatttgggtcatatgctgctatccaagagaatgctttagctaaatggtatgttaatgccaaaggatattttgaagatgtggcaaatgcaatggaagaggcaaatgaagagatttttatcacagactggtggctgagtccagaaatcttcctgaaacgcccagtggttgagggaaatcgttggaggttggactgcattcttaaacgaaaagcacaacaaggagtgaggatcttcataatgctctacaaagaggtggaactcgctcttggcatcaatagtgaatacaccaagaggactttgatgcgtctacatcccaacataaaggtgatgagacacccggatcatgtgtcatccaccgtctatttgtgggctcaccatgagaagcttgtcatcattgaccaatcggtggcctttgtgggagggattgacctggcctatggaaggtgggacgacaatgagcacagactcacagacgtgggcagtgtgaagcgggtcacttcaggaccgtctctgggttccctcccacctgccgcaatggagtctatggaatccttaagactcaaagataaaaatgagcctgttcaaaacctacccatccagaagagtattgatgatgtggattcaaaactgaaaggaataggaaagccaagaaagttctccaaatttagtctctacaagcagctccacaggcaccacctgcacgacgcagatagcatcagcagcattgacagcacctccagttattttaatcactatagaagtcatcacaatttaatccatggtttaaaaccccacttcaaactctttcacccgtccagtgagtctgagcaaggactcactagacctcatgctgataccgggtccatccgtagtttacagacaggtgtgggagagctgcatggggaaaccagattctggcatggaaaggactactgcaatttcgtcttcaaagactgggttcaacttgataaaccttttgctgatttcattgacaggtactccacgccccggatgccctggcatgacattgcctctgcagtccacgggaaggcggctcgtgatgtggcacgtcacttcatccagcgctggaacttcacaaaaattatgaaatcaaaatatcggtccctttcttatccttttctgcttccaaagtctcaaacaacagcccatgagttgagatatcaagtgcctgggtctgtccatgctaacgtacagttgctccgctctgctgctgattggtctgctggtataaagtaccatgaagagtccatccacgccgcttacgtccatgtgatagagaacagcaggcactatatctatatcgaaaaccagtttttcataagctgtgctgatgacaaagttgtgttcaacaagataggcgatgccattgcccagaggatcctgaaagctcacagggaaaaccagaaataccgggtatatgtcgtgataccacttctgccagggttcgaaggagacatttcaaccggcggaggaaatgctctacaggcaatcatgcacttcaactacagaaccatgtgcagaggagaaaattccatccttggacagttaaaagcagagcttggtaatcagtggataaattacatatcattctgtggtcttagaacacatgcagagctcgaaggaaacctagtaactgagcttatctatgtccacagcaagttgttaattgctgatgataacactgttattattggctctgccaacataaatgaccgcagcatgctgggaaagcgtgacagtgaaatggctgtcattgtgcaagatacagagactgttccttcagtaatggatggaaaagagtaccaagctggccggtttgcccgaggacttcggctacagtgctttagggttgtccttggctatcttgatgacccaagtgaggacattcaggatccagtgagtgacaaattcttcaaggaggtgtgggtttcaacagcagctcgaaatgctacaatttatgacaaggttttccggtgccttcccaatgatgaagtacacaatttaattcagctgagagactttataaacaagcccgtattagctaaggaagatcccattcgagctgaggaggaactgaagaagatccgtggatttttggtgcaattccccttttatttcttgtctgaagaaagcctactgccttctgttgggaccaaagaggccatagtgcccatggaggtttggacttaagagatattcattggcagctcaaagacttccaccctggagaccacactgcacacagtgacttcctggggatgtcatagccaaagccaggcctgacgcattctcgtatccaacccaaggaccttttggaatgactggggagggctgcagtcacattgatgtaaggactgtaaacatcagcaagactttataattccttctgcctaacttgtaaaaagggggctgcattcttgttggtagcatgtactctgttgagtaaaacacatattcaaattccgtataccaaaatccatttcctttgtaacaagaatttaccagtaactgtgatctaggttgccaaaagttgtctgaatctccttattcttctctgatcttcatttatgcagccaatgtctagctggacctgccctcatcttgcagttcatacaggcactgtttgagagattgtttattattagatgttgtaatgctgcttcaagattcttcatggttacatgggatgcccctgctcatctggtcctgaagtagtaacattcacccaaatgaggatatagtcattattccttttcagtcactgtacgaacacggcagactttagcctacacagtagactgtgttaggcacttctggtaacattgacactgtatcttgacaccactaagccaacaggaaggaataaattcccaatattgagacagagatttatttcattttgctcccaaaggcactgacaacatgagtccttgtgattaggcccacctgatcaaatgtaaaaacatgcatgggatatttgattacgtaacaaccagctaaaactgagagcacacagccttcggaaacccccaaggtgtcgaggaggatcagatccagataagagaagatgattccttctagtcctgtaaaatttcctgtcatccttagctgctgggttgattgaaatttgatctctacatttcaaaatcaaactagtgaatacagtttgtctttcaagagaatcagaggcatcgtaactcctaccaagttaatgaggaaactgaggctcagatcagatgagaactcacttaaatccactcaatgtgtagatggtagagctgggactagcaacattgctgcagcccattgttggcctctctcttcactttatcattgcccaagaatgaggatatgcagtaaacagaattcaggcaagatacctctaagctgttttgaaccctctgatattttgtatttatgtgtttgtctgtctccccctactagaatgtaagctccatggggcagggacttcactgtattttgttcatagtgtatccccagagcctggaccagtgcttggcacataggagatggcaataaatgcttgtagaattaataaacaaggtgaaggagagagctaatgaaatgaaaatcttagtc

SEQ ID NO: 271045 - DNA, 431 bp, Homo sapiens
tggcgagctcctgccctccaccctcttgccgctgtatggggcgcctcgtccccgcggctccagcctccctcgtcggcagcacactggccctccctctcctgcgccctgaggttgacttcgtcgtctttcggggttgccttgcctttcggcctttctggggttcggggattatgacgtttgacctgaaagacagcagggatttcggccgggacccctgggccccgggctcgtccagcactgggctctcacccggatcctcatggctttgcccctggggagccacggggcggaacagcccaggccatccttgggaccagagagggttgacctcagatgtacggtacccagccttttctcagggacctcctttttatttttctgaagccctaccagggcgatcccagaaataaaacgtgtacaaggcttaaaaa

SEQ ID NO: 271046 - DNA, 367 bp, Homo sapiens
aaccctcctacctgtaccctcagaagtgatacttacatagcccaggaagtgcttcattatgactctcctggcttctcgtctataatactggccaacatcaagggctgccaggagagttcacagagctgaagactgtctccttcacacaagggagttgtgccagaaactgcaggtgagccattaggagccacagcagttcttttgtgaccgtgagggaaacctgaagccagaagccaagtcaaagtatagcagaacctcaagaccaaaggggccatgaacattggtgatgttgtggagccaccagaataaccctgttctttgtgaacttctttcagatgaaggaaaataaatcctgatattgtttaag

SEQ ID NO: 271047 - DNA, 1007 bp, Homo sapiens
gcccggagctcgcgggacgcgcagggtccccaggagggcgtccgggccgccgccgccgccgtaggtgtgggcccggggccggggcgcgggcgggcccccgagcggagcgactccttgcggcgcgtgtgcgggctctcgagcagcgcgcagaagccgtaggcggtgcgcacacggggcaggtgcggcagtgacagcgcggcctgcgagcgcgggtcccagtctgtgcggccggcgccctcgtccatccctgcttcttcgacccaagaattccggagcgcagccaaggccaggcggggcatgagccgtggcgggatgcagaactcagggatgcggtccggagtgagcacatttgcgcacgcggcggtggtgcgagacttggctccgcgggcccgacccgggagaagccagtctccgctccgccgaaggcactcaggacccaagcggagtcgctccaggcaccacatctggccactctctgctggagcttgtctacctggagtcctgcgtcagatgggtctctgcacctttctgcctgggacaccgaccaggagaggcgcttagcggctgggaaattcaaagcgcgcgcggcggggttcagcaccagtgttcaaggactgccagcctgagcttttatacctgccgctgggagcgcttgccagtgggccgagcagaggggcgctgcctggtaacctgacgccaggctcttccctgtccctctgccacgtggctggatttgctgagcaaggtttggagacccagttctttctctctccggcttcaggtggaggtgttttcctcggaaaccccgaacaagtttctgtttcctcacatgcaaaatggtattaagtctctactataccgcagagtcattgtgaggatcgacgggcgtaatgaatgtgagcacgtagaagtactctacattcaccattaaaatgaagacaagtccggtttgtcttattcttgcctaatacccttccccaaatccagcttcccagttgcccagcttt

SEQ ID NO: 271048 - DNA, 1703 bp, Homo sapiens
caccaattttaaaatgaggtgattggagcaaacagatcgccaagacactttctagttctaacacttcatgtgattcattatttcctaggcgtgtgtggtacatatggtatgcaaatggctgtctatattgggaaacactgtagaaccattccatttgctgaaaaaaattctggaggtatctatggaaaatatcatatcttttactgggatagttaatctagaatcatctctgccagtgttgtactgaaacgggactgataagaacaacaaatacacgtttattttgtaccacgcggctgtcagtgtccggagtctccagggcagagcgccccggggagggctgggccctcagagcagcaggagggcgcccagggacagctcaccctggcccagcaggcggccccgatcccggccgcgaccctcatcccgggccttgacgcgaacggccaggcggcgcacctcgtcttccgagaggccgtcgaagcaaaagtcctggtcaaaggaggccttgcggctgcgccccaccacagcgctgcattgccgaacgcgcagtgcccggcggccgcaggacgaggctgaggcgacagctgacggctcggggcccgggggcgcctccggccgggctctcggcgcggagcagccggaggcggagccgcccggttcccggacagtactcggcggccaggcgcagggcgtcgccggcgcggcccagagccacggtgccctcggcctccaggcgctcgggaaacgggacccgggacgacggcgggctcgtggagggggcccgggccggggactcggagcgactccttgcggcgcgtgtgcgggctctcgagcagcgcgcagaagccgtaggcggtgcgcacacggggcaggtgcggcagtgacagcgcggcctgcgagcgcgggtcccagtctgtgcggccggcgccctcgtccatccctgcttcttcgacccaagaattccggagcgcagccaaggccaggcggggcatgagccgtggcgggatgcagaactcagggatgcggtccggagtgagcacatttgcgcacgcggcggtggtgcgagacttggctccgcgggcccgacccgggagaagccagtctccgctccgccgaaggcactcaggacccaagcggagtcgctccaggcaccacatctggccactctctgctggagcttgtctacctggagtcctgcgtcagatgggtctctgcacctttctgcctgggacaccgaccaggagaggcgcttagcggctgggaaattcaaagcgcgcgcggcggggttcagcaccagtgttcaaggactgccagcctgagcttttatacctgccgctgggagcgcttgccagtgggccgagcagaggggcgctgcctggtaacctgacgccaggctcttccctgtccctctgccacgtggctggatttgctgagcaaggtttggagacccagttctttctctctccggcttcaggtggaggtgttttcctcggaaaccccgaacaagtttctgtttcctcacatgcaaaatggtattaagtctctactataccgcagagtcattgtgaggatcgacgggcgtaatgaatgtgagcacgtagaagtactctacattcaccattaaaatgaagacaagtccggtttgtcttattcttgcctaatacccttccccaaatccagcttcccagttgcccagcttt

SEQ ID NO: 271049 - DNA, 1708 bp, Homo sapiens
  misc_feature (134)..(134): n is a, c, g, or t
  misc_feature (146)..(146): n is a, c, g, or t
  misc_feature (206)..(206): n is a, c, g, or t
gaatgaataacttgctttattaaaaaaaaactgtaacattgatagaaaaccggaaggaattaaaaacaatgcagatgggtgtacttcctttctctcccagtcccaagccaacccatttttccttggaatgcaanaatggtctgganagagatatgggggtcctgtgaacagaacagggagtcattatctttttcttctttaccaanagacgatgacaaatgtggatggtgaggaagtaaaacgtcaataaagcagtatcataaataaaaaaataaatacacgtttattttgtaccacgcggctgtcagtgtccggagtctccagggcagagcgccccggggagggctgggccctcagagcagcaggagggcgcccagggacagctcaccctggcccagcaggcggccccgatcccggccgcgaccctcatcccgggccttgacgcgaacggccaggcggcgcacctcgtcttccgagaggccgtcgaagcaaaagtcctggtcaaaggaggccttgcggctgcgccccaccacagcgctgcattgccgaacgcgcagtgcccggcggccgcaggacgaggctgaggcgacagctgacggctcggggcccgggggcgcctccggccgggctctcggcgcggagcagccggaggcggagccgcccggttcccggacagtactcggcggccaggcgcagggcgtcgccggcgcggcccagagccacggtgccctcggcctccaggcgctcgggaaacgggacccgggacgacggcgggctcgtggagggggcccgggccggggactcggagcgactccttgcggcgcgtgtgcgggctctcgagcagcgcgcagaagccgtaggcggtgcgcacacggggcaggtgcggcagtgacagcgcggcctgcgagcgcgggtcccagtctgtgcggccggcgccctcgtccatccctgcttcttcgacccaagaattccggagcgcagccaaggccaggcggggcatgagccgtggcgggatgcagaactcagggatgcggtccggagtgagcacatttgcgcacgcggcggtggtgcgagacttggctccgcgggcccgacccgggagaagccagtctccgctccgccgaaggcactcaggacccaagcggagtcgctccaggcaccacatctggccactctctgctggagcttgtctacctggagtcctgcgtcagatgggtctctgcacctttctgcctgggacaccgaccaggagaggcgcttagcggctgggaaattcaaagcgcgcgcggcggggttcagcaccagtgttcaaggactgccagcctgagcttttatacctgccgctgggagcgcttgccagtgggccgagcagaggggcgctgcctggtaacctgacgccaggctcttccctgtccctctgccacgtggctggatttgctgagcaaggtttggagacccagttctttctctctccggcttcaggtggaggtgttttcctcggaaaccccgaacaagtttctgtttcctcacatgcaaaatggtattaagtctctactataccgcagagtcattgtgaggatcgacgggcgtaatgaatgtgagcacgtagaagtactctacattcaccattaaaatgaagacaagtccggtttgtcttattcttgcctaatacccttccccaaatccagcttcccagttgcccagcttt

SEQ ID NO: 271050 - DNA, 876 bp, Homo sapiens
gtaattatataatactaatcttattaatattttttatgaaaaataataataatgtcaagccatcttgtacaaagctgtcatatcaaaatgtcatatcaaaatatccaagagtactttggaaatatggattcccaagttgtttttgtgggtgccaaaaggactgctggtcatgttcaaagcaatgtatggaaagagtccgccatctcagaggaaccaaagagtggagtgattatcatcatggaggatgaaagtgtattccagtgtctacctcattcatttcctaaagtgaatcacccaggccttggctgttctaatatctggaattctctttctactacaagtacatctgtcacacagaatgttacccacttactccctatgttttctgatcacatagaatctgagaggggaaataaaacttataaattgttgagtccaagattgacaaactccgttgtcttaaagggctaagctgtggtgacaggtgcagcaggccaggcataagtaatagggagcaggggagactgtgggaaactgaagggcagctgtctcataagaggatgaaattctaatcttttacaatatatttcaaggcaaacaaagcaacactctgggctgggagtccatccatgaactaccaacttttagccccaaattatgaataccttccttatttatagatgaggaaattgagactgagagtagggatatgacataaggcagaaattggcttctggcttaattgaagcatttagatgggttgggagtgataatattaaaaagatgattgcaaaagctttatttcatgctggaatgtcaatataacattgaatgggctgaagactgatattttcaatgacttaacctataagcaag

SEQ ID NO: 271051 - DNA, 872 bp, Homo sapiens
tgtattgttaatcattcacgcctccacttatatttataaacgacccgcctattagccatcttgtacaaagctgtcatatcaaaatgtcatatcaaaatatccaagagtactttggaaatatggattcccaagttgtttttgtgggtgccaaaaggactgctggtcatgttcaaagcaatgtatggaaagagtccgccatctcagaggaaccaaagagtggagtgattatcatcatggaggatgaaagtgtattccagtgtctacctcattcatttcctaaagtgaatcacccaggccttggctgttctaatatctggaattctctttctactacaagtacatctgtcacacagaatgttacccacttactccctatgttttctgatcacatagaatctgagaggggaaataaaacttataaattgttgagtccaagattgacaaactccgttgtcttaaagggctaagctgtggtgacaggtgcagcaggccaggcataagtaatagggagcaggggagactgtgggaaactgaagggcagctgtctcataagaggatgaaattctaatcttttacaatatatttcaaggcaaacaaagcaacactctgggctgggagtccatccatgaactaccaacttttagccccaaattatgaataccttccttatttatagatgaggaaattgagactgagagtagggatatgacataaggcagaaattggcttctggcttaattgaagcatttagatgggttgggagtgataatattaaaaagatgattgcaaaagctttatttcatgctggaatgtcaatataacattgaatgggctgaagactgatattttcaatgacttaacctataagcaag

SEQ ID NO: 271052 - DNA, 875 bp, Homo sapiens
  misc_feature (54)..(54): n is a, c, g, or t
tttccttcactaccttcctgttataaaaacagaagcacccttattagctactgnacagccatcttgtacaaagctgtcatatcaaaatgtcatatcaaaatatccaagagtactttggaaatatggattcccaagttgtttttgtgggtgccaaaaggactgctggtcatgttcaaagcaatgtatggaaagagtccgccatctcagaggaaccaaagagtggagtgattatcatcatggaggatgaaagtgtattccagtgtctacctcattcatttcctaaagtgaatcacccaggccttggctgttctaatatctggaattctctttctactacaagtacatctgtcacacagaatgttacccacttactccctatgttttctgatcacatagaatctgagaggggaaataaaacttataaattgttgagtccaagattgacaaactccgttgtcttaaagggctaagctgtggtgacaggtgcagcaggccaggcataagtaatagggagcaggggagactgtgggaaactgaagggcagctgtctcataagaggatgaaattctaatcttttacaatatatttcaaggcaaacaaagcaacactctgggctgggagtccatccatgaactaccaacttttagccccaaattatgaataccttccttatttatagatgaggaaattgagactgagagtagggatatgacataaggcagaaattggcttctggcttaattgaagcatttagatgggttgggagtgataatattaaaaagatgattgcaaaagctttatttcatgctggaatgtcaatataacattgaatgggctgaagactgatattttcaatgacttaacctataagcaag

SEQ ID NO: 271053 - DNA, 880 bp, Homo sapiens
ctctctcgtccccccctatcttccatcataattattataacgccacccaccacccttatgtagccatcttgtacaaagctgtcatatcaaaatgtcatatcaaaatatccaagagtactttggaaatatggattcccaagttgtttttgtgggtgccaaaaggactgctggtcatgttcaaagcaatgtatggaaagagtccgccatctcagaggaaccaaagagtggagtgattatcatcatggaggatgaaagtgtattccagtgtctacctcattcatttcctaaagtgaatcacccaggccttggctgttctaatatctggaattctctttctactacaagtacatctgtcacacagaatgttacccacttactccctatgttttctgatcacatagaatctgagaggggaaataaaacttataaattgttgagtccaagattgacaaactccgttgtcttaaagggctaagctgtggtgacaggtgcagcaggccaggcataagtaatagggagcaggggagactgtgggaaactgaagggcagctgtctcataagaggatgaaattctaatcttttacaatatatttcaaggcaaacaaagcaacactctgggctgggagtccatccatgaactaccaacttttagccccaaattatgaataccttccttatttatagatgaggaaattgagactgagagtagggatatgacataaggcagaaattggcttctggcttaattgaagcatttagatgggttgggagtgataatattaaaaagatgattgcaaaagctttatttcatgctggaatgtcaatataacattgaatgggctgaagactgatattttcaatgacttaacctataagcaag

SEQ ID NO: 271054 - DNA, 871 bp, Homo sapiens
ataatataatttatatattatataatatgttttaacacaaaataaacctcgaagccatcttgtacaaagctgtcatatcaaaatgtcatatcaaaatatccaagagtactttggaaatatggattcccaagttgtttttgtgggtgccaaaaggactgctggtcatgttcaaagcaatgtatggaaagagtccgccatctcagaggaaccaaagagtggagtgattatcatcatggaggatgaaagtgtattccagtgtctacctcattcatttcctaaagtgaatcacccaggccttggctgttctaatatctggaattctctttctactacaagtacatctgtcacacagaatgttacccacttactccctatgttttctgatcacatagaatctgagaggggaaataaaacttataaattgttgagtccaagattgacaaactccgttgtcttaaagggctaagctgtggtgacaggtgcagcaggccaggcataagtaatagggagcaggggagactgtgggaaactgaagggcagctgtctcataagaggatgaaattctaatcttttacaatatatttcaaggcaaacaaagcaacactctgggctgggagtccatccatgaactaccaacttttagccccaaattatgaataccttccttatttatagatgaggaaattgagactgagagtagggatatgacataaggcagaaattggcttctggcttaattgaagcatttagatgggttgggagtgataatattaaaaagatgattgcaaaagctttatttcatgctggaatgtcaatataacattgaatgggctgaagactgatattttcaatgacttaacctataagcaag

SEQ ID NO: 271055 - DNA, 378 bp, Homo sapiens
gcacccatagccatgagacctaggtttgtcagataatttctttgagcctcacatgcctcctctgtaaaatgggaataatgactattccttctcttcaggactgctggtcatgttcaaagcaatgtatggaaagagtccgccatctcagaggaaccaaagagtggagtgattatcatcatggaggatgaaagtgtattccagtgtctacctcattcatttcctaaagtgaatcacccaggccttggctgttctaatatctggaattctctttctactacaagtacatctgtcacacagaatgttacccacttactccctatgttttctgatcacatagaatctgagaggggaaataaaacttataaattgttgagtcca

SEQ ID NO: 271056 - DNA, 875 bp, Homo sapiens
tttttgttaaattacaagttcttctattttattataataagagagcaaccgtgattagccatcttgtacaaagctgtcatatcaaaatgtcatatcaaaatatccaagagtactttggaaatatggattcccaagttgtttttgtgggtgccaaaaggactgctggtcatgttcaaagcaatgtatggaaagagtccgccatctcagaggaaccaaagagtggagtgattatcatcatggaggatgaaagtgtattccagtgtctacctcattcatttcctaaagtgaatcacccaggccttggctgttctaatatctggaattctctttctactacaagtacatctgtcacacagaatgttacccacttactccctatgttttctgatcacatagaatctgagaggggaaataaaacttataaattgttgagtccaagattgacaaactccgttgtcttaaagggctaagctgtggtgacaggtgcagcaggccaggcataagtaatagggagcaggggagactgtgggaaactgaagggcagctgtctcataagaggatgaaattctaatcttttacaatatatttcaaggcaaacaaagcaacactctgggctgggagtccatccatgaactaccaacttttagccccaaattatgaataccttccttatttatagatgaggaaattgagactgagagtagggatatgacataaggcagaaattggcttctggcttaattgaagcatttagatgggttgggagtgataatattaaaaagatgattgcaaaagctttatttcatgctggaatgtcaatataacattgaatgggctgaagactgatattttcaatgacttaacctataagcaag

SEQ ID NO: 271057 - DNA, 873 bp, Homo sapiens
tattcttgatatttattatcttttcaaaagtaatttttattacagccacctgacagccatcttgtacaaagctgtcatatcaaaatgtcatatcaaaatatccaagagtactttggaaatatggattcccaagttgtttttgtgggtgccaaaaggactgctggtcatgttcaaagcaatgtatggaaagagtccgccatctcagaggaaccaaagagtggagtgattatcatcatggaggatgaaagtgtattccagtgtctacctcattcatttcctaaagtgaatcacccaggccttggctgttctaatatctggaattctctttctactacaagtacatctgtcacacagaatgttacccacttactccctatgttttctgatcacatagaatctgagaggggaaataaaacttataaattgttgagtccaagattgacaaactccgttgtcttaaagggctaagctgtggtgacaggtgcagcaggccaggcataagtaatagggagcaggggagactgtgggaaactgaagggcagctgtctcataagaggatgaaattctaatcttttacaatatatttcaaggcaaacaaagcaacactctgggctgggagtccatccatgaactaccaacttttagccccaaattatgaataccttccttatttatagatgaggaaattgagactgagagtagggatatgacataaggcagaaattggcttctggcttaattgaagcatttagatgggttgggagtgataatattaaaaagatgattgcaaaagctttatttcatgctggaatgtcaatataacattgaatgggctgaagactgatattttcaatgacttaacctataagcaag

SEQ ID NO: 271058 - DNA, 394 bp, Homo sapiens
tccgggaacgtggcaacacccaacacatcctgtggccctctctgagactcagcatttcccattcaacagcaaaatccagaagtaatttatatttgggtttaaaagtctagatcaggcagtggctcatgcttgtaatcccagcactttggaaggctgaggtgggcagatcacttgagcccaggagttcgagaccagcttgtgcaatataacaagaccctgtctctacaaaaatacaaaaaaagccgagcatggtggtgcacgcctgtattcccagttactcaggaggctgaggtgggaggatcacttgaacctgggaggtcaaggctgcagtgagtgatgactgtgccactgcactccagcctgggcaacagaatgagaccctgtctcaaaaaaa

SEQ ID NO: 271059 - DNA, 349 bp, Homo sapiens
gacaaatgaaatacagaaagtcataatatctacaaccctgtggtctacaaaggagtttggttatactacatgaacctgaaatagatgatggattaaagtctccattattccatgtaatgataaaacaatttcaagtgatcataagaccattttataatgaattccttctttccactgtaaaggccatagtgttagattgcttactcttgttaagatttactggatgctaacagtccagcactggctaggcatcgagaacataaaaataaatgagaagtgttcctgcttttaagatgttcctactgtggcaaacagagagctacaaaatataataatatagaagtatgta

SEQ ID NO: 271060 - DNA, 590 bp, Homo sapiens
cagcctccacacggacgcgccttgggcttggtcttgggggagctacctgcactgtggggtcacatgacagaattagtggtcagccctagctggaggtccagggcaaacacaggcgggggcaggggggtggggggtcgtgagcctgctgattcaagtgtccctgtgggtcccgcaccttctgagacacaagcgccaggcttcagagacgaggctccgggatttacccctgggggcctcctgctcccacagccgatgagagccggcagtttggctgtatcgtaagctggcgctttagctggagagggacgagccctcggccagctcgccagcgggagggcctcagtcgtcccatccgggctgtaggctccgcaaagctcttgatgcactgtcaggctgggaggtccggccgctcccattcccccacagccgcatctagattggggtgggtaggacattttaacgtgcttctgagacagccaccaccgaaaggcacctttagcggttaggaaacccgcgcggagttcaaccacccggcctctgcggagcagaaggcccggtcgggcttttccctgcgcggggcgggcggccgc

SEQ ID NO: 271061 - DNA, 427 bp, Homo sapiens
tgaagtttcttcatgccatgctaaagccctcctcccctagaggagctatagctttattatcataacctgtgacccatcatggcatgtagagggggggtctgggccactgggacccccccccccatacacatgccatgatgcacctctcccttctctatcactccatcaaaccctcctgtcactttcccttgggaagatacggctttggagaacacttcccgtgtgtgtcttacttgtgccaagtaacacaatgcctattgatcaaaatctgagttctcctggagagtcgtttgttactcaccaggcaaataagccccagtttttgggaggtaacattatgaaatattctgaagtagtcccatgaaagatttctactttccttttcaaattattgataaataaatgagcttgctttgggctatggaga

SEQ ID NO: 271062 - DNA, 933 bp, Homo sapiens
ttaaatttccagttcaaagatggaaatcgtcagaggcttccaagatggctgaataggaacagctccagtccgcagctcccagcaagattgatgcagaaggcggatgatttctgcatttccaactaagtgccatgacttaaggagtgaagagagggcatagagaacaagcagagtatgcagggcatatgctgagataagaaactggatctgaaacaagttgaatacttgcagagaatcatgggaaccattataacaaagaagtcaagagtgttggtgtggagtggaccttggtttgaatactcagctctgccacttactagctgtaggctcatatgcaagttactatcctcatctgttaaaaaggaataatatctaatgttatataaaatgtaaaagttatttcacacaatgccattcacatagtaaatgttcaataaaagcaaaaacctcaggacatatataagtggcaatgtgaaattaatacagcagaagctcagttcacacagatgttaatccttaaacaagccttgcattgtatgagtatcccacaaaaggagtaagggaagaagatcttacatcactggagtgagtgactaccatggaccagccaccgttactcactttacttcatttaacccgcacaatagcctcatgaggtagatatcatcaccattttgcagatgagaaagctgaagctaagcaaagttgacctgaccaaaatcacatagcaattaagataggagtccagcttcgtctcattccaatatgagtgcgttttcctcttttccattggctctcaaagtttggtcttaaaggagctgtatcagcatcacctgggaacttattagaactgcaccttctcagccctaccccaaacccactgggtcagaaactctggggttggggcctagccatctgtgtttcacactcaga

SEQ ID NO: 271063 - DNA, 472 bp, Homo sapiens
  misc_feature (444)..(444): n is a, c, g, or t
atctgaaaagagaatggtaggctgtgattttgataaattattcctttaaagtcaccgttttcttgcttgtttattctgattttatccatggagaatttcaaatcagtgacaacagtataaaccttactctaaataagttttaaagactttaaatacaaacaaattctatgacttaaataaaaaaaaaaaaacagttcagtcaactgtatcagcaccacaagaccccctctacttaaccctttatagctgtcaaaaaaattgcaccaaatttagtacaaaaaattcaacaagtggcttttatttgcaatttgagagtcgagaaacactcaataaaatagaatgagtattctgatgagccaagcagaagaggttggctttataggcagaaaaaagggctgcagaaagcagaaacagagaacacaaatcagtctgggtgacaaaagnggatccgtctcgaaaaaaaaagagaaaa

SEQ ID NO: 271064 - DNA, 306 bp, Homo sapiens
gctgtggagcctcatccataattgatcctgaactgcacttaccctaacagaccgcgcagatgccggctgcacgtagagctctgggagggttgtctactgatgagcctactccaagtagtgaaggcactcacagccatggcacgtggtaacttcaatgggcctgacacttttccttccatcaaaaacaacaaggaagaggaaaggaatgactccccagatgctctgagtggttgttctgaggtcatttctatgtacaagtcagcttgaggggaattaaaaacaattggcataagccaaactcatacc

SEQ ID NO: 271065 - DNA, 699 bp, Homo sapiens
aaaattatccaatgtagcatggatggtttcactttcttgtccactcagacacatgctcatacttattaaatggatttattggatgcttcaaaagtcctgatgtgtagtagcacaaaagttccttgtaaaaaaagaagttgcaaaattataaaaatttctgcagcagttctggctctggatgacaaagctcattctgattagtagtttttttgacatgcacagcagcttcccctataagtcctacgttcggagggttccgtttagacaacaggaagttggaatccaagtttaaaaggctctctgctgacaaaatgtggtacatccatcaacagaattctactcagcaataaaaggaacaaactaccaagacgttatctgtcatggacaaacctcaaaaacattagctaagtaaaaaagccagacacggctgggcgcagtggtttacgtctgtaatcctagcacttttggaagccgaagcgggcagatcacctgaggtcaggtgttcaagaccaccctggcgaacatggtgaaagcccatctctactaaaatacaaaaattagctgggcatgatggcgggtgcctgtaatcccagctactcgggaggctgagccaggagaatcgcttgaaccacggagatggtggatgcagtgagccgaggtcacaccactgcactgggcagctgagcgagattctgtcta

SEQ ID NO: 271066 - DNA, 778 bp, Homo sapiens
  misc_feature (1)..(1): n is a, c, g, or t
  misc_feature (3)..(4): n is a, c, g, or t
ncnnggcttcattccattttctgttgagtaataaactcaacgttgaaaatgtcctttgtgggggagaactcaggagtgaaaatgggctctgaggactgggaaaaagatgaaccccagtgctgcttagaagacccggctggaagccccctggaaccaggcccaagcctccccaccatgaattttgttcacacaagtccaaaggtgaagaacttaaacccgaagaaattcagcattcatgaccaggatcacaaagtactggtcctggactctgggaatctcatagcagttccagataaaaactacatacgcccagagatcttctttgcattagcctcatccttgagctcagcctctgcggagaaaggaagtccgattctcctgggggtctctaaaggggagttttgtctctactgtgacaaggataaaggacaaagtcatccatcccttcagctgaagaaggagaaactgatgaagctggctgcccaaaaggaatcagcacgccggcccttcatcttttatagggctcaggtgggctcctggaacatgctggagtcggcggctcaccccggatggttcatctgcacctcctgcaattgtaatgagcctgttggggtgacagataaatttgagaacaggaaacacattgaattttcatttcaaccagtttgcaaagctgaaatgagccccagtgaggtcagcgattaggaaactgccccattgaacgccttcctcgctaatttgaactaattgtataaaaacaccaaacctgctcactaaa

SEQ ID NO: 271067 - DNA, 806 bp, Homo sapiens
  misc_feature (1)..(1): n is a, c, g, or t
  misc_feature (3)..(4): n is a, c, g, or t
ncnnggcttcattccattttctgttgagtaataaactcaacgttgaaaatgtcctttgtgggggagaactcaggagtgaaaatgggctctgaggactgggaaaaagatgaaccccagtgctgcttagaagacccggctggaagccccctggaaccaggcccaagcctccccaccatgaattttgttcacacaagtccaaaggtgaagaacttaaacccgaagaaattcagcattcatgaccaggatcacaaagtactggtcctggactctgggaatctcatagcagttccagataaaaactacatacgcccagagatcttctttgcattagcctcatccttgagctcagcctctgcggagaaaggaagtccgattctcctgggggtctctaaaggggagttttgtctctactgtgacaaggataaaggacaaagtcatccatcccttcagctgaagaaggagaaactgatgaagctggctgcccaaaaggaatcagcacgccggcccttcatcttttatagggctcaggtgggctcctggaacatgctggagtcggcggctcaccccggatggttcatctgcacctcctgcaattgtaatgagcctgttggggtgacagataaatttgagaacaggaaacacattgaattttcatttcaaccagtttgcaaagctgaaatgagccccagtgaggtcagcgattaggaaactgccccattgaacgccttcctcgctaatttgaactaattgtataaaaacaccaaacctgctcactaaaaacacagacactcggctacacaaacaaa

SEQ ID NO: 271068 - DNA, 652 bp, Homo sapiens
atgtcaggctgtgataggagggaaacagaaaccaaaggaaagaacagctttaagaagcgcttaagaggtccaaaggtgaagaacttaaacccgaagaaattcagcattcatgaccaggatcacaaagtactggtcctggactctgggaatctcatagcagttccagataaaaactacatacgcccagagatcttctttgcattagcctcatccttgagctcagcctctgcggagaaaggaagtccgattctcctgggggtctctaaaggggagttttgtctctactgtgacaaggataaaggacaaagtcatccatcccttcagctgaagaaggagaaactgatgaagctggctgcccaaaaggaatcagcacgccggcccttcatcttttatagggctcaggtgggctcctggaacatgctggagtcggcggctcaccccggatggttcatctgcacctcctgcaattgtaatgagcctgttggggtgacagataaatttgagaacaggaaacacattgaattttcatttcaaccagtttgcaaagctgaaatgagccccagtgaggtcagcgattaggaaactgccccattgaacgccttcctcgctaatttgaactaattgtataaaaacaccaaacctgctcactaaa

SEQ ID NO: 271069 - DNA, 680 bp, Homo sapiens
atgtcaggctgtgataggagggaaacagaaaccaaaggaaagaacagctttaagaagcgcttaagaggtccaaaggtgaagaacttaaacccgaagaaattcagcattcatgaccaggatcacaaagtactggtcctggactctgggaatctcatagcagttccagataaaaactacatacgcccagagatcttctttgcattagcctcatccttgagctcagcctctgcggagaaaggaagtccgattctcctgggggtctctaaaggggagttttgtctctactgtgacaaggataaaggacaaagtcatccatcccttcagctgaagaaggagaaactgatgaagctggctgcccaaaaggaatcagcacgccggcccttcatcttttatagggctcaggtgggctcctggaacatgctggagtcggcggctcaccccggatggttcatctgcacctcctgcaattgtaatgagcctgttggggtgacagataaatttgagaacaggaaacacattgaattttcatttcaaccagtttgcaaagctgaaatgagccccagtgaggtcagcgattaggaaactgccccattgaacgccttcctcgctaatttgaactaattgtataaaaacaccaaacctgctcactaaaaacacagacactcggctacacaaacaaa

SEQ ID NO: 271070 - DNA, 686 bp, Homo sapiens
  misc_feature (1)..(1): n is a, c, g, or t
  misc_feature (3)..(4): n is a, c, g, or t
ncnnggcttcattccattttctgttgagtaataaactcaacgttgaaaatgtcctttgtgggggagaactcaggagtgaaaatgggctctgaggactgggaaaaagatgaaccccagtgctgcttagaagacccggctggaagccccctggaaccaggcccaagcctccccaccatgaattttgttcacacaaagatcttctttgcattagcctcatccttgagctcagcctctgcggagaaaggaagtccgattctcctgggggtctctaaaggggagttttgtctctactgtgacaaggataaaggacaaagtcatccatcccttcagctgaagaaggagaaactgatgaagctggctgcccaaaaggaatcagcacgccggcccttcatcttttatagggctcaggtgggctcctggaacatgctggagtcggcggctcaccccggatggttcatctgcacctcctgcaattgtaatgagcctgttggggtgacagataaatttgagaacaggaaacacattgaattttcatttcaaccagtttgcaaagctgaaatgagccccagtgaggtcagcgattaggaaactgccccattgaacgccttcctcgctaatttgaactaattgtataaaaacaccaaacctgctcactaaaaacacagacactcggctacacaaacaaa

SEQ ID NO: 271071 - DNA, 168 bp, Homo sapiens
ctagcagacaagtgttctatcagggttatagacataagcaaaatgaggctcccattgaagaaattaatcatttagaggggaagagacatgttgacaaagaaaacctggtacaatctgataagtgatatcaatagcaagtgaagaaattcagttgtcatttgaaaatga

SEQ ID NO: 271072 - DNA, 686 bp, Homo sapiens
ttttccagtttaggaaactgatattacaccttttctacagatggggaaacttgcccagggtgcccaggcagtccgcagaaccatgctttgaatcagggcagtgtggttccagggtcctgtacagatcaaacaccctgactctgccattccatcagatacatgattcatattttggtgtatttgcctccaatcttgagcaaagtgggttgtccctgtacatactttgtgtaatcttttagcttaacaggtgtcatgaacacttccgtatcataaatctttcccagcatgatttttattatctatttaatatttctcatattcaatgtagaacaatgcacttaaccaatttctcatttttgtaataattttcttcccattttcccctgtaataacactgctgagatatatatttttttcttcttttttttactgttctgaagatactctggcagaaatgtatgttcctcaggctaaatcttttcacacatccacaatcattttatcataaattctagagctggaaacgctgagtctaatgttttatatatatatatatatatgttatatatctgtcacccaggctggagtgcagtgtggtgtgatctcagctcactgcactccagcctgtggaacagagtgggactccctctctaacaaacaaacaaacaaacaaacaaaaaactggg

SEQ ID NO: 271073 - DNA, 519 bp, Homo sapiens
gaggggcttggggctgagaagagacaagcttaaaaggactgctttggctgctgtactgagactagattgcaggagggcagggaataaagcaggttgatgaagtaggaggcggttggaataatccaggcaaaagataaagaggcttggaccacaatgatagtggaagtggtgagaagtggccaaattctggctagaatgtgaaggtagagccaataggacttgctgatgtttgggggagtcagaaaaagaggcataaaggaaaatctgaggtttgggacctgagattctggaaagataggaaaacttctgcagtggatttcagagggaaagtaggagttcattttgggacatgtcaagtttgatagtattatagaaatgttgagaagggccagacccgtggctcacgcctgcaatcccagcactttgggaggccaaggtgggaggactgcttgagcccgggagtgtaagacaagactgggcaacagtgagacttcatctctatttaaaaaaataagaata

SEQ ID NO: 271074 - DNA, 451 bp, Homo sapiens
agtgacttataggtgggtagtgtatgcagtgtggatacactggacaaagggatgattcacatcctgggcgggatggagcaggacagcacaagatttcattacataacggcatactatttaaaacttataaattgtttatttccggaactttccatttaatattttcagactgcagttgaccatgggtaactgaaactatggcaagttaaaaccatgaataagagggagagtactgtataaaggaacgagataaatgacaccatgaggaaaaagacaaatccaaaacaattgactggcactcttcaaaaactcgatgtagttaattttttaaaaaagatggaagacttccagttatggacccagttagagtagacacacttctccctattcctcacactaagtacagctaaaactctggacattatatataagacaaacataagaagactat

SEQ ID NO: 271075 - DNA, 179 bp, Homo sapiens
gctttggggtttgttcctccccaagcaaaattaaccagaggcactgctgacctttgggcttcctgggtgtagcgttacgaagcatctccacatgtttgtcacagctagaatttgacaataaaaatttggacagggagaccctgccagagccactgacctctttccaatgtgacaagggg

SEQ ID NO: 271076 - DNA, 403 bp, Homo sapiens
aaggtgaagaacagagttggagaatagaaactctgttggctccttggggaggaaaaacaagcatggaaaaagaggcttttcttcataagtgtgccacatcagtcacccatcaccacttctgcctttcatctattccctggcagccatcctaagaagaataactgtcttgacatgagacagattatttcaaggccttctccttgaggccaatctacccatgaagatggggaacagcatttcacagtgttgcccttcaatcctctcatgagtgactcattctgagaccaaactgaggacactctccaagaagccatgccaggtctccagctggtttcagactaacagccacaaagcaatcaacagaccattgttttttatataaaccgtatgccctggaacttcg

SEQ ID NO: 271077 - DNA, 369 bp, Homo sapiens
taaaggaaaaggcactcatccatacatactattctgtaaacaggtgtgtaactgtcaaggtgagtggcacacaagaatttgataaaagtcaaagtactgaaggcgctgctaaagtagatctgaggctattctgacttcctcgttactcacctgtgctatgatttgctttgcagtgggaaaggatggagatgcagcctgggaggggtttgggtgttgattcctgggcctttcatgggagtgattattcacaggaaaatcatccctatcacaggaaaaaggcagagaactgctgtctttggcactaaagactatgatctcagaaccaaagtaattatcttggagaaactgtggcaatagaagaaaaaagcc

SEQ ID NO: 271078 - DNA, 440 bp, Homo sapiens
taccgcttcaagcggtgatcgcaccacgcctccgcgcctccacccgggccttcctcccccgtggaccccggtggatgacctgcccctctccccgccgcgcccctgcccctcctcctcgctccctgggttgggggctcccttagccgggcccccaagcgcgacggccccggaccggccgcggccccttcccgaacgccggcacccccttccgcttgggctgcccagccctgtcctcgccgggccccttcctcctggaaaaccaggcaggcgggtgccccccccctcgagtgggggactgtacagaccccgtctccgccctggccccgcggaggagctgcccacctgattcccggacagacctccccaactccgcgtgagacagagaattattcagataatttaaattaaaaaacgacgtgaaaatttggaataaaaaaaaa

SEQ ID NO: 271079 - DNA, 261 bp, Homo sapiens
agcaagctgctgctgcccatcacccccttccgcttgggctgcccagccctgtcctcgccgggccccttcctcctggaaaaccaggcaggcgggtgccccccccctcgagtgggggactgtacagaccccgtctccgccctggccccgcggaggagctgcccacctgattcccggacagacctccccaactccgcgtgagacagagaattattcagataatttaaattaaaaaacgacgtgaaaatttggaataaaaaaaaa

SEQ ID NO: 271080 - DNA, 347 bp, Homo sapiens
taccgcttcaagcggtgatcgcaccacgcctccgcgcctccacccgggccttcctcccccgtggaccccggtggatgacctgcccctctccccgccgcgcccctgcccctcctcctcgctccctgggttgggggctcccttagccgggccccttcctcctggaaaaccaggcaggcgggtgccccccccctcgagtgggggactgtacagaccccgtctccgccctggccccgcggaggagctgcccacctgattcccggacagacctccccaactccgcgtgagacagagaattattcagataatttaaattaaaaaacgacgtgaaaatttggaataaaaaaaaa

SEQ ID NO: 271081 - DNA, 418 bp, Homo sapiens
cactgcactccagcctgggcgacagagctagacaccatctcaaaaaaaaaaagaaaaatgaacagagtttcagagacctgtgggacactatcaagtgtatcaacatacacataataagaatcccaaaagttaaacagatgagtgcataaaaatatttgaagaaataataaccaaaagtttctcaaatttgatttaaatacattaatctgcacctataagaagctccacaaactccaaagaggataaattcaaagatatccacacttacacacatcataatcaaattgttcaaagccaaagagaaaatcttaaaagaagtataattaataatataataaattaattaataattttacttctattaagatctctcaccagaaactatgaaggcccgaaggaagtagggtgacatattcaa

SEQ ID NO: 271082 - DNA, 402 bp, Homo sapiens
  misc_feature (216)..(216): n is a, c, g, or t
  misc_feature (368)..(368): n is a, c, g, or t
  misc_feature (399)..(399): n is a, c, g, or t
gttactgggcctctcaggacaccagggaggctgggctggggaggactggtgggcgagctgtcccctccacattctgccaatgcctgggacgtgaaactcattcctgtttccatgagactcgtatccttaatgtcccttttgacttcagctaattctgagtaagtttttgaccctctcgctccgcccagacccctggatgcccagctgccgcacctnccgtggccccacgctgtggctacgtgttgtctgaagacgcctggggaaaccttcagggcctctgtactggcctgtcatgtggtcaaccagtgtgaacatcaaggtgtctgggttcatggaagctggtgaagccacctacaattataccatgncctgtccctatttcacatgggcctcgagggntct

SEQ ID NO: 271083 - DNA, 417 bp, Homo sapiens
tcaccatgttggtcaggctggtctcgaactcctgacctgatgatccacccacccaccttggcctcccaaagtgctgggattacaggcgtgagccaccatacccggcctattagctagtaatttcaaggactcacttacacggcctttttgtacattcagggccttttcaactcctatttccctttccagaatcatttttgcaaggctgcttccttaccattcaattctgagttctaatgtcacctcctcaaaaaagacttcctgaccatcctatttaaatttgcagctatctccacccatcactgcttctttcatagcacttaccaccctctaaagtcattttttatacttacttgtctattgcttgtctctccctaccagaatgtaaggtttaagacacatgttttctctacctca

SEQ ID NO: 271084 - DNA, 581 bp, Homo sapiens
taaattttctgtacttagttttatatggacattgtagtaagtactgtattttaggatcatatttgttttgaaatattttgttattcaaaattttaataagccttttttgtttttcccccattagttttttcccactggttttaagaaattataaaagtaacatataccaaatacaaatgttcaagcaatatacacatatatggtgcaaatagtttttccctgcttgcagttcccgtcccctaccctgtcatcctctgcataggtaatgactcacatccttttagatcttgaagagtcaacatcattattatgcacaccacacacacacacacacacacacacacacacctgtctatatagctgtatttcctttttacaaaaatggactcacttcattctgcaacttgctttttaacatttaacaatacctaatgtaaatggtactgtgcatgtaattttatatatatttcattctttttaacagctccgtggtatttctggtattgatgtagcctgttatttagccattcccctattaatggaaatttaggttatttccagtcatgtacagatatacttcc

SEQ ID NO: 271085 - DNA, 502 bp, Homo sapiens
catcacatttcatcattgtaatagccttactgtatggatagtgcccataattttaaaataatttttaaataattattgcttaatcagataattgctaaagtaaaatttcccaaattttgctttcacatcgacatttatttgctatcactgagtttgtacccctaatccattaaaaagtagaaaacagtgaaatagggcatttgttctaagtaatgggagaagatgtaactggagaagatggaaaaaagttgtaagaaccactgctctgtataggttgtaaaagcagtattaaatatggtgcctgcccttgctaaaggtaacatgaagtaataggtagggtaaatgcactcagctgtgtgggttgcttgaaagatcttgtgagcctgttcactcttgcagttgaaagactggatcacttctttctggcgttgtttatttttatgcagactccagcctggacagcagagcaggaccctgtctcaaaaaaaacaaaaacaaaaca

SEQ ID NO: 271086 - DNA, 474 bp, Homo sapiens
acagagtctcactctgtcgcccaggctggagtgcagtggcgcaatctcagctcactgcaaactccgcctcctgggttcacgccatgctcctgcctcagcctccccagtagatcagactacaggcgcctgccaccttgcctggctaattttttgtatttttagtagagacagggtttcactgtgttagccaggatggtctcaatctcctgacccagcagtgacttctaatccatacctcgctccacgaagaagcgacccactgtagccggctgttcttggggcatcgtccaagcacacagccctcctgcagctcaggtctggggagactggtacactggctctcggggagggtttctgcggcagagcccttgcagaggagttcacgcttcctcacccctcgtccacaggtcttggaacacttgagaagacaaaaaagttctatttgcattcccattaggtttcagtagccacatt

SEQ ID NO: 271087 - DNA, 481 bp, Homo sapiens
ggtttattagctgctagactcactccagtggtgggcagctgggcgaaaggccctgaaagttgctcttttctcaaaattcagcctcatgtaaatttaccctgtgacctgccatgggggattaggatgggctggccaggccaggctaggtggcctgattttcccattcagcttctgacctggtcttctgaaagtcagactctggccctcttcattagccagcccaagtccttgcccctgggaatgcagggtggctggctgtgtaggtgttgatcatcattagcgataattagagggcagagctcagggaacaagttatgacacctgcaaactaggggcctctggaaatgggacagaaaagtttctcactttggggacaaaccagggaagcctgatttgttgctgatacacagggtggtctctgtcaacgttcagaagttctggacccagccaatgtggtgaaaatgccacagtaacgtatgac

SEQ ID NO: 271088 - DNA, 618 bp, Homo sapiens
ggtttattagctgctagactcactccagtggtgggcagctgggcgaaaggccctgaaagttgctcttttctcaaaattcagcctcatgtaaatttaccctgtgacctgccatgggggattaggatgggctggccaggccaggctaggtggcctgattttcccattcagcttctgacctggtcttctgaaagtcagactctggccctcttcattagccagcccaagtccttgcccctgggaatgcagggtggctggctgtgtaggtgttgatcatcattagcgataattagagggcagagctcagggaacaagttatgacacctgcaaactaggggcctctggaaatgggacagaaaagtttctcactttggggacaaaccagggaagcctgatttgttgctgatacacagggtggtctctgtcaacgttcagaagttctggacccagccaatggtaggaaactttggctgtgccttaaacattttcataggtcaaataaagaattggttaaactaaatatccctggcacacctttgtgggggcaatgctgagaacatgaagaaggaatgtgtgtggagaaaaggggaggcttccctggcttgccttaagggatgaagg

SEQ ID NO: 271089 - DNA, 629 bp, Homo sapiens
tagatagaaatgtaatatgtttacagagtttctaatttatttttctgttaatgaaaacaggcatttccagataaattaggccgtgttctagagttgcttttatatacagagggaagtaattttgcttagaattttaaatgtaacttttgtcttttgttaagaattatggatggtagtggggggatggaaaaaggactgaaaccaagcacagaggcaaaaatgtattgcctttttttttcaattctggaaaagagttatgtgtgcaattaggatttctgtgtttaaggaggctgtttaaaaagtcaacacattatttagttgaggaatgtagtttaagaattatgcttacggctgggtgcagtggctcatgcctgtaatcccagcactttgggaggctaaggagggcagatcacgaggtcaggagttcgagaccagcctgaccaacatggtgaaaccccatctctactgaaaatacaaaaattagctgggcgtggtggcatgcctctgtaatcccagctactcaggaggctgaggcaggataatctcttgaacccgcgaggtggaggttgcagtgagccgagatggtgccattgcactccaggctaggtgagagagtgagactccatttc

SEQ ID NO: 271090 - DNA, 462 bp, Homo sapiens
agaaacctgaacagagctgcagcatcattactgtaggagtgaaagctccccagcacatctggagacctgtctgggtaagtgtccacatagtcttacctggagatttatgaatctgctacaaagaggtaggatttccaggaaaaattctacttttcagaaccagggtttccaggccagagcagcccctcatactagatgtagggcctcttctcattgtggatttaaaagcacagagatccacaagacaatgtacaactgtaaattaaatacaactgcaattaaggccattataccaaatactggaaataccagcaggactcccttcttctacctcccaagattaaaatctaggatattcagaaccattatcagggctcaagctgattttaatataaaggcatggagcaatacaatctattacttttcaataacctccttgtgatggccttacttcacaatgac

SEQ ID NO: 271091 - DNA, 573 bp, Homo sapiens
aatatctgacaattttcctccactgaggtatcagacatctttactatacttgatgcttttcacgctcttgtaaatcttttaaaatttcattttacaactgtgttgctagtgtgtgtgtgtatgcgtatatacatacatacatatatatgtgtattctgcatgttgaatttctatgtgatgtttctcaactctcatattatttgttataacttattatttatcttattatttatctatcttttggattttctgaattgatactcatataatctgtgaatcccacttacgtttttctccaagtgttataccttttcttttcttttcctcctttctctgctgtacagtgctgaatggaagttgggatggttggcttctacgtgctgattcctatctcaaaggcagagctttcaaggttctctttaaatatgcagttacctggtgttttctgcagtaccactgaccagattaaagaacgatactttataatttgttaagaatttcatggcatgaattgatgctgaattttatcaaatattacctctgaactttaatattaaatttaatcaaacattg

SEQ ID NO: 271092 - DNA, 742 bp, Homo sapiens
tatgtgagaacctaactcctttctcagctccaactgtaaccctctccccacctccaacacacacataaacactcacatacacatgctaccacactgcctgctgtgccatcagcctgcctgaagttcacatcattttagaattggacgggccttcataatttaaattttattatgaaaaagtgatagtctaaggaactcatttgatttttttgtctaaatgtcaaatatagagtagaacgcacaagtgtctgttatagaaatacttgagagtcctatatgcactgttatccacaaccatttaagcacttatccactaatccctaataagtacccctaataagtacatttctaaaccagttattcaagctacatcctcccaagattggactttgtttctactttggtagggacataaataaacggaaacaactgacctaactttttactaaagagataataaagggaataaaattaagattacatttggattttaacttgtgttcttattcctactgccagcaaaaatatgtgaagtgtttttatcattataaatgaatatactattcattgtgcagattttgacatgttcataaataagttagtacccaatgtttgcttgataaagaatgtgataaaatgttaacatttgggaaatctgggtgaagaatgtataggaattatttgtatgtaatatttgtcaatctgaaattatttaaaagaaaaagttaaactgtctcattcc

SEQ ID NO: 271093 - DNA, 662 bp, Homo sapiens
  misc_feature (604)..(604): n is a, c, g, or t
ctgacactgtagaaagcccaactctcagaaagataagctttgattgagaggggactgctgtagttattcccttccccaggtattgactgagggttctttgttgaaaatgctcaactttgtcgtactttgttgagttagtaagtgtcatgagtggagaaaattaagtgaaactatgaaaatctaaagtaatataacattttaaaagggcatgctgtcacctttgatttaaaagaaaaattctggaagatataagtgggggcaagaagaggaggtatgaccaagacagtgaaatgaaccgcagttgaaagacgcagcgtctttcaactgcggtgggaattctctaatggtatcatgtgggccttttgaaagtaacaaacagaaggccagtctgtggcaagtttgctgctgaacatcacattccaccctaagaaaacacaaggtggatcgcgtcgagggtggataccttaccttagcacagaaggaaaacgtatgtcagtgcaaagtatggactaaactgctttcaggacaaacgtcgtacccctcgatacaggtcgccaaagggaatttcccttcccggcttggagtcctcccaatttaaggcagncccatccactcaatttctgcagttacaacttatctactaattagtttccctctggtca

SEQ ID NO: 271094 - DNA, 482 bp, Homo sapiens
cacgagggaaattgacaaatattgatagtgtctatctcacagccacttttcgcttatccttatgcttttcagaattttcaaaatttttatcattgggtatgcatttttaataaaattgttttaaaatacaaactattaagaaatttaatatgactgaaatatggaatatagaaaaagaagactggaaaaaaatgaagctaaatggtagttattgagcctagtctaaattgccaaacaaagcaatttggttttcattctatatgcaacagggaatcctaatggccttgaaaaaaaaatggacgtggactgattataccatggaatttagtaatagctgttttttttgactgaagaagtaatataacctcattatagaaaaaaaaatggacccacaggaaattagagatccactgttaacattttttagtatttccttccaacactatttttgtgcctattttgtacaggttagctcaattttt

SEQ ID NO: 271095 - DNA, 427 bp, Homo sapiens
ctgcatgccgccctccatcttccacctgtccacggctgacacacggtgggaaagggttttgctgacattggtgatctgagctgaaaatgtgaagccaccttttggcatataattcatattggtttttcaatcatttgtgtctgtgtgttttctttttgttgcattttttttcccttcttaagaaactcgtcatgtggtattgaaggtgacctgactatggcaaagagcatgttctgtgtggtttgcctttccacccacgcacaacacactttgcagacttgacagggatggatcagccccacagaagagaaaacagaaaaccaaaaaatacccctcctctgaaaaatacccccggtgtgaaactctttctgagaaagactggcccttttctttaatgtaaaaaaatatatataacaaaaatagattt

SEQ ID NO: 271096 - DNA, 852 bp, Homo sapiens
ggcaacaagagagaaactctgtttcaaaaaagaaaacaaaacaagtcattgatagtataacgaagagatatctgcatcccatgtctactgcagcactattctcaatagccaagatatggagtcaacctaggtgtccaacaacagatgaatgaatgaagaaaatgtgatatatacacactatggagtattattcagccataaaaaagagtgaaatcccatcgttgatggaatatagatgaaactggaggacattattttaagtgaaaaaagccaggaacagaaagttaaacagtgcatgttctcactcatatgcgaaagctaaaaatagttgatctcatagaagtaaaaagtaggacagaggatactagaggctgggatgagagtgacagagagatttgttaaaagatacaaaattatagcgagataagagaaataagttctagtgttcgacagcactgtagaatgactacagttaataataatacaatatatagtttcaaatagctggaaggatattgcacattctcaacataaagaaatgataaacatatgagatggtggatgtgctaattaccctgatctgataactataaattatatgtatggaaatataattatgtgctctcaagaatatgtacaattggtatttgtcaatttaaaaaataaatttaaaaactgtatcattgaatccttaagatgctaaagttcatttacttatataacaaattaaaaaattatttcttatgctgtttttcaaaaatcatagcttttatgactttacataaatatatctaaaataataattgtatgatatgtttttgtagtctaataaaatttgcactgaattccaat

SEQ ID NO: 271097 - DNA, 331 bp, Homo sapiens
aatgaacaataattatatgagttgttgagaattcagggacaaatacaggatcttcataaactgtgtcataccaaatatcaaatattctttggactctggctcagtgtaactgtataaataatttttgctactatcacaacttaagtagtgggaatgtttgcagtttcagcacattgtccatatggtccatatgtaacggagtcaaatttgtctcatttttcaagattcaaaataagactcagtaaagttctgctgagcatcctcaattttttttaaattgagaaaccactggggcctagaggggggaaaatgttcccatttcatgccattg

SEQ ID NO: 271098 - DNA, 575 bp, Homo sapiens
gccttttaaatcaggtagatcctgcattgatgcagacttaccataacctgcagttgatgaaaatgaacctcagatatttctgttcttttcctggaattgcaaacgatctctctttgcactcatcgtttctcctcctcactgaatttcggcagccttctagcttttaacattttcagcattaagttgaaaaccagtttcctaattgttacatataccaggcattacattatgcactagcgcataagatgcaatgcatgggagcatctccccaccttcaaattgcatgcagttcatctgagaaaacaaacaagaggaggatgatcacaataccatctttaagtgctctgtgattccagagagcaggctgtaagccagattgagtagttaaagaagctgctcagagagctgatgggccacctatgcttcacctggagcaatgactgtgatcagccggaacctggtgggggatggggtagggagagggggtcacttccggcacatgaaaagcagttttcacagtattccaaaggaatatttttatttctctaataaaattctcaattatgccttttaaa

SEQ ID NO: 271099 - DNA, 462 bp, Homo sapiens
acaggaaaactgttttagaaagcattctggctatacttaggtccagtctggagattggaaatctgcataagcatattgagttgtgacaaactatgtagccaactggaaaagttgagatgtggagtgctctgattgtttgacttctgaactcccacagtgcatacaagtgtattggttaatctctctactatatgttttgaatttgtatgctttactaagcattgatgttagatactgaacttatttaagcacagtgatagtatttgaaagaaatataaaaatttagtggtattgttgactctgtcttttccttttttctgagttaatctcttgggaagtataaattaatttttctaaacaactcacaggcacagaagccgaaaagttgagaaggccacagatatgggagttattttaagaataatatttaattagaaatgtaggatactaaattggaaagtt

SEQ ID NO: 271100 - DNA, 211 bp, Homo sapiens
agctggtggtggggggtaaagattgccccgggaggaatgggctctttccatgccatgataaactcttccgtgcatgtcataatgtacctgtactaccgattatctgcctttggccctgtggcacaaccctacctttggtggaaaaagcacatgacagccattcagctgatccagtttgtcctggtctcactgcacatctcccagtactact

SEQ ID NO: 271101 - DNA, 123 bp, Homo sapiens
gcaacatctgcctaattctcagatgcttgatgcttacaggaaaggcatatgaataaactcaagtttaaatttgtttattctctttattggtgatgggaccttgaacaaattacagaaataaaa

SEQ ID NO: 271102 - DNA, 400 bp, Homo sapiens
ccctcatccttggaaacaagtcaaaggaaggtatatgcagtatcttctgtcatgagtgtgcactgatatctttggataggtgttactatttgtattttgttatgtttacttgggattagagtcttaattagttataatgttactaggtaatccattatatgcatttgattaaaagtgatagaaacaaacatcttcaagttgtacgttggtaggtaatagtttcaacatataaaacttttgtgttctttgagcccagcggttcacaagcactggtttttttggtttgttttgttttttaaatgagaactgaccacagtatagtagaaccagataactaatgttctcatttgggaactatgctgttttcatttctgataaaataaactttggtcacattagt

SEQ ID NO: 271103 - DNA, 428 bp, Homo sapiens
aactcttcacctctgctgcttcctggatgaggagatggggagatggttcagaggacagcactgacaaagatctagagctcagagtgcaggccatatcagggaacttgaaacactaaattagtttggtggtgctttgagggcagtggtgagagattctcttcagtctgcctctgtatagtagggatagtcctttcttatcccctgtcacagctgaagcagagatgtcagtctcaaaacaattcaaatcttagctttccaagtgaactacaatatctttactgttttaaatttgagtttaaataagctttgaaacttcacatgaagtggggcattttaaaacatatatctaccgatgaagttttgtcaactttggaggaggactcaaattatagccaaatgacttaaaaatcaagctagttaaaaaaaaa

SEQ ID NO: 271104 - DNA, 608 bp, Homo sapiens
acatttcaaactgtcttttcaactaacttgatcaatattgaggcttttttcccatattagccagaaagcagatactagttttggtaaatgacttctctaaagaaaacactatgatttgaaaagactagcacacaaggacaaatatggaattaaataattcttctgagtagacctgtgttctctgtttcaagtatggaactgcataatggttcagtttgtatataagataataacttttttattgaaaaacttgtgaaggggaaagtcttgctatatccttgagccaggaatcaaggtctccattgttatcctagccccatagatgtttttacttagccctaagtttctaaagttttatgtagggttaatatgcagtacagtaatgaggcaggaatttgaatattttcttcattattggaaatgagtcttgtaatttaaagacaaaagcttgttttgagaagtaatattcatatacctgctgtaactgtgaatgtcactgctcttttctggttgtgctttgccacaaattttattgtgaattgtaaagatttgaaactcttaaaattagccatttatattttgaaaaaaaggggtgtgattattttaaa

SEQ ID NO: 271105 - DNA, 185 bp, Homo sapiens
tatatagagaggaacaaataaaaatcttgttaggaaagttattttaagcatttatttttctttgttttcaataattcctgtttctacctattttatatataaccattaaaattagtacattggaatgataaatgcacaagtctttgggaattaaaatataatctttagagaaataagctaagctg

SEQ ID NO: 271106 - DNA, 611 bp, Homo sapiens
ggcgctgggaggtgcgcgggccgtctgggcctgccggcttcctccgcggggtgcggcttgccaccctcacccctacccctatccctatctccaccccaaggcctaccctgggctagcgaggcgatctcctgagataagaagtgggcccgcgtctgggatttgctttccgttgacctctcccgctgaacattttggacttacaaacagctgaatgattctttttgtattcaacaggaagtaattttatgccaagagactaagactgtagtttttgttgacttcttgtaggtgaaatcccagttgatgtgactttgagatatcttgtgtaaattatttagtggccagttgtatttttgggattggatctcagataaagctgggcagattggctgatttagatagaacaaattttgtaaacagttttgttaaatttaggaaatataaaatctaagaaaaacatttattctactaatgtcggttagattcaaaacgttatcaaaaatttaattaggttcctctaggtaaattaaaaaaaaaaatactttgtctctactcaggggaaattctttggttttagaaaaaatatttctttttaaagttcgcagttgcct

SEQ ID NO: 271107 - DNA, 539 bp, Homo sapiens
atgttacttcctgcctgcctgcctacctcccaaggaaaatggaaaggtcaaatgttgacaagtatcaagaattgtggtccgggtctacagcagcctagctgtagatagctccacacacgacttggaaagtagaaataggactaccaggagctctcctctcgaagggcggcttattttatagcgggagacaaatcgggttgggacgccagtgtcaacgaagactcccgggcgggcgggcggcgctgagctctgagcgctgagagatgcctaagctgaagcatgaaggggagtcgttgtccgcggtgctgaagcgcgcgccaggcttcgcctccccttccctgcagttgggattcctgggatcggatttagggtagtctgcagctcccgtcttcccggcccatcaggcttgcagggaagcagctggaaagttacacctcagggcatcctgggtacctccgaacattttacttccccactcccaccccaagctcaaaagggagctgggagagactctttaggaaaacaaaacaaaacaaaaa

SEQ ID NO: 271108 - DNA, 377 bp, Homo sapiens
tcaattttttgtgtcatatgttttaaggctattttattttattagattcttaaccaaatataaatatgtgatatctttctgctaaattgaaacttttagcgttatgtattatttacctctatttctgctagtgataaactattatagtttttgtttgcctgaaatgtcattcttgatagatatttttacatgggtgtaaaattcaagattggcatttatttcattttggtacattaaagttacctcctcaatatcttctgggttccactgttgtctcattgtgctgcttcatcagtaatttattatctttcttccaattttactaattttgtcttcttgtgtgtccaacatgctattaaaagtattccttgagttgt

SEQ ID NO: 271109 - DNA, 288 bp, Homo sapiens
gaattttattttacaagtgaagaatgaagtccagagaagttaagcaaattgttcaagatcataccagttagtggcaagtggagaagtaagactcctatgttctgtctccaggcaatgttcttgccaccacaggacactgtctattgcccagaaactactagcccattatctttaggcaaaaacaaacaaataaataaataaactgaaaaaccttacccttgaaatgtaaactcttcaattctacttccttttgcctttctgtccagtattaaagtatttatgtcttta

SEQ ID NO: 271110 - DNA, 439 bp, Homo sapiens
agggcttcagaccgcaggcccacaaggaggaggtccatgagcccctgaagctgtttgcacaattgttcctgtacatgtatttttctgcgcaagactctgtggtttcatcagattcttcaagtagtctggggccattaagaatccctggtccagctgggtacggtgactcatgcctataatctcagcactttgggaggccaaggcaggaggatcacctgagcccagaagtttgagaccagcctggacaacatggtgaaacctcatctctagaaaaaaaattttaaaattagctgggcctggtggcatgcacctgtggtcccagctacctgggaggctgaagtgggaggatcgcttgagcccaggaatccaaggctgcagtgagctatgttcacttcactgcactccagccttggagacagagtgggagaccctgtctcaa

SEQ ID NO: 271111 - DNA, 372 bp, Homo sapiens
atgatgtgggggtctccgtcacagggtcctgaaatcacacattcaaaacaggatcccacttccaagactgtaatttgtccaccagttgaggagctcagacattctacaagtgaacccacttgtctcttcctgtgagttgcagtttgctcttctgggtagtgaaatcaggctcaggcaccatggcccagccctgtaggcttctagggtgttgcggtgtcaagtagagaagtgacctgctatctggagcctcatcctcttcctcttcccactccctcccacagactctgaggctccccacccgggctcccagtacgtggacaggccagctaggcctgtggggcacagcagggacatggggccagtctggggacc

SEQ ID NO: 271112 - DNA, 413 bp, Homo sapiens
ctgttgttccatgtattttctgtatgttacaaatatttactattaattataacaacataagatgtactctaactccttcatgctgctaattatagaatatctactttgttgactaaaccctttagcatatatatatatatatatatatatatatatatatagcctatttctgttaatggttctttggataaataacagttgactttgttcctctgcttggtattttaaaaaacctattagtttacaaatctcttactaattttagttttaatatttgtattgttaagtattttaaacacacagaaaggcaaataaacccccattacccaaacacccagctttattaaatcttagtattttgtcctatttgtttcaatggtttttttaataaatcagtgactacaataaaattg

SEQ ID NO: 271113 - DNA, 431 bp, Homo sapiens
caggacccagtacaccctctgcagccgctggcccgggtgctaagtccctcattgccccgggccagcagggctggccggctgctccgagtgcggggcccgccaagcccacgcccacccggaactccagctggcccgcaagcgctgcaggcagccccagttcccgctcgcgcctctccctccacacctccctgcaagctgagggagtgggctccagccttggccacccaggcagaggaggtgctgagagcaagcgagggctctgaggactgccagcatgctgtcacctctcattttgtttaatgttttctattttaatgttttgtattatcaggtgtctgtcaagtcaggatcactttacatgctactgcagtgtataatcttgtcacaatgtattggctcataataataaaaaccaccaaatattacatata

SEQ ID NO: 271114 - DNA, 803 bp, Homo sapiens
agcgggaagacggcgagtggaggctcgggaggggctgcgtgtgcgcggaggcgggctgtggcccgtggccgccgccggagcctttcgcttgcggtgattttgggctccctcggttggcagtgttgatgtgtgcctgtgagttgtgagcgaggcagatttcctcgcgtggccggcacgaccttcacctttgcagaaggcaaccgggaccctcagtgagacaccttccatttccaccgtagtcttaccatggtctgggttttacattcgcgcgctttggtaaactattaaaggtagtaaagtcgatgggcgattaccacccaaatactttgtctcttttggaatctcctctgcatttaaaggatttgacaagccgacattttaaactgttaggattgtggagtaaaggaaaataggatcgaaaagcgaggtactgtagccaatttgagattagtaagaaatatagagtacatttgtaaagccaatatattttttcattgattcacgatatccttctgcctcccattcctgttcatatgccctaaagtaaacagttggtttggtaagggtggggacttgtgtcaacaccaggacagttctgacacatagtaaatgctgaactctattttggtgaatgaatgaacacctgtagtattcctgttttgccctttgcctgggtaaaatgagtcatgtgattatgatttatttatctaacaatttattgaacacctaccttgtgtcaggtaccattccaggctttgggatacatcaatgaacagacggaagttcccaacccttgtcgactt

SEQ ID NO: 271115 - DNA, 534 bp, Homo sapiens
agcgggaagacggcgagtggaggctcgggaggggctgcgtgtgcgcggaggcgggctgtggcccgtggccgccgccggagcctttcgcttgcggtgattttgggctccctcggttggcagtgttgatgtgtgcctgtgagttgtgagcgaggcagatttcctcgcgtggccggcacgaccttcacctttgcagaaggcaaccgggaccctcagttgattccagttcaaaagttgctgtggtcctggaaatgaggattctgggcaaaacaagaaattgggtgattatgcattcaagatctaaagatgctttcctttcatcatctagaatgaatttgttcatttatcctgatgaaaggttaaagaagatattgccaagtgtgaacaataaccttcgatggaaatgatatcatcaattcctgaaagtgcagaacaatctatttttaggaagggatgtgctccattgagctcctgattttgagaccacttttatttatttatttttaaacttaatttagtttgatatttaaaattatt

SEQ ID NO: 271116 - DNA, 478 bp, Homo sapiens
aattttacttgttttttctgtccattcaaggaatgaaaaaagaaaatgagtgcatagaagccggaagtaggacggtagtttcccggggtctgcagggaatggggagatgtaggtcaaagggtatgaagttgcagttatacaggttgaataagttctagagacctaatgtacagcatgataattatagttaatcatactgttttgtatacttgaaattttctgtgaggatagatcttaagtattctcaccacacacacacaaattggtaactctgtgagatgatggatatttaattagcttgatggatttatgatgtatacacgtatacaaaaaatgaatatcaaaacttcacattgttcacttgaagtataaaatggacagtctttatcaattataactgaaaaaagctgaaaaataaaacacaatatttatcattttaaaaagtacagaaaagaaaaatgaaaaactgtcttcaaaa

SEQ ID NO: 271117 - DNA, 109 bp, Homo sapiens
ccagtgtgagattgaagaactaggtgtcatcatcaacaaggtggtgtgatggctcctgcacaggccctgcacataggatgagggcatctgctcccactcagcctagccc

SEQ ID NO: 271118 - DNA, 416 bp, Homo sapiens
tgcttcttcagagcaaaacaagaactaggaatcatcttttcacctgggaaggaatcaagtaaaaagcaaaattgaactaaaggttgtttacctttcaaacttggtggccatgttgtgaggaagcccaagtgacatgaggagttcccgtggaggtgtgctgctgacagccccaggtgagagctcagccaagaatcagcacaacactgtgagtgcaaacatgtgagtgagtgagcttgcagaggatgtgatcccacctaggatgtcagcattcaagacaccctagctgacactgagtgagtataggtgaagaacatttacaacagtgataatagaaaacttgtcataagtttttaatttgtgctgtaattacactctgatattcccaaatcttcaataaaaatccattgtacagtaaa

SEQ ID NO: 271119 - DNA, 223 bp, Homo sapiens
catattttcccaaattagatttggtaagataaactcctccattgacatatttcttaacattatggggtttcctgagcttaatttttgcttccggtcatctgtaggattgcttagggcattcactgggagtctgggagtacttagctttgtacatggagggattgtgaggacagagagtcactggcctccctccagcctgcatgtactattccatcccaccatg

SEQ ID NO: 271120 - DNA, 340 bp, Homo sapiens
gagtctttggcaagagttcagtttcccagggttggttcacacacccacccttggttatatggcaccataagaggcaaggagcttctagaaaccttatcgcctggtttcatagacttaccctccctcttagactggacataattgggggagaagtaatagcttcttctgtccccaaagtggggtgttatcatgaagggagaaaggatgttgagttatcaaaatatacaaatatctcaactggaagtcaaaatgtgtcttagaaattcagcaatgtctaagtaaagacactcagaattgtctgcacataaaactgtaagctccagctctccagatttgaaaa

SEQ ID NO: 271121 - DNA, 468 bp, Homo sapiens
aagctaagagtgtgtcagcagctgactatcactagagaaaattctaaagaatttacttcaggcagaggaaaatgatcccaggtgggaaggtctatgatgcaacaaaaataaagagcagtagtaataggtggagaatgacacattgtagaagatgtacagtaaatgaacactgcatacaacagcaaaaaaaaaaaaatgtgaaagtagttttaaaaataatattgaactaaaatcccaaataacaataatataagttggggggggcagagcagggtatatagaataaagtgttccaaggatctcatataacccaggaggagaataaagcttaaagtaacttttgatgttgataaattaggtacacatgttacaacttctaaggtaaccactaaaagaataggaacagtagatgaaatttccaaactagagaaagtgaaatgtaaaaaaaaagtttaacccaaaacaagg

SEQ ID NO: 271122 - DNA, 507 bp, Homo sapiens
agacaacaggtccagtgcttggcaggaccatgactggtgcactgtcttcttggtcatgctctgattggaggattatccttggccggtggttctcaccaggaaaagtgtgctctcctgggtcccctgcaaaccaacaaggtgcccgaagatggtgtaaaaacacagatttgtcccacctggtttcaccccactttcctctctggtcccaggcctcagggtctggacatttctgccagggaacatctgttctgcagagcagccaggactccccctgccaccccccaccaaggagtggttctaagttagctttctcataaacggttctcacatggaagaaaagcagctgtcgctgaagccacgtcaatctgagcggtaaaaggtttgggcaaaaacatattttattgttcttgctgtcagaaacataaagattgaaggggcatgtgactcggtaattgctgtggactttttttcccccttgacaataaacataaaacttaaaactgaaaa

SEQ ID NO: 271123 - DNA, 872 bp, Homo sapiens
tctagtccaattctctaattctgtaagtgaaggtctacagctctagaaaggtgacaagacttgctcatgatggcgtatctcaaacattgtcagaataattttagagaaaatcttcctgcaaagtccaaccagctaaaaaatacaacttttctagtttctccgctttaactacatcagtgtcttgtggctacatcatgcctgacaatctcagatgcttatcttacttatgaaatagaaacttccatttctggcatacattcaaatcaagtgaaagcatcatcaagtgaaagcaaacagctttggggaagggagtcgaagaaactctttaacccaacttcatggtgatgaaacagcagctttgtattgggtgtctaaaatactagtttcacttaaacctcattccaagttgatattgttggaaaagtagaaataatatctcaagggtcaagttgaccttttcagtgggaacgttgtccttcaggctacttaggattctttgtatctgcttcctggcaatctttgagatgctgtaatggaatggctgccctgagtgttaacagtaaaactgtatattcagtttttaattaattaggggaaatttaattaattggggaaagtgtctcaagcattctctttagaaaatattcctaaagagctgtatttagaagcaaaagaagaggataatatgtgttttatttacttgatgtaacattaaattgcaatggcagatgagctgctttttgtcataaatttatgggctgggctaaacttgcaactggccttggtgactgtatttcctttcatttgtatcttcaagagctaaaatgtaaggctttatcaatttatgaataaagtgatgataaattcttgta

SEQ ID NO: 271124 - DNA, 303 bp, Homo sapiens
ccttaaagttatatttgttattagcatacttctgatataaactggttttcctttcagagaagcgtaatcattggaggaaatgtttgtctttgggaaaaaaaagaaaaaaacgggaagttgtacttcaggaaaaaattagtcctcagaaaaagggaacaatatgtctgcatttttggctattgtttcagcttatgtacatgtttctgcttaccttcttgaaagagaaacaagttattcaatgttacgtatgaatcaaagatcagattactcagaatcctgaaaaataaattgtgactgtacata

SEQ ID NO: 271125 - DNA, 391 bp, Homo sapiens
atacttttccaattttttaacaggaagcttgaattagttttaaatcagaaaaataaagaaaaaatcagtatattcattaaaatttacctcttcaaaactgcatcaagataataaaaatggctgggcatggtagatgacacctgtaatcctggcatttggggaggctgagacaggtggatcacttgagcctaggagttcgagaccaccccgggcaatgtagagaccctatctctacaaaaaattaaaaaaactagctgggtacatgcctgtggtcctagctacttggaatggcaaggcaggaggatcactggaacccatgaggtcaaggctgcagtgagccatgattgtgccactgtattccagcctggataacagagtgagaacttgtctc

SEQ ID NO: 271126 - DNA, 438 bp, Homo sapiens
  misc_feature (335)..(335): n is a, c, g, or t
  misc_feature (352)..(352): n is a, c, g, or t
  misc_feature (382)..(382): n is a, c, g, or t
  misc_feature (403)..(403): n is a, c, g, or t
tgattgatgagttctctgggtggaacgttggcttgacagctgagaacgaagatggacctaagtaagataagatgtgagggattcatctaggaagttgtgccttctacctaaaggaatctgggcagaacctttactgtattttattggtctcttttgagctttgctttatgtagtgcggacagtgagctgtccgctggtttgagtaacttcgttgggatattgggatttttgtgtgacatagattaaatgtaaacatgaattaaattgcctacacttagggggtaaatgtccctgtttttatttcacgatttaattccagaaatatcaatgtccanagtaccaatgtcttttncaaggcttgcaatggcttccaatatcctgngcttacaatggttccaatgtnccaggggtttccgatggcacctgtgtcaagggctt

SEQ ID NO: 271127 - DNA, 345 bp, Homo sapiens
gccaaaagaggcacttgaagattcttgagagtcttgaaggaaccatcttactttttaaaataaaaaaatcttatttctaaaactgaagttagttggcaaggaagcattgaagttttatatattttataaaacagtatcaaattattatactctagttaggaaaatagcacacaactttaataatttaatgaaggtactgtttaaatatgctatacttgcatgagtctaaagaatggtttttgttcccaattaaatacaagaatagcaaaatgtggaaacgtaaatttagcaattgttcactgttgttttcccaccacctgaaataatgctggaaatacagttggc

SEQ ID NO: 271128 - DNA, 451 bp, Homo sapiens
agttgtttttgtacctctgtcttacacagctagtcttcacttaacgtcatcgataggttcttgtagtacttttaagcacaacgatgtataacaaaaccaatttttttctaacaatgttataatgaaacgacttcaaagtaaacagtgttgttcaaggacctgctacacacagttctgcttaaatcgtaggacttactgtacctataatgctcaactaagaaataggcatctacaaccaaattctcgatttttcccacaaacataacacagcatgaatatgtctgtgttttcatcaccaaacagcaggcagagtttatttgctttctccagtatgccaatgcctacagagaggtagccttaaaatcacaaactggtgggtatatattcaatttgtatcactgtcttggaaaagtaacacctaattctcagacactgttagaattaaagcatt

SEQ ID NO: 271129 - DNA, 619 bp, Homo sapiens
ccaaagtgctaggattacaggtgtgagccactgtgcccagccaaaaaaatttttatagataattgaattttcttagcttgaacgcttttgcattttggactttattttacatagtttcatatttgagattctgatattttcttattatataaaagggattcaatttcattctaccattatataagaattatctaggtagtaatatatacatttattatcaaataattatattttaactcttgaaataacctttaaaaggttaccatgaaataactattccctttaataattgtaatgttacttaattaaatatagtaatttgttctaatttgctttccatttttaattttttttaacttgaagatgaaacacttctttttgttagaccttaaaagtaagaaattaattaatttgggactagaaacagctaattaattaagttagatcctaaaaatctttaataatctgctacaatatttgtagccctaaatattttctgctatctttattattttaattgttttgtaaactttaacatattttacaacttcgaagtttcacatagatttaaggatcatcttttgtgttggttagaaaccaggatcccacaaattgctat

SEQ ID NO: 271130 - DNA, 486 bp, Homo sapiens
catctctgcactgtggcttgcaaatgaagccatctgtcaaaccaggggccaggcgcccagccctcactcacctgggctgtgcctctggccaatggctgaggtgacctcccaggcatccatagtggagtatgtttctactttattgaacagccttgaaaatcagagaagctgaggaaaccatgtcaaaatttcctgagaaatttctctcctgcacttggtaaaggtgaactagaatttgccatgtgagtgaggaggacattttttaatgaggcaagagctccacaattcccacagctgctcagaaagttctcttgcgtgtcttgagagagactgaaataaagggaagtcgaggacagcctggctttgttctttgaaactacttatcaaagtaagatcatcctaacccaatatgagaagtatatgtgcaactgtgtgagtgtgtgtttgtgtgtgggggtacacactgaaagaaaataaataaggatg

SEQ ID NO: 271131 - DNA, 493 bp, Homo sapiens
tcagccttccaagtagctgtgactacatgtgtgcacccccacgcttgactaatttttttaatttttttgtggagatgaggtttcgccctgtcgcccagactggtcttgagctcctgggctcaagtgactggcccgcctcccaaagtactgggattacagatgtgagccaccacacctggccacacacttgtcatttctgacccccgagcccaccacattccactactcatgagaaagaggttcctgaacgctgcaggctaatttcagggacagcaggcaacttggccgcatgacaaagccaagtggtgaaataaacacattcttaattatgacctgtctcctcacccacatttttcattttccagaatggggacttgaaaactcaaaaggaagcagccagttacacatcagacctgttatctttcacctgttacctttcagctagaccgtagggtcagatgatttttgtttttttttctggtgaggggcagag

SEQ ID NO: 271132 - DNA, 801 bp, Homo sapiens
aggaaccttagcttgtgagaaggaagttgtacctggaaggatttgccatctatcaataagaagtaactttgtaaattcagtcaaggatctaataatctattatatctgaaatctgggagctaaattggactgattatggaggttagttggatatttttccacttttgactagtcagtagaaattccactttgaattaacttcttgggactgagtacaagttgagttgcccacagtgttttgttcggaaaataaaattatgttgttatttatttatttttgacagggtcttacccagccttgacctagtgggttcacctcagccttccaagtagctgggactacaaaagtgtgccaccatgcttggttaatttttgtaattttttttgtagagatgatggtttgccatgttgctcaggctagtcttgagctcctaggctcaagccatcctcctgcttcagcctcccaaagtggtgggattacaggtttgagccactgcacccagccaattacgttatttttaatgctgaaaatgcacgttgatgacatttgccgaagtatgacgaacaagggggtatctctgaaataccctcctaaaagagacgagaaatgaaaagctggttggtaagtgtttcaggaactttcagattgagagtaatgttaggaagtatttgctttcaagcagttttttttttctttttgagatgaagtcgctctgttgcccaggctggagtgcgttggcgtgattgagattgcccccctgtactctagcctgggtgacagagcaaaattgtgtctttaaa

SEQ ID NO: 271133 - DNA, 409 bp, Homo sapiens
tacatgtgatatggctccttgggagggttctttgtatttcctcggatgtatcaaacctgcttgctcttaatttcttaccgcttcatctgaaagtatttttctttcagaaaaacctgggatgtggaagtgatcgttttgtatattttaatttagtggttgtcatcaacctagtgatttggattatatattacattagtatcatctaggattttttttttctgaaaggatacacaaaggatgtgtcctgatagcttagctcccacttcgaagtgagagcataaccatatttggttttccattcctgagttacttcacttagaacaatggcctctacctccatccaagtagctgtgaaagacatgtctcaccctggtaatccagaatgtggtgaaaccccatctaccataaa

SEQ ID NO: 271134 - DNA, 210 bp, Homo sapiens
atagcttgttcattataatcagtctgtatacacattatacatgtgatatatatacacagacacacacacatacagagaatgagagagagagacagagaaagagacagggtcttaatctcttgcccaggctggagtgcagtggtgcgaccacagctcactgccgcctcaacctcctgggcctcaccaatcctcccacctcagcctcccaag

SEQ ID NO: 271135 - DNA, 299 bp, Homo sapiens
gtcatgggctgttcagacaatggaggacttgagctaccgatatacacaacatccatgtatgaatcccacacacattgtgccacatgaaagaagagacactaaacgctgtaagcccatatgacattgaaatgaaattcaaaaccaggcagaattaatttacagtggtgaaaaatcagatcagtggttgcccctgggatgggagtgagggctgactagaaaggggtcaaagggagctttctggttgatggaaatgttctgtaacttgtttgggcagtgggcacataaaactctaaaaactc

SEQ ID NO: 271136 - DNA, 382 bp, Homo sapiens
ttttttaatgttgtgttgtttgagttccttgtatactctgggtattagtcccatattggatgagtagattgcaaatattttgtcccatttaagaggttgtcttcttcatgctgttgattgtttcttttgctatgcagaagctttttagcctataatctcagcattaagggaagccatggcaggaggatcacttgagccgagcagtttgagaccagcctgagaaacatagcaagatccgtttctacaaaaaaatataaattagccagacatggtggaacatgcctgtagtcccatcttcttgggatgctgagataggaagatcacttgatcccaggaggttgaggctgctgtgagccataatcacacttactgcactccagcc

SEQ ID NO: 271137 - DNA, 155 bp, Homo sapiens
cctgctagccacttacctggtggtgggcactaatgaaccaatggccaggaatccttaccttttgggaactgtaatgttatcattgtttgagctcctcttttgaaaatgccatgttgtttttcttttacaaaattaaataccattttcactaattg

SEQ ID NO: 271138 - DNA, 1637 bp, Homo sapiens
agcggccccacgcgaagctggcgtgggggttgccatagcccgcatcccagggggcgaggccgaggcttctccccggcccatccagcggctgctgcccggctcctctcccacctgtccgcttcggcgcctcgcccggccccgcggcctccaggcaggcggcgggaccccaggcgagtgcccgttagcgggtctcccggcggcccggccccgcgtcgccctgtgtcttccaggtgctgggcctagggaggcgcgcggcagccctcactcctccgctcctggtgacgccagcccatcccctgctgcccttggctttctgggcctagcggatctttgacgccctggtgagaccgttacccacccgcccgccatagctcctcgggggagtcagtgccaggctgcagcacacgctgccttttcaggaacccgaatttgggaagtttactcatgtctaagtccagctggagaaaacaaggatattaagataactattttctggagggctgaaggaaattcaaaatgatttagaccttctcaagtgttaggaataatccctgcggcatgcaccctgtgtacccttcgactttgagcaatcatgatgctgctgcacctttcaattaattgtgcaaactaaagttttcctctttaagtggcattattttggcatgagttttaaagacaaagatgagagaatttcttgtttggaagcctacgtaactttgacatctaagagctcaagatttactgatgaaacagagattttgaagatgtcgcaaaggcactcaggtcaagctggcactgaagcaggaaatggggcggactctcctccaattgtcaactccaagtactccaccttcagagatttttgttccacatcttcatttcaagatagtggctacaatgagttaaaatcttgtagctttgataatatagataaagaatatcttggaaagaaagaaaaaggcccaacattactctatgagcaccctgaaacttcaggcctgggcttaacacatcctttagaatctcccactcaaaaaaagaaatgtatcttgcctagaaaggaaaaggataaaaccccagaactttgtgaaacacctaaaatcagtgggaaaaaatgtttacctcgcagaaggttgaatgtatctttcgctcttctaaaaggggactttgaatcacaaaatagttctttagaaagtagtataagccaagttatcaacttagaaaaaaatattccaagcagtgcttcaggtttttccagggcaaataattttagccctttagttactagcactttaaaaacagaagaagtgacttcatgcagtcaaaaattgaggcttaatttttctcagcaaaagacttccacaattgatgattccaaagatgattgtagcctatttgaagttgaatgtatatctccaattcagggcaataattttaaagactctatcacacatgactttagtgatagcagtttatgcattaatgatgagaatgcatgtccagagctcctgggctcctctgttagtggaacaacttgtggaacagatgaggacatatttgtgactccgataagtaatcttgtggcaaacattagatttaacgcaagtcaaatactttctccttcacctgaagtgaga

SEQ ID NO: 271139 - DNA, 428 bp, Homo sapiens
gttccctcccccaatacacacaagtgcacatacttctcattcacatttccattatctttccttatccgttaacagcaacacaaatatatattctaactcactaattagaataattagtacaactgatcaattattcccacatgttaaatcattactaatatgtgatagcaccttattgctagagtgaaggttaagaactatagctaaagagttcagtcatcttaggaaggaaatttaaagttgagaaacagaatcaaggcgttgagtcaagtattgccagagaaagccggaaggctacggactgcatcctgggggtatgcctacatggagaggtaggaaaagcagctaaggaaatgctgaaataggcagatcaatgtgtataaaaatattaaaatgcggtggaattcatgccatcttctgcacatcct

SEQ ID NO: 271140 - DNA, 497 bp, Homo sapiens
caacttagctagacagaagaaaggaagagtatacaacacagcgcagtctaggtgaacagagctgaagaagggtggtgtagtagttcctgttcctttcctgcctcacttcctggcctcaagtgatctacctgcctgggcctcccaaagtgcaggattacagctgatgactcccagaatgtcctgactgcaaggaacatgtactatggacccatcagaagtgagctcattttctaaacatctgtgttgccaacaggcacacacctaaagtttcctcctatggccacctgtggatcaccctgaccttcaaagctggtagccaaagttctgcttccacccccaccatctgcaaggtggcacttttcagtcttgatggataaatgttaaaaatcacaaccaacaattcttaatcatccctatgattttcaaaggaaaacgctactgtattgtcaaactttttctctacaggctaaaataaaaataaatgactactgaaaaaa

SEQ ID NO: 271141 - DNA, 402 bp, Homo sapiens
tgcacggctttctggatgagatcttcttcaccttcttcttcaacgtactggggcagggggacgggacaaccagcggccacacgtcgctctggtccttctttatgtacggcagctgcagtttcgtggtggaaaagctctacttccacctccactacagccgcggttggggcacttggaagcgggtgcccatctacgtgatcttcatctacgtgtgggagctgtcctggggtctgggactccgcacgtgcggggcttgttcctgggactattctcactacccgctcaattttatgggcctcatcaccctgatgtatttacctggctggatattccttagtgtgtaccaggacctaatttccaacgtgttgtggagggtgcagtacgtaccagctaactaaaacc

SEQ ID NO: 271142 - DNA, 477 bp, Homo sapiens
ttaagttctggccactgaaatggaaatggaagtatggtatgaaacttctggaaagctacataaagggacctggcttagctgggtcattacattctttctctttccttccagtttgcctgtaactagatgtgttggatgaggtcatggagcaaccttggagatagaagccacatgctaggatggtggggctgaaaaatagagcttgttgcctgaagaccattacgtctgcatatcaaccttgaattgtctccttttgagcttctttcacacaagagagaaagtatcttgtgtttatgacattcttatttgggtctttggtaacacgaacccaaaatttatcctaaccaataggagtacggttaaataaattgtggcgcatctgtatatggaatattatccagcagctacaaaggatgagataaatttatatgttctttaaataatggctaccaataaaaggattccctcttctgcctt

SEQ ID NO: 271143 - DNA, 433 bp, Homo sapiens
agacaagagctcactcactggagagcagtggcatgatcacaggtcaccgcatcctggaattcctgggctcatgagatcctcgcacctcagcttcccgagtagctgggactacaaggtgtttaacaccataccggctaatttttgttttgttttgtttcgttcgatgaagacgaactcctgggttcatgcaatcctcccacctcgcttcccaaagtgttaggagtatagacgtgatccactgactctggcaaaactatttttttaaaaaagtgacaatggcttaacacctacattagatgacaataaaaccagtgcagatggtcatgaaaagcaaacaaattcagggattatagactttataaccaagtatatctactggtctgtgaaaggaggaaatgacagagtatgaacaataaaatactataacatatat

SEQ ID NO: 271144 - DNA, 444 bp, Homo sapiens
tcttgagttactacaaaccttcatttctgttgaaatttttttcaaactgttaataggaaccaatgagatgaatgaatttagaagggtataaatagaacaaagggaccacagtatatgccatgttcacatttgtatccttagagcctagcacaaactaggttctctaggcccagcacagtggctcactgtaatcccagcactttgggaggccaaggtgggaggattgcttgaggccaggagtttgagaccagcctggccaacatggtgaaacaccatctctactaaaaatataaaaattagttgggcgtggtgatgggtgcctgtaatcccagctacccgggaggctgaggcaggagaattgcttgaacccaggaggtagaggttgcagtgagctgagattgcaccactgcattgcagcccaggcaagagtgatactccgtctta

SEQ ID NO: 271145 - DNA, 352 bp, Homo sapiens
aattaattaaaaatttttaaaaaatacaattaaaaaatacctttgctattgatgtctgtttctgattgtctgtcatcccggtacactatatttactttccagggaaactgagtcattcaacaagcctctggcttctagtgataagcactatcattagaaagaattatgttctgtgtgttaaggataagggacacattctttttggaaaatagtgcttgtgagtctaggaatagttgtataatctgggaatatatgctaatgctatagctgagttcaaatcacttttttaaaaatgcaaacttatcttctctgtcaccaagcatgtcttccatacaaaaggcacatttctgta

SEQ ID NO: 271146 - DNA, 342 bp, Homo sapiens
gtcaaagctgtttccaccttagaaacagcagtgatgtttctagcagtaacatccagtgtcaaatattggtggtatcggggggatcagcagcagcatccctgccaagaggtatcagctgtggtgtctacatggagcaattctgagtatgatttttgaagccattcctaggagtgtagccccattcctactcctctggttctcccagagatctgtgagctatctaatcttctcaaatacattcttgcttctatctctcactttctctcttttttttgttatttctcattataactttattttaaaaattagttctgaaaaattggcactatccattaaactgaa

SEQ ID NO: 271147 - DNA, 436 bp, Homo sapiens
caaaagtgtatcttccaaaaagtacattttgtggtagacacttttcctctgctaaaccatatgacatcaagtggcatcccttttcttcctttgtggtcattctaaccctgatcccagattggacaaggttgaaatatcagcatgaagtgaagttggttctggttaaacttttccaggattgtcccatcttccagtccttgtaaatgagtgtcatgctttgttgccaagtcaatgaggagacaatgttcacatggagacccttgggcacagatgaaactggaattccttctcacccatttcatacagatagtatgaaactcatttcaactgagaagtgaaaattctggttaaggaagaattggtacttgaaagttgttactttaaaaaattatcttgattcatggttttacaagtcagttataaatgttaatagcct

SEQ ID NO: 271148 - DNA, 561 bp, Homo sapiens
caaagaaaattgaataatttctagcatttcacacaatttaagaatgaatttattttccacttcataatgtggtatattatcattcataatgtagaataacatgctgtggatttacagtgtcttttaaatcattacgcctaacccaaaggatgtagacttccaatttttaactattataaataatacttgataaatgtctaggtgcataaagcatcttcttccacagcattattttttgaatgagagatgttcagaagtagaataactacgtcaacatatccagttcttgaaagtacattgcaaattacttaaagttatagtcccataagaaggatattgcattcaatttaaatatctttttcaagacctgaatccctgtattgtaaaggggaaaactgaggcacactgacattaaagtggcataacctaggtgaatcaatagcaacatttccaacttttacccttctctggggtaaaatgcttcactgttgctgttaatctctattactatcctgaaacgtttcctgaaatgataataaacagaaaattttaacataagaa

SEQ ID NO: 271149 - DNA, 869 bp, Homo sapiens
atttttaaaacaaaaatagattttgtttaaaaaattctttctatatgtaaatattctaaaatgtaatattccacttggcactaagtatttttgttcactcttctcatccatgtcattggtctcccttgttatagtcttaatttaatttcatcacatattctttgtagattagatcagtttgaaaacaatgcctttagtgtcttccatcttagtaggacatttcctactgaagaacaaaattatctacagtcttttttccctcgcatcaagaccaaaatatgaaagcagtatgtctttaattagaataaataatgaagagtcttactctaactacagaaaatataacacctgtttagattcctaaatagttgaagatggtttattggaaattaacctcatattacagggagtctcctgaatgtatcctaaaaggatatctgtggcctggacttgaattgcttcctgatttctgtgtgtctctgtctgttgcctttgcataacaggtcactttaattatcaagtgacccggtggctacaaggcactcatgaatgttgcagtttactgcaaggataggtgacagagatagacagcccaaaagaatggctcaatgttgtggtcagggttcagggcaatagaaatgccatagagccaagaagaagaaagcaggttttactgagagttctacctgttgggcaaacagacaaggaagtaatcatggttaatggtggtaacctttataaatatgttataaaattaattaaattatttcaatcattatgtaacatgtattatgaatcgtaaatgctgggtgcaaaacatggtattaaaataaaaactataaatatatttatttacacaaaatggtgta

SEQ ID NO: 271150 - DNA, 227 bp, Homo sapiens
aaggaaagccggtgatgaacaaggctattgcttaaagactgaatgacatggaccccagagtttatgtgagttactgtaaaaatcagggcttcactcccaactgagagccttgcagagtgaggagtttctctagagaccatctgataaatgcgggctcccacacgcagagatgtgagctagagccgtgcagcaaataatatatattattttcttctccgcttaaggtc

SEQ ID NO: 271151 - DNA, 261 bp, Homo sapiens
taaccaagagtaaggacacattctagtactcagttcaaactctaagtggatatgaactgacagagaacaaaaccaagcctggttacatcagaagataccacctctaatttcactgcgtgccagaacaaagttgaatacctcttaaaagaagaggtcataactaatccatgatgaacagcatacaatagaaaactagtagacatggtcaaaatattacccatcactaaaagagaaaacatttaataaaagtgacattacgat

SEQ ID NO: 271152 - DNA, 491 bp, Homo sapiens
gagcctaggagttcaaggctgcagtgagctgtgatcacatcactgcacttcagcctgggagacagaatgagaccccatctcttaaaagaaaaaaagtgacaaaattagaaatgtagaacaggtggtgtttgtcaagacttagaaatggcagagagagagggatgaatgtgatgagttttgtagtgatggaatagctgtgtatctttttgcagtggtgattatacacatctgcatatgtgacaaaatggtataaaagtctgtagacacattgaatcaatgtcagtgccctggttttgatactatattgtagttatttaagatgtcaccattgggagaaactaggtttaaaaaagtacatgggacctgctatctatgactccctgtgactctatttcaaattaaaattttatgtattgtacatgcacttgattttatttctgtaaagcaaggcatatatcattttctagtcgtggacattttagaaaaaaaaa

SEQ ID NO: 271153 - DNA, 457 bp, Homo sapiens
cctggcttttttttttctctctctctccaggacaggacgtcccaccctttcttagtccgtaacgcacctttggacatgatggaatatacgaaggggcctccacccacagcatgaccaatccccagcatccaaaatcgcacacataccaatatgtgcacacacacactcacacccacacccataaagattttgcactccttgaaggtacactaactcaccatttttatcatacttatcccagtgtgccacagttactggcttatatgcctgtctctgctatcttattttatctgtctccacaacacagcaaactacctggccttcaataaagggcttatgaattattcatgaatccattttgccaggtgcctagccctgtgtctggcttgaagcaggtgttcccaaggtgtggcatggctgagtgaatacaaataaaaggtatacaaaagcactcagc

SEQ ID NO: 271154 - DNA, 301 bp, Homo sapiens
aataaaataaaataaaaatacaaacttaaatagcttagcaacttattctaaataattctgtaatgaaaagctgaaaaagtagtttttggcttaaaatttttaaattttttcccaatcaatatactatggcatgcttctgatcactatctagtgttttaattatttgattttgcaaacacaattttcctcccattgaaactgatctcttaagcccaacagaccaaggacattgaacccaggcaacatttcaaatgcggaacacaccaaaatgctctagcagttggtttttttttttttccca

SEQ ID NO: 271155 - DNA, 437 bp, Homo sapiens
  misc_feature (66)..(66): n is a, c, g, or t
ctgattcctcactcttactgaggcaaggtaactttgtcagatggtgagtgttattttttcgttttntttttgagactctgtcttaaaaaaaaacaaaaaacaaaaatctaactgtaaaataggattactacttctacttaagtatctaggagaaaagatgctttttattctgcacatatactgtatttttgtatcacaacgcagttcattttaatgttatgaatatccattgtttttcctgatgaacaaaactgtaggctcattttggtgaaaatgttggtttttaaaaaatgcagattcacggccaggcgcggtggctcacacctgtaatcccagaactttgggaggcggaggtgggcgtatcaaaaggtcaggagttccagaccagcctgaccaacgtggtgaaacgctgtctctactaaaaatagaaaaaaaaa

SEQ ID NO: 271156 - DNA, 308 bp, Homo sapiens
tagtcggtgtctttctatgaatttatccatttcatctaagattatatacattttatttcatgcagtttactattaaatctgttaagaggaaaaaggagaacaaatcatttgtcttttataattacccacattattacctttattggtgctattattttttaggaatgattcaacttaatatctggtgtcatttgttttctttaatatttcttcctttactattgctttctttactgatttttgtaaagtgaatccagcaacaaattatcttagattttgtttgtctttatttcatctttattttagga

SEQ ID NO: 271157 - DNA, 233 bp, Homo sapiens
aaagcgaaagagagggatgaaggtttgcttttgaaaaaagtaaaccgcctttctccggatgttgacttaggagccaggcaattcgtcgcgtcgggtcctccgatgctggcatctctgagaattttaaaaagccgatataggtgctggttaagcacctcacgagctgaactctggtatctgtgcagaaactaactttcatggcagtgtccagcagaggctgccttggaagccag

SEQ ID NO: 271158 - DNA, 299 bp, Homo sapiens
aaaatcctattttatggatattgtgaaattgaagtttaaagtcagtttcaaagttggaggactgacatttcacattttactataaagttgtacgactatcaagtagagtggtgttttcaagaaatagactcatagatcaatggaatgtgatagagtgcccagaaacagacccatacaaatacagacaatggatatttgacaaaggaacaaaggcagttcatttttcaacaaatgctgctaaacaattggatgtccaaatgcaatgcaaagagagagagagagaaaagatttcaacagag

SEQ ID NO: 271159 - DNA, 500 bp, Homo sapiens
tattctacttactgtggcttcattgcataaattttatgctcattggagagaatatttactcacaatctagcccatccattcttataaaagagacctctgaaagctaagagtcactttcctgagggaaatgcaagactctgggagagagagggcactttgagaatgggaaaattgcctgtgaaatcaaatttaggcgaaaagatagcccagcagccatatgtaaatcattccctcatgtaggaacaatgctgtgcacttggtaattcaatagaaaacattagtcatttatcatccttaattatcagtcatctctaactgcatctggtttgcattttttattagaaaggtttttttttttttgagttggactcaggcattttttttcttccgttcctgatttcattttgttattctttttaaaattccatcactaattcccatgatgtgaagaggtttctatttcataagacacaataaatcaagcaacgcctctgttgtaa

SEQ ID NO: 271160 - DNA, 90 bp, Homo sapiens
tggacctggggagaatgtgtaaaggacacacaggaagtggccagctgggagttgattgttttttcttatcaacattacaatgaaatgata

SEQ ID NO: 271161 - DNA, 400 bp, Homo sapiens
ttacaaccctcctacctccaggaaggattcaatcctggctggattaaatcctggctgaccatgagtttcttaagactttccccaaccctcctgaccccaaatgtggatatgctttccatttatgtattaatttggtgtttccattctgttggcttgctatctgagtcttaggccactgctgtgtagagaacttctggactaggtctgccctaactacctcattattatttgataacaatgagagtgagtgtagcagggatagaattctggagatcctggttcaagtctcattcttctagagtataaccttagataaattgtgttccttctctggacctcaatttcctcatctgtgaagtgaggggtatatatacagtctctgtaatcctcctctatagcc

SEQ ID NO: 271162 - DNA, 409 bp, Homo sapiens
gctctggggcaggatgaactggagccacatgtatcacctggactctgtcttgtccctgtcacaccccaagggcccagaatgggaggcagtctgcactccttccccagaggcagggactgagtctgccaaatgaataatcccagggcaggaagacactttcggggtgctgaaccctagaacggagactttagaaggctcagcacctaaagaaccagctctgaagccctaggtcctgactggcagactcttctctctaaaaggtataaaatgagaggcctgaggcagcagcctccttataagttactgttaagtaaaaagagctgtaggaatgcaaggtggtgtttattttcagaggagtccccaagccattttcttactaaagcctcatatagtctagaaagtatatttg

SEQ ID NO: 271163 - DNA, 426 bp, Homo sapiens
ccatagaaaaagcagggagaatagaatagcagtgcctacttcatcaggctgttgtgggaattaaatgacttgacacatctgaagggctgatgatgtgatgcttgagagacgcgggatacaacccttgcagcccttggcaggctgacggtgcaggcactttccctcaagtatctgggcccttccgtgccccagtgccacctgcctccccagagcaattaccaatcacatcaacaagggctacccagggtggtcactcccctgctcagcagttctctgcgtctgtagctaccgtgccttctcagcaccccgcacgatgtgtacctcctagaagtcactcaatgagcatttgaagtgaacaaacacctggccggatgctaacctggagggtcagattttacacacatgactaataaagaccgtcctgcc

SEQ ID NO: 271164 - DNA, 565 bp, Homo sapiens
aactggattaggagagcttctggatagctgaacacatggaggtttctggagggtgtggcccccagagggcatggaagctctgcacccctgctcccatacctcaccctacgcatctcctcatctgtatcctttgcaatatcctttgtaataaaccgaaaattttatcataatgagcatcaaaagaatcccaaatgagaaaactgctttttgcataagtgtaaattaagagatggaagtcacatttcaccatggcaaacatttgctgcatgcaaaatgactgaaacaaggtcttgatctgtcaccaggctgaagtgcagtggtacaatcaaagctcactgcagtctcaacctcctaggctcaaacaatcctcccacttcagcctcccaaccagctgggaccacaggttgacatcaccacacccaggtctgctggaatttgctggaggtccactccagaccctgtttgtctggatatcaccagcagaggttgcagaacaacaaagattgctgcctgttccttcctctggaagctttgtcccagaggggcacccaccagacggcagctg

SEQ ID NO: 271165 - DNA, 488 bp, Homo sapiens
gcaaaggccctgtgggagagaatttggatactgaaagaattaaaacattcaaagtggctggagaaatagggctaacatcttacacgtacttatatgccatgttaagaccacgttaagtgctgagaagctgtggaaagtcctcaagaatttcaaggtctgttacagaagtctcggtttacttcaatttctgttctgcttctctctttggcaccatcaggaaaccctagccccgtgtctgtgaaaactccaaagcttaacattctaaccactctagggagggaggatgggaggaagagagctgagtgtgcaccaaggagcggtaagatgccagacctgtgagtgaagaagcatcttggaagtggaccctatagctccaggcacctgctgacacatagtcggaggcaaaccacccagtcaagttcaacccaaattcctgacccaaaaaatcataagcaaaataaaatatttgtttaaagccaaaaaattgt

SEQ ID NO: 271166 - DNA, 475 bp, Homo sapiens
tattcaattatcttcttcctgttcaaacagtccctctgctatggctcttcctcagtagaaacaactggcaacaaaattcaagtttatgattcattcatcagcaaacatgtgagaatcatctacaaagaaccaagaattgtggtctgttacagaagtctcggtttacttcaatttctgttctgcttctctctttggcaccatcaggaaaccctagccccgtgtctgtgaaaactccaaagcttaacattctaaccactctagggagggaggatgggaggaagagagctgagtgtgcaccaaggagcggtaagatgccagacctgtgagtgaagaagcatcttggaagtggaccctatagctccaggcacctgctgacacatagtcggaggcaaaccacccagtcaagttcaacccaaattcctgacccaaaaaatcataagcaaaataaaatatttgtttaaagccaaaaaattgt

SEQ ID NO: 271167 - DNA, 1367 bp, Homo sapiens
aactggattaggagagcttctggatagctgaacacatggaggtttctggagggtgtggcccccagagggcatggaagctctgcacccctgctcccatacctcaccctacgcatctcctcatctgtatcctttgcaatatcctttgtaataaaccggttcaaaaaggccttctttcaaaccttccccaaagcctattttctggaacactaaaaactcaggcaaatttgaggtctatcaaatgtaaaaagtacagactctactgtgaatctcagaaattctctaaatcataacacattcaatagctgacagaagacttttgtttctctttttcccagcatttgggctaaagtgatgatacgcaatgcaagaacgaactagcacaacatcagtaagaaaaaaagggtgaaagctacctgttactacgagaacatttgactagaagtcaagaaactaggattcgagttcctgctccagcaataatcagctatggttttagtttcctaagttgtacttgagtgactggaaggagagctaaactatataccaaagaagatgaatggctagttgtaacagggaaaattttatcataatgagcatcaaaagaatcccaaatgagaaaactgctttttgcataagtgtaaattaagagatggaagtcacatttcaccatggcaaacatttgctgcatgcaaaatgactgaaacaaggtcttgatctgtcaccaggctgaagtgcagtggtacaatcaaagctcactgcagtctcaacctcctaggctcaaacaatcctcccacttcagcctcccaaccagctgggaccacaggttgacatcaccacacccagtccctctgctatggctcttcctcagtagaaacaactggcaacaaaattcaagtttatgattcattcatcagcaaacatgtgagaatcatctacaaagaaccaagaattgtggctggttttgaactcctggcttcaagagatcctcccgcctcagccccactaagtgttgggattacgggtatgagccactgcccctggccaaaaaaagttttacagtcagaaggaaaacaaaaggaatctggatctacacaaggaatgaagagtactggaaaggtgaaaactccaaagcttaacattctaaccactctagggagggaggatgggaggaagagagctgagtgtgcaccaaggagcggtaagatgccagacctgtgagtgaagaagcatcttggaagtggaccctatagctccaggcacctgctgacacatagtcggaggcaaaccacccagtcaagttcaacccaaattcctgacccaaaaaatcataagcaaaataaaatatttgtttaaagccaaaaaattgt

SEQ ID NO: 271168 - DNA, 1205 bp, Homo sapiens
aactggattaggagagcttctggatagctgaacacatggaggtttctggagggtgtggcccccagagggcatggaagctctgcacccctgctcccatacctcaccctacgcatctcctcatctgtatcctttgcaatatcctttgtaataaaccggttcaaaaaggccttctttcaaaccttccccaaagcctattttctggaacactaaaaactcaggcaaatttgaggtctatcaaatgtaaaaagtacagactctactgtgaatctcagaaattctctaaatcataacacattcaatagctgacagaagacttttgtttctctttttcccagcatttgggctaaagtgatgatacgcaatgcaagaacgaactagcacaacatcagtaagaaaaaaagggtgaaagctacctgttactacgagaacatttgactagaagtcaagaaactaggattcgagttcctgctccagcaataatcagctatggttttagtttcctaagttgtacttgagtgactggaaggagagctaaactatataccaaagaagatgaatggctagttgtaacagggaaaattttatcataatgagcatcaaaagaatcccaaatgagaaaactgctttttgcataagtgtaaattaagagatggaagtcacatttcaccatggcaaacatttgctgcatgcaaaatgactgaaacaaggtcttgatctgtcaccaggctgaagtgcagtggtacaatcaaagctcactgcagtctcaacctcctaggctcaaacaatcctcccacttcagcctcccaaccagctgggaccacaggttgacatcaccacacccagtccctctgctatggctcttcctcagtagaaacaactggcaacaaaattcaagtttatgattcattcatcagcaaacatgtgagaatcatctacaaagaaccaagaattgtggtgaaaactccaaagcttaacattctaaccactctagggagggaggatgggaggaagagagctgagtgtgcaccaaggagcggtaagatgccagacctgtgagtgaagaagcatcttggaagtggaccctatagctccaggcacctgctgacacatagtcggaggcaaaccacccagtcaagttcaacccaaattcctgacccaaaaaatcataagcaaaataaaatatttgtttaaagccaaaaaattgt

SEQ ID NO: 271169 - DNA, 388 bp, Homo sapiens
atccacattcattcatcatgcttggcactatgggccctttccatctgaagccccctggttttcattagttttggaattttttttttctgttcttttttattattttctctcctccatttcctctggtctttcttatggtaatgaataaatattgaactgaggtacctgaaaataccaaagtaaggaactacataacctaccagtacaatactttgttgtattttcctcctaggaagaactgcctttcctatttctttttctttaggtctgttacagaagtctcggtttacttcaatttctgttctgcttctctctttggcaccatcaggaaaccctagccccgtgtctgtaagtgtacacaaaatttgaaggtgggcgcgggcttgta

SEQ ID NO: 271170 - DNA, 673 bp, Homo sapiens
gttgtaaccattcaggaaggaacttcctgtcctttatttaattaaagcaacttttcttgaaaaacaaaacaaaacctcttttctaactagcatttacatgaagagttgcctacgttaaaagacacagcaacctgtgaagagaaatatttaagctaatgtgttccatcgtgctggtgagcactttcaaaggagtgcatgaaagatatcacagcctcacaaatgcagagaaaagcctcccttggccactgctgatcaggaagtgagactttgtcctccccacagtgctatacctagccggctggattatcgtcctcatggccaaaaggagactagacatggaaggcaaattgcagttagatgaatttaaccagctttctctacaccgcatgaagccagcgactgtgagggctctgctacgcggctgagcgggctgtgcaggcattgccaaggtctcctcccttgttgacgttccctgctcgtcttcacgtgatcccatctcagggctctgccgtccacgccctcaccaagctggatcctggaagtcatgcaattccttcttccttacttctgtaaaccaaaaagtgtctgagacagatctcagtcaacttagaggtttattttgctgaggttgaggaaacactcaggaaaaaagaaacacgagttacaataggat

SEQ ID NO: 271171 - DNA, 762 bp, Homo sapiens
gttgtaaccattcaggaaggaacttcctgtcctttatttaattaaagcaacttttcttgaaaaacaaaacaaaacctcttttctaactagcatttacatgaagagttgcctacgttaaaagacacagcaacctgtgaagagaaatatttaagctaatgtgttccatcgtgctggtgagcactttcaaaggagtgcatgaaagatatcacagcctcacaaatgcagagaaaagcctcccttggccactgctgatcaggaagtgagactttgtcctccccacagtggtaagagcctctgggaaatttactctgggctgtgtatctatcacttgctctaaatcaacaaatttgtaattgattatgtcacatttcagctatacctagccggctggattatcgtcctcatggccaaaaggagactagacatggaaggcaaattgcagttagatgaatttaaccagctttctctacaccgcatgaagccagcgactgtgagggctctgctacgcggctgagcgggctgtgcaggcattgccaaggtctcctcccttgttgacgttccctgctcgtcttcacgtgatcccatctcagggctctgccgtccacgccctcaccaagctggatcctggaagtcatgcaattccttcttccttacttctgtaaaccaaaaagtgtctgagacagatctcagtcaacttagaggtttattttgctgaggttgaggaaacactcaggaaaaaagaaacacgagttacaataggat

SEQ ID NO: 271172 - DNA, 1305 bp, Homo sapiens
taattcatgttcttgaccatattctcatcaagcagagggaaggggttgagagatagaatctgggaggcttcctggaaattcattcaaccagcattgattccacaagaatgtactgagcccctctgagtgctggccactgatctaggcactggggacacaacagtgaccaaaagagaatccctgtatcccttcttgtggagttcattctagttggagaatagagagatacatgaataaattgattttgcaggataaataggatgagttacaggatagatggaatatctttgttttataaatacacagattgctttgtattgacttcaggtggcttgtagcaagagtataaatgatgactagtaatacatataatctgaagcataaaattgggccaaagaaaaacaagtacacaaatttgcatatgagtaaagcaaattttttttttttttggtgctgatttattaagtagtgtcgttttgaatgaagaagttcaaaagggtattttgtacaattaaaagtgaattgaaaaggagtaagaaaagaaagtggctgattgcaggaggttctagaaaataaaaaagaagcccttagacttggcatgcaggacacttgttgaaagtcttgttaaggaaagtggggaatatttcattgctaattatctttttgagttggctctaagcaggaaagactatgggccaggcactgtggctcacacctgtaatcccagcactttgggaggcctaggtggaaggaccacttgaccccaggagtttgagaacggtctgggcaatatagtgagaccccatctctacgaaaaataaaatattaggccaggcacgatagctcactcctgtaacgcctgcactttgggaggccaaggtgggtggatcacctgaggtcaggagtttgagaccagcctgaccaacatggtaaaacctcatctctactgaaaatacaaacattagccgggcatggtggcatgtgcctgtaatctcagctactcaggaggctgaggtgggagaatcacttgaacccaggaggcggaggttgcagtgagctgaggttgcagtgagctgaggtcgcaccactgcatgccagcctgggcgacagagagagactccatctcaaaaaatgaatgaataaataagtaaataaaataaaaaattaggcgggtgtggtggcgcatgcctgtagttccagctatgcggacggctgaggtgggaagcccataggttgaggctgcagtgaaagccatgatcgcgccactgcactccagcctacgtgacagagtgagaccctgcctta

SEQ ID NO: 271173 - DNA, 294 bp, Homo sapiens
tcaagaaacagtacagcacaaagacctggcattctagctgaagagctgtaataataaacagaaatttgaaaaccaggaagacaagttttccaagagtgcaactgtggcatttcaaaggagatttaacaagaaattccggaagatggccaaaaataggtttagataattgagattctttatttgaatacttgtttttgatggagaaacatacttaagaggaaatgaaggttctgtctaaggtctgaaactttttttcaccctaaagcaggtttgcttctgaagaaaactattagc

SEQ ID NO: 271174 - DNA, 468 bp, Homo sapiens
gaggcttagaagattaatgctgctctgaaaacctagattttggaggtattcaaattaagcatggtatgtaatcttcctgggcttgctttctacaaaaatggactcaaagtaggtaactattttgatcaccattttatctatggaatacgaagtaatttacacaaccagaaaattttgttttgatgggatgtgattacatacaatcatggcttaagactattttgcagctgtgacttaataaatccatgctatactatcaaaatcagagtagcataatcatcgtgcacttaaattcatactaaggagaaatctccactctcacagtgttagagagagaattttggttaaagattagcaaaattactattgcttcatcttaaatacatcttgctcttactgaaagtttcaatttcctgttcccttacattctttatgctgcagtgatggaaggggcttcggtttgcaaca

SEQ ID NO: 271175 - DNA, 353 bp, Homo sapiens
taggagattgttttttggctttgaaatgtaatattttttatagtgaacttattaaaactactactttcttccataatctcctggaatggcccaccggctttctctcttggttcattgcagctatagcaccaggctttcttgacgaaggtcttctctcttgaacggagtctactccttaaaaagttccatgggtcacctttattccactttgccatatcaagcattgtaactgctactcactttagtccccttagccaggacgcgtggggaccacggtcttacattttctcctagtaataaagttagatattactaattatgccagtgcattctgatggatcaaagcatgcagg

SEQ ID NO: 271176 - DNA, 605 bp, Homo sapiens
ttggctgggtataaatactactgataaaaaatacctcatataaaaacaggtagtatcatttctaactaaatttacgcttaattccaacagggcagagaccactgtctatcttgttcactactcacctatgtctaaattcactggccagtacacacttagcactcaataaacactggttgctcaactaattgctgtttctattagaaatcttaatttcaaatgtcttaaacttagtatcccagtgattgataaagatacaccaaagcagtggcttggtacacttacatttgtaaagagaaaattcaaaacagaacaaaatacttcttacatggacatcagttctaaactttctacattccacattgtcatttccatataagaacctatggcaacgtatgaaaaggtcttcaattctgcaagctttttaaaaatgcaactaacttaatgcaaaggcccaggtactctataaaaatacacctaccaactgttctaactccaaatatttcttaaaaaacaaatgtgatagtcaagaactttaaaaatattattaatcacctttgtcatgattctccctcttatatatatacaatagtggcaagttattc

SEQ ID NO: 271177 - DNA, 651 bp, Homo sapiens
  misc_feature (97)..(97): n is a, c, g, or t
  misc_feature (114)..(114): n is a, c, g, or t
  misc_feature (203)..(203): n is a, c, g, or t
tagctgttctagaggatcccggggcttcaacggaacttaactggaagcttctctcactctccagaagagcttcccatgcacctgatgcatgggaaanataatttgatcattttnaagttacagtccaaatcttttgtacctgaataacatgttgcccagtcagtctctcttcctggattcacaagtctttcatggtagatccngctgtaatcccagctacttgggaggctgaggtaggagaaccccttgagcccaggaatatgaggttgcagtgagctgactgtgccattgcattccagcctggacaagagaccctgtctctataacaaaaattctagggaatatcttcagttagagctggtttgtaggagttaaccgttgatctatgtagggacaaggttctaggagaaccaagatgacggagggcagctgggagttgtgtggagaggtaaggctggcaagatgagggtatttggcagtgatctgatgcaggaaggaggcttgcacatgataaagctaagaaagtcttgtggaatgaaagttccgttgaagccgtcgacggcttcaacggaacttttccaaggctgtacagacatggcggcggctttcggaaggcggctaagtccggcagggggacacagagagcgaagc

SEQ ID NO: 271178 - DNA, 610 bp, Homo sapiens
cgtggtgggtcacgactgtaatcccagcactttgggaggctgaggtgggtggatcacaaggtcaggagttcaagaccagcctggccaacatggtgaaaccctgtctctactaaaaatacaaaattagctgggcgtggtggcgcgtgcctgtaattccaactacttcggaggctgaggcaggagaattgcttgaacccaggaggtggaggttgcagtgagccgaggttgcgtcactgcactccagcctgggtaacacagcaagactccatcccaaaaaaacaaaaacaaaaacacacacagtttgttttagttttacccttggtagggaagggacagacaaagacacacagccttttaagataaatgctagcatacagtacaaattttttccaccttattttttttccccgcttaacaatatatccagggtacaatccagggtatagcaggatatagtgatagtcttcattcttttttcaaagctgaatatattacagtttattcaattagtcatctattgctgaacaattcagttgtgtagtctttagctattataattcgttgctggaccttctttctgtatctttagcggtagcaaatctctgctact

SEQ ID NO: 271179 - DNA, 759 bp, Homo sapiens
agggatcatcttccgggagcgtggctaggggcggagcgactgccgcgcgatagtcagggagctgtgcgggtcctggttgcaagagaggaaggattaaaggaatggagggcatcataaacatgaagaaaaatgtgagagagtatgataattgaaagaagagtttgtgttcaaagggagagattaaagatgtgcaacttcagaccttggccaaagtgaaacatttcaccaagattcaggctgtgagaaacatcttgcctacccacctgaccacaaggcagacaaaggcccaacggaagaaacattcttatcataccctactcggcaaaggcccaacggaagaaacattcttatcataccctactcggcaaaggctcaactaaagaaacatctctatcatattctgttgggagaaagtgcaaagaaacaccacgttctggaggaataagagccagaactgcctcatcatgggaacatcttatgaatatcctgccgggcagccagctatatggcccagatctctgccgctcagacccattaagtaccccagcctgtaagcggcggtgagctctgtctggccctaagttagttggccctcaacttccgcaggtgtctgcaatatacctgtgttgctgtttgagctgccccctctctgtgtctttttttaaccctcgtctcccttcaaaacctaacagtaagcactcaattcttacttgttgaactaaatgaatgatagacaatgaccaacacgaccccacgcaa

SEQ ID NO: 271180 - DNA, 418 bp, Homo sapiens
tggctgttatgttaaaaaatacagttttgcgtcctgccttttctcctcagcattacgtaaatattttcctgtgtcattaacattcttcataaacattgtttttgatggctgcgttctattctggtctatggatctactagggctgagttcttagcttgtgagttggacacctggtctcccaggtgggagaaagagccccagctgggaggtggggtctgcccacatggcaggccgtggcactcaccctggcagtcctcccctgtgcattcctggctatgctacatcctgcccagtcctgtggacatccagcattatccattcccctctttgagcttctgcagccctgggcatgaattgaaggctctttcaggaagccttctctagtcacccagcttggtgtggccagtgggtatttgcc

SEQ ID NO: 271181 - DNA, 521 bp, Homo sapiens
tactacccacccagactaatatcattttaaaattacattctatgaaaggtaacataacttgtcgaaaccagtgtaattttacctggagagactcagtggattggctacctgaggccaccatttctttttccatcctgttataacagagcattcagctaattatctttaccttagagctttcaggaagcagaagatttctcagtggatgcagggtactcagttactcctatttagcaaaaacaaaaacaaacaaacaaaccggtagcattgggtgagcacataagccatgtgaaaccagaatgctcagaaaagaaacctgatttgtcaaaatctattgggataaaagactttttagaaaaggaacatccaatgctggccaaggatgtgaagaaagaggcctttccgtacattgctgatggagttacatatggataaaatttttctggagagcaacttggcaaagcacatgaaaggtgctttaaaaactatgcataataccctttaactcagcaatctgtcct

SEQ ID NO: 271182 - DNA, 393 bp, Homo sapiens
gtgaggtggaaacctgcttgcaaggcccccactctttgctgagagctttcttttcacttaataaattccgccctcttcccccttcagggtgtctgtgtgcctaattcttcctggtcatgagacaagaacctggattagctgagctaaggagcaaaaaatcctgcattactagcagagaatagaatcatggttatcaggggcttgcagtgtgagggatgtggaaattaggtcaaaaggtacaaaatttcagttagatgaaagatagcaatatttataggaggatattcttttaagcacagagttcttaaaatcagctgacttccctttagttatgtatacctaacattgaacagttgatttttgaaaattttctgtgaactcaaaagaaaaaaa

SEQ ID NO: 271183 - DNA, 325 bp, Homo sapiens
aaaaaataaaagtgaggtaactgccagttacagtgtatcaggatctgagttcctcgtaggtattgtctgtggattcacttttccatgatgtttctaaccctatatgttagctaattgaaatatgtgagaggtgttgaacaactttagagcaggtaaagaaatattttcagacttttctagaatgatctgcaaaatgcaatacttgccattggaagcattcttcatggctaaaatgcagatgtaaattcatgaatggtggcagtgcatgctttctttatattaataaggttgttataatttaggacagaaaagtaaaaactgggtc

SEQ ID NO: 271184 - DNA, 242 bp, Homo sapiens
ccagtaatacattgccctaaacagagtgctatgaagcatacaagagaggtagacagactggattggtttggtatttttaattatatgtcataaaatcggttgcatactgttgaattttcttgccctacctagattttccccagctttgttatacctttcttgaagtaatagttgtccctcagtacctgtaaggggattggttctaggactcccctcaagtaccaaaatccgtggatgcttaa

SEQ ID NO: 271185 - DNA, 414 bp, Homo sapiens
tgcctgaagatcagctggtatggctggctgagatggagctacctgttgcaagaatatactcctaagttaggttgcagtttgattactgagtttttggtacctcttagattttgtacctgggacaggttcctcacctcactcaccctggccctgttcctgagacaaggaatagctccttttaagatgctgattatcatgcttctgccttgctgggcacacccacactggttgtaatactcaccatctcttcccattttcacatctggactcttcttctcatgcccctcaacccttaatccctccctttctttgtactcttgcttctcttctgtccaatctttgtgtccatctcccaaggccatctcccatggtatattccccacctccccacgccagccctatgcagtctcgcca

SEQ ID NO: 271186 - DNA, 462 bp, Homo sapiens
gtcagcttttggtccagtgactcactcacagaaactccaagacagattaaactagcaagagttgaatatctgaatttccaaaattatgaggctacaaaaagaagcatagattaaagttaggaccaaatgctgctcagaaattgttttaatctcaaaagtagttggcaagttttcagagttcattttcaaggcctggtgtatgtgaaacaactgaacattcagagctatttcattttcaaagattctcacatccaacagagagaagaaggtcatacgaagacacgcagaatttggacttatgcggtcacaagtcaaggagtgcttggagctaccgggagatggaagagtcaaggcaggattttccctggaagatttggaaggaacatatttctcctgaaaccttgattctagccttcactaatgacagagaataaatttctgttcttttaagccaaaaaaaaa

SEQ ID NO: 271187 - DNA, 728 bp, Homo sapiens
  misc_feature (41)..(41): n is a, c, g, or t
  misc_feature (51)..(51): n is a, c, g, or t
gggctgcctggagtcgggtacggtgggcggggagcaaacanggcaggaggnaaggagccactccaagtggctgagggtccccgatggccgcgctgtccaggtggtactctggctggcttccccgcctcctccacagctgcagaggggccgctctgccaggaccccctgcctggctgggacaggcccctcttcccaaggaacagaatgactatttaggtgagaggggcccactggcgctgctggggtggggaatgtgatgttggcgatctgcggtatcttcagggtgacagccatacccaacgcgtgggacctggcttccacatctatagacctgacctaaggaaatatgtgggcgtgtgcataaggatgccatctcaggactgcgtattaataaaaagctgaatcaaacagtgtccaacaagggtggctgttccagctggttatggaatgtgtttaccatggacttccaggtcctcctgagaaatgacgacctagatgtgggaagatggtctcaacgtattgttctgcaaaggagaaaaaaagcaggttgcaaaacactgggaactgtctgcccatcttcgaaaagtaagtcatatatctagaaaaatctggaagggtagtcacaaaaacatcatcagtaggtactgtggagagggtggatttcacgttattgttactttccccttttatattaatttttgtgcaataaacatgtgtatttgtaatca

SEQ ID NO: 271188 - DNA, 338 bp, Homo sapiens
gaagtaaaataaatagctagacgacctcggcgccaccacctcgccctggtggttaaaatatcaataatattaacccctgaccaaaactattggtgttatctgtaaattccagacattgtatgagaaagcactgtaaaaactttttgttctgttagctgatgtatgtagcccccagtcacgttcctcatgcttacttgatctattgtgactttttcacgtagaacccttagagttgtcagcccttaaaagggctaggaatttctttttcagggagctcggctcttaagacatgagtctgcctatgctcccggtggaataaaaaaacctcttccttcttt

SEQ ID NO: 271189 - DNA, 400 bp, Homo sapiens
gtctttcatatactcatcatgtttgttttgtacttgctctttgtctcaaactttgtcaagggatatgaatatgagtaagatgcagctcttcacttcccagagctcagctattaagttcttcttcacaccggtaatcccagcactttcagaggccagggcaggcggatcacgaggtcaggagttcaagactagcctggccaacatggtgaaaccccatctctactaaaaatacaaaaattagccaggcatggtggcgcgtacctgtagtcccagctactcgggaggctgaggcagaagaattgcttgaacctggggggcagaggttgcagtgagctgagatcactccatggcactccagcctgggcaacagagcaagactctatctcaaaaaaaaaaaaat

SEQ ID NO: 271190 - DNA, 661 bp, Homo sapiens
tcgcagttgtaggagcagcaacaacagcagcagcaacagcagcagaagcatgaggatggagactcaaatggtacttgcttcgtttaccatgctatctatctagaagaactaacagctgttgaattgacagaaaaaattgctcagcttttcagcatttccccttgccagatcagccagatttacaagcagggccaacaggaattcatgtgctcatcagtgatgagatgatacagaactttcaggaagaagcatgttttattctggacacaatgaaagcagaaaccaatgatagctatcatatcatactgaagtaggagtgcggcgtttcgtgcccagtggctgctccttccttcacctctgaaaacggccctcttgaagggggatatgaatggagatttgaaggtctgcaagaacctgactcgtctgactgtgtgtggaggagtccaggccatggaggcagaatcctggccctctgtgttggcccaagctcttgtggtacacacagattactgcccaatatgcagttctgcagctgttttagttaaatttctggaccttgttgttgttaaatatcagtagaaactctacataatttagagtgtatgtagggcataatgatgatgggaattgtgtgatgtttaacaggaagatcttaaatttt

SEQ ID NO: 271191 - DNA, 911 bp, Homo sapiens
ctgacttatttcacttaacatagtgttctgcacttccatccgtgttgttacaacatgacaggattttttttcttttttttttagtagctgaacagtattccatttcgaatatgtactgttttctttatccattcatcagttgatagatgcttaggttggttctgtgctttggctgttgtatagagtgctgcaggaaacatgggtgcaggtatctcatcaacatactgatttcagttgctttgggtctataactacaagtgagattgctgggtcatatggtagctctatttttaggcttttgaggaacctccatactgttttctataatggctgtgccaatttacatgcccaccaacagtgtacaagggttcccctttctccacatcctcaccagcacttatctcttgtctttttagacgatagtcatcctaggacatggtgaggtgatttcacaccgtgggtttgatttgcttctccctggtgattagtgtcggacaccttgcgtatgcctgctgaccatttgtgtactgtctttagagaaatgtctattcgtgtcctttgcccatgttttaattgggttatttgttttttgctgtcgagttgtgtgagttccttacatattttggatgttagccccttattagatgcatggtttgcaaatattttctcccagtccatagactgccttttcatttacttcattggtcactttgctgttcagctaagctttgctatgtgaggtagtcccacttgtttatttttgcttttcttgcctgagccttggggggtcacactccaaaattgagctatagagagaaacaattttggagctgcctccaggaatagaagactgagataatttggactcactttctggttgaagacaaatagaaaagctagcaaaacatttt

SEQ ID NO: 271192 - DNA, 138 bp, Homo sapiens
aaagactcagatcaaggcagcatctctctgagcaaggaatgaggatccttctatagaaaagctgggacctggctagtgtgtctactgaactgctctttcaaagttctgcactccctccacacggggcttgagtttcca

SEQ ID NO: 271193 - DNA, 346 bp, Homo sapiens
gggctaggagttcaagaacagacatgcaaagggcttaatgccagggataaaatacttccctgtgccatggtagtccacccctctctttcccaaacccctaaccgtgtatgccattgcaggttcctaaatatgtaagtgcgtagagaaacttatggcagaaactgatagcacggtaacttacagaagaaggtggggttgagtgggaatatgtaagatttttactttttactttctacttgtttattttaaaaacattttgcaggccaggtgcagtggctcatgcctataatcccagaactctgggaagcagaggcaagaggatcgcttgagactaggagttcaagac

SEQ ID NO: 271194 - DNA, 286 bp, Homo sapiens
acagtctatggtggtatttttgtccatccaaagtgaaatgagaaaaataaagatcgtgtatattgtctttaattacaaagtaaacataatgtttgtgtaatgttataaggcttcctgctgccctttatcaaagagccccccctttatttggagtatggaaacacatacttggtttcccttagcactgctagattgccctccaaaaatgtctttttgtaactgaccctcttactggcaaggcatgagggttccatgtttgcccacacccttgcctccatctggatta

SEQ ID NO: 271195 - DNA, 289 bp, Homo sapiens
ccatccaccctattccccattccccaccacggtctatctggagccccttgagtcaagaccccggttcccagaagtcacaggagcagaaagaagaagggactaaggagccagctcatggctgtgggcccagcattaggggctgcaggaaggagaacagcttgatccagccaccataccagcctctgtcctcctcaccacaatactagactgacacctggaccagctcttcctgaacctccagaatggagaaaataaagttcctaccaaatggtggaggcagtgacacagt

SEQ ID NO: 271196 - DNA, 488 bp, Homo sapiens
gcaggcgctcaggcacaccccgacatccaaagcagactcctgggcgcgtccggaaatcccgtcggaaaaggcgcggttgccatggcgccggagatgctccccaagcatcctcataccccgcgggacaggaggcctcaggcggacacctccctccatggcaatctggcaggagcgccccttcctctgctggccggtgcttccacccatttcccctccaagaggttaataaaggtttgctcctcagcacccccccgcccaacccggcgtttccatacggtttgttcacaggccctttctaggccggtggtgaatgctcacttacattgaccgctgcgagggaattgttcggcgagtgctgcccatcttcaaatcaatgcctgctcagaacaacagaaagggcctcagatgtactggtttccacagaaccattgttaggcttttgtgaagcatttttgaacctaataaataatgtcaaaagtcaaaaaaaa

SEQ ID NO: 271197 - DNA, 393 bp, Homo sapiens
ttaacatcacagctgcctgaggtagagcaaataagagactggcaaaaaaaaattgaaagtcttgagagtgcagtggtgataaggggctttaaaaagctttgacatttggctgggcacgtttctcacgcctgtaatcccagcactttggcaggccaaggcaggtgaatcacgaggtcaggagttcaagaccagcctggccaacatgatgaaatcccatctctactaaaaataaaaaataaataaactggcaaggcatagtggcgggtgcctgtaatcccagctactcaggaggctgagacaggagaatcacttgaacccaggaggcggaggttgcagtgagccaagatcacgccactgcactccagcccaggtgacagagtgagactccatctc

SEQ ID NO: 271198 - DNA, 339 bp, Homo sapiens
ttatgtgccctgctcccctctgcctgccccttctccctgtccccaggtctcccctgtggtgggggatgcaggtcccgttttcctatggggcactggctttggagaccacccctgccccgacccctgttctctgattctatctaagtgcttaatctctccccccgacccctatcctctgattctatctaagtgcctaatctttcccagcggcagccctgggagacatctcctctctcgctatggggctgctgggatctgtcttcccaacctgacacttcacaagtctgtcccctctactttatcctccccctaagtaaaactccttaaaaccgcgttcct

SEQ ID NO: 271199 - DNA, 528 bp, Homo sapiens
aacagcaggtcatcagcaccactgtgagctgacctgagtcaaaactgattatcacctagcctggtggatcacagtggcgtttggggtccccaaaatgagtcaattctggaccaaagtctagtatccttgagaagcctgggtacattttctctgttgcatagttaccctgctaagtgactgtagatccctttggggaaagctaagaggaaagtttacagtgtatctttttggcagtataataggatatttccccaaggaaaattggcctgggaagtggatggctctatttgatgaacaaggccaggcctctattcaccagtcctgcactggtgaatagacctttggcaagactccattggaagaaaaaaagcatgcttaaaaatcagtaagctttggccacgtgcagtggctcacgcctgtaatcccagtactttgggaggccgagttgggaggatcatctgagccaaggaattcaagaccagcctggccagcatgggaagaccccatctcattaaggaaaaaaaaaaa

SEQ ID NO: 271200 - DNA, 227 bp, Homo sapiens
caaagggagaaacccagagctgaggccggtctgcagcaggtgccgggcctgagacctttatgttgtctgagggaaacacctccatcccctgtcaggctcagagtgtccttttttgttctgggaaccatttctgtgtcatttgtgtggaggctgaagttgcccggggtcgtcctgcaaggcgtctcccagagcgaagtccctccgacgtgccccctggtgatgatgtt

SEQ ID NO: 271201 - DNA, 379 bp, Homo sapiens
actgctgtcctatccccatgtccaccccttctcctcctggacctcacggccgcgttggatgtgggtgaccactccttctttcttgaaaccctctgacctctgagatttggtcccctctcaggccaagacttcttactcttcacagaccggcttcttcctgctgcccctgaaaccatgatgttacccagggttccagcctcagctctccttctgctcatggccttccctctcctgggtgatgccaagcacccccagggctttgacacccagctgtctggggattcttccccctctcctccacactgtccctccagcctggactccaatcaatggcagcctgccagacacctccgtctgggtattccacaccacgttcaaa

SEQ ID NO: 271202 - DNA, 710 bp, Homo sapiens
agagagcctggaaaagtatgtgtctagccaaagcaaatgggattctgtgactggcttccatcaaggcagggcaggttgcctcctggacaaatcagagctctgggagaaagcgggaggggaaggtctacaaccagtcatgcccgctgcaactcatggagccacatggagaggagacaacacggtgaaattgtcaagagcaggagctagggctgaatctggaaggccacttaccagtgcagagctttgggtgtgttgcttaacctccatgtactcatctgtaaaatagagctaaaaacaatgtttctcttcctggactgctgtgacggtctagaagagtttatgcacagaaagtgcatttacatgtaaatgctccgtaaatgctgacttcttgtttgccttaatggcagaacccatccttccatattccagaaaaagacttgatttttagttacgtgaatggacacctaaccctgatggacagcttggggtcgggggacaagcttctttcttggaaggatgttcaaaggaccatgaagcttttggttttgccaactggggtttgtaagttgaagaacagagctgagtaattcaggacaggggtgtccaatcttttgtcttccctgggccacattggaagaattgtcttggaccacacataaaatacacttatagtaacaatagctgatgagcttaaaaaaaaaatcacacac

SEQ ID NO: 271203 - DNA, 366 bp, Homo sapiens
actgactaggatctccagcaatgtggaattaacatgatgacagcaaacattcttgtcttattcctaacttaaagggtgaactttcagtgtgttagaattatgtgagcttacagtagatttttaaaatgtatatcccttttctatgaaggaattttgctatttctttttgctaagagtttttttttttaccttggtaaaattcaacatttaccaacctaaatgttgaatttatttatttatatctatttattaaattaatgtaatttaactatttttggcagagagtctcactctgttgcccattgtagtgagccaagattgcaccaatgcactccagccttggtgacagagggagactccattatc

SEQ ID NO: 271204 - DNA, 449 bp, Homo sapiens
atttttagtagagacggggtttcaccttgttggccaggatggtctcaatctcctgacctcgtgatccacctgcctcagcctcccaaagtacaggtaagagccaccgtgcccagccaatagatataaatttttaaaggaggtatgagagatcttcaacccttcacctccccatctcctcctataactgagtagaagagaaagctcaaggcaggtgggggatctgttgaaggactcggtataataccctggaatggggcctgactctcctcactaccaggccagggcctatatgattttagtttttctgttttctttttttaaaaaacttaaataggtgtatgtgaaaaagcagcaagttcctgctctactccatctgcccaagtccttccagggccaccagtgtcttttcattgttttgggatgttttttgtttgtgtttttgtttgttt

SEQ ID NO: 271205 - DNA, 576 bp, Homo sapiens
tgcagaaattcaactcagtgccgcaataacaggatgcacctgtagatttcgtagaattagcagcagcattctttcaataccagtttgagagaaataaccctgtttgcatagtgccaactggggcagaatctgaagtgtcttgcctgcctctcggccatgggaggcaccgatctcagcaacatctatccaaccgccatccacttaacaagcaaagatggaaggccctcgtgctccaggctatcctgcaatggttcatttgcttttgatgggattatcactttgacagatgtgcttgcaattaactgggggctttctgcttccaatccaaattcccacaggtggatcactggctcttggggagcaaaaacccttctttgtttgtttttgcttctcccagagcctgggcagagctccccattcctggatcctacgttgatatgcactgaattgaattatactaaagggtgcacccaagagtgcatgagcgaagtaaaatgtaatttgtgggacctcatgtggacatttcaggtccgtgtgtacaagataaaggagagaaaatcctgggggacaccacag

SEQ ID NO: 271206 - DNA, 282 bp, Homo sapiens
aaaaaataggaagaatgtagactactctgctctcagatcaaattaatattcctttttttgcagtttaattaggcataaataaaaagccacgtgaagcctggagatactggacatagcagatttgtcaagccatttttcccaccaccagtgcctgagcacgacctcatttgtcttggtcaatgaagctcaaggaagcattgcactttggcttccgctttaagttttgtatgttgatatgtatcccatgtcttctaacaataaagtgctatttcactgacatta

SEQ ID NO: 271207 - DNA, 347 bp, Homo sapiens
gatatacaggaaggagagcaggataaagactgcccgctcaagaatcatccacttttggccacgttggcttcagctctgctgctccctgccctgtgtactttgaagcgaactggggctggttttataagaaaagggagaagaggtgccctggaagttaagtgggtcccagggggtagctgcacccagaatgggggtgggggtcctggttctgtggatggagtaggaggaggtctggctgaaggagccaggccccatttcctaccccaactccacctttctttgtcttctccctccccccttccccccctcactcgcaataaaaacataattatggtgctttatagaaa

SEQ ID NO: 271208 - DNA, 474 bp, Homo sapiens
ttttccccatgttacacatatttattccttctctatattctacatagcatttatcaccttctaatattctatataatttattttttgtttgttttggcgcctccccacacacataccagaatgtgaaccccataaggatagggagtttcatttgtgttgttcaccactgtatctgtagcacctagaaaagtgcctggcacatagtaggagctcaattaatatgcacaggatctatgtacattatatagaggaactcagttaatactgaaagcatggacaaatatgtagaaagtatcttttaaaaaatgtcatcccacattatttaaatacaagtaatgtttaaatcataacatctaaaagatcataataaaaatcactaatacgtcatttgtatttttgacccaagattgcccaaagggaaatatttttaaaaagaaagagagaatatgcaatgtgtatgatgaatgaataaac

SEQ ID NO: 271209 - DNA, 375 bp, Homo sapiens
ctctgccacctctattttgaatgttctcagttccctccaggctactagaagcatctgggccagggctcatggctagataagcacccgagatcccaaacaagcttcccatcctcgttttactttttgttaaacttatgaaaatttattaagatatgacttacatccctggtaagtgcacagctcaaaagacattcagagatggaacacaccagcccccagatcacaaagccaaccatgcccagcccttcccagcacccccagccctgaaacctgacttctgacgacaccatgagcctgcctttatactttacactcatggaaggataaccatcttcatgttgtaaaataaatgtttactgttgaaatgattttaca

SEQ ID NO: 271210 - DNA, 544 bp, Homo sapiens
ccactatggacattaaattggtccagcaccatttatgagaaaaaccatccttttctcagtgaacttcagtgaggcctttgttgactgtgggtgaatctgtttctggattctattctgttcggtgatattatttgagtttcaccactgacccacagtgcaatcacagacgaaaatttacctttcttataggaatgaatagctacataggatatttgtacaaaaacacttatttgttgagaaactatttctgggcactttataggcatgataacatttcacactcactataaccctgttggggtaggtcccattctacagacaaagctaaaacttagagagatagagtgcaatgctcggaaattaaggggtggcagaacttgagtgtgggtctgcctggccacaggactgatgcccttgccactgtgccattcttcctcaacataggattaccgggaaaactactgttcagtgattattcctataaactcttacatttctgtacagaagtgaattttgttttcttacaaattaggtgtttccatta

SEQ ID NO: 271211 - DNA, 409 bp, Homo sapiens
gtgaaacccggtctgtactaaaaatacaaaaattagctgggtgtggtggcgcacacctgtaatcccagctacttgggaggctgaggcaggggaatcgcttgaacctggtaggtggaggctgcagtgagcctagattgtgccattgcactccagcctgggcgacacagcaagactgtctcaaaaaataataaatagaaataaagggcttagtaaacacccaaaatataaactactttaaaaaggtgatcttgccgggcgcggtggctcacgcctgtaatcccagcactttgggaggccgaggtgggcagatcacgaggtcagaagatggagaccatcctggctaacacggtgaaaccccatctctactaaaaatacaaaaaaattagccgggcgtggtggctgggcgcct

SEQ ID NO: 271212 - DNA, 495 bp, Homo sapiens
cacgaggaggaggcccagcccacctctgcctgcacctgcggtcagcggggtgcagagtctgtgaaggcacctcccggagtgggggctgcaaagatcatggccactgtgccacccacaggggcccaggccggacgcctgggctgtgccgcctcggcagccaggccgaggaacgtgcaggtgcggccgggagcccgccggccacagctgcatccatgcccttctccgagtggtgatggcggggagaggcctggctgtctacgggcagattgcttgggctttcacagaagcccgctgttagagcagattcccggccttgggtctctctgctccagctggacgccctgagcctcgccgggcccagtccacccccgtccactctgccaggggcagctcagagccctcgccacgcggggctgagcgcagggaaggcagcatcacggagttcgctcggctccacagaacacccgtgttgctcgcggagactttttgtttttg

SEQ ID NO: 271213 - DNA, 648 bp, Homo sapiens
tccctaggtaactcaggtcttccttctggaggacctagaagtggtcttaatgccattaacctggtgtctgatatgccagaagttaagtgtgggctcctgagtgtccctcacgcctcccatttcccacatccctggctgcacttgcttgttctgattgcttcatttgtttactgacaagcactccagtacgttcatctctcattctttcactcagtgtcacgaactgaaagtttgtgtttccccaaaattcatatgctaaaatcttagcccctaatgtcatggtgttagtaagtggggcctttgggaggtagttaggtcataagagtggagccctcatgaatggaattaatgtccttacaaaaagacacaagaggccaggtgtggtggctcacactgaggcagggagatcttttgaggccagcactctaggaccagcctgggcaacatagaaagaccccatctctacaaaattgtttttaaaaaattagcagggcatagtggcatactcctgtagccagccactctagaggctgaagcgggaggatcacttaatcccaagagttggaggttactgtgagctatgtgggccactgcactccagcttcggcaacagagcaagaccctgtctcttaaaaaaaaaaaaaaaaa

SEQ ID NO: 271214 - DNA, 460 bp, Homo sapiens
tgagatggagtttcactcgagatggagcgcccttgtcgcacatgctggaatgcaatggcacagtctcggctcactgcaacctccacctcccagattcaagcagttcttccacctcagcctcccgagtagctgggattacaggcgcccgccaccatgcccagctaatttttgtagtcttagcagagatggggtttcaccatgctggccaggctggtctcgaactcctgtcctcaggtgatcctcccaccttggcctcccaaagtgctgggatcacaggcacgagccaccacgcccggcccccgctgccatcttttctttccaatcagaatcttccaatttacactacgccacattcccacacatgctttcccttcaaccttctttttttttttgagatggagtctcgctcttgtcgctcaggctggagtgcagtggtgcgatcttggctcactgcaagctc

SEQ ID NO: 271215 - DNA, 433 bp, Homo sapiens
atctctctctttaatggcagatagtcagataatagaacaataaatgttagtaatgttatattataattaaattatctgtgtcataaggcattcagcacattcaaaagataactcacctagcatgtttttaataagccttggatggcagaggccccttaccctttgccggtcacccatctgctcctgatctgagtcaaggtgaagcttggtttgtgtttccagaccacctccagccacagtagagacaacagagatttctaaccccctagcaaaagaccctacatagtgcatttggaaggttaggaggaagaaaagtagttaagaagtctgaagttagggaccctggccctgaggcctgtgggacttggatgaaggacacactctaagcaagaacatgagacttgtgtgcatgtggaagtgggtccattccagg

SEQ ID NO: 271216 - DNA, 119 bp, Homo sapiens
ttccacctccttaacactaaggtgaccttaaacctgaattattgacgtcagatgacatgttgccacttccacatggattgggaaattttcttctcagggccactgacctgcccctcttc

SEQ ID NO: 271217 - DNA, 233 bp, Homo sapiens
aagccctagatcagatacttctgtccaagtatcccagatcagatacttctctccatatattctcttacagcagctgatggagccttttggtggcatctaagctggttgcaatgtggttactctaacaatgcatacactttctgcaaattagagcttctttgttattttgtaatatttgaaataaaaagtgaaattgattccaaactgattcaacattaaatacgccaatgaaa

SEQ ID NO: 271218 - DNA, 497 bp, Homo sapiens
acacatgacatactcttagatgggaataactggtattaatcatccttcctctgtcaaactaacacctaaattactataaaattactatactatatcatgccacactatactatactgtatttactgtaaaaactgcagaggaaaatgaacttggtggttaaattaatcacagcatttgtctagattctgcaagaatgaattcatgaggatggatttaaaagctttttcaaggccgggcgcagtcgtcacgcctgtaatctctgcctcccaaagtgtcgagattatagctgtgcaccgctgcacccagcctaggggacagttttataatcagtcttcttggccttcagaggactctgctggtggctatacccagctagtggcttgttctctctttccacttttattgccctgaaattctaaatattccatcattttggtagaagaaaaccagaccaaactaaacattctcatgatttcatccaccttttaaaaaaaaa

SEQ ID NO: 271219 - DNA, 468 bp, Homo sapiens
tagacgttcaactttgtaacttcaccttagtctctgagggccacagcttcatttacatgagaacttgaagatttttagtgttatgcctactctgccaattcttggaacatttgcggaactgagaatttacttcttcgtttattacttcctaactacattttaaagactcatttgttctagattcagatcattcaacaaaacatggcatgatttccacagtctctgacattctgattgcattgcttgagaaaattctcagtctgggaatctccttaaaatgcagcacagatgatggctgaataggaacagctccggtctgcagctcccagcgagatcaacgcagaaggcgggtgatttctgcatttccaactgagggtgtaacactgtgaccaacgaagagagtgttttctatcagtgactcgcagacttccctttcactggaatccagcttattagctgcatggttaa

SEQ ID NO: 271220 - DNA, 481 bp, Homo sapiens
tgttagtggactttaagcatgaatatcaaacagcagctaaccactttgtgcaaaaactgactttctattttgaaagccacttgagggagctctacctcattgtttaattatgttagctatctcctcctcttcctcaaggaagacttcaaaatgaactgtgactgacttcgtttctgtttcactgccaccagaaccttccctgcacggtaacatttttccattttgaagaaaacaggctcttctcaactttggtcattaaccattgtaaaaatacttttgcttcattcatgctttctgggatttttatatctgtgggttaagctcactccagttgggttatttagagtatgcagtgttttataatctttttctttcagctccaaaagatgtgctccttcctcataaaccataccctgaggtctctcagagcgaacctggtaaattaattatttcatccttctggctaagaagtatatttttc

SEQ ID NO: 271221 - DNA, 252 bp, Homo sapiens
attcactgaacgtttgtgccctctaaaatttatatgttgaaatcctaacccccagtatgatgacattaggtggtgaggccttgggatgtgagtagctcataagtgtggagtcttcatgaatgagattagtgtccttataaaacagaccccagagcctgtaatcccagcactttgggagaccgaggtgggcggatcatgagttcaggagatcgagaccatcctggctaacacaatgaaaccccatctctacta

SEQ ID NO: 271222 - DNA, 377 bp, Homo sapiens
atcgaggctgacggaatcctggacatgggctggcatcacgggccatcttctacttgagatatttttcagataacacaagtatggaaaaaggaaaaagcaactgtattgaaatctcctaaatgcagcagatttggagcctgcaaacacttcttttagggaggaggcagtattgctcttaacctagaaggcatcctcaatggtctttgagacgtttggaaacgtgtgcacaagtgaaattattttacctacttctcttgaacgcatgatgtctcatatccaattttatttctaaacatttcttttaaaaaatagttatttctgtgcacttctgattctgttactagtaagaacagtaaaacctgattggctataaaaaa

SEQ ID NO: 271223 - DNA, 342 bp, Homo sapiens
agcactgtcccttttcgttggactcacaagaaatgtgttggacctgagccttttggactcaggagggaaacttgagtccatacctaaggtgtaaacaactgttacactccatttcaagaaattttataggaattattttatagtagcaggatactctgagaataatcccaatatttataaaaacttaatggctaaaaagtagactcaaacttccattttaaaggtttaaaattttttcctaaaacttaaaagtaggcagtgaaatttggttgtatctttggagaactctttcaccacataaagtattattttaaaactccccgtaaggggccttcatcgcct

SEQ ID NO: 271224 - DNA, 467 bp, Homo sapiens
taaatcatgctcctgttttcatatattatgagcaaagtgctgttatctgagagtatcagctgactcagaccattcagttcagggattcctctaggctcctgagtaggggcttagatagggcaaattctgatggtcttacaagggaaccccagtccttcatgtcataagagcatctctgcctatagcttcatctgatctcaacacagagaactaataaggtagggacatggcatgatttggacttcaggaatattactttcctagttggaaggatggataataggagcaatattacagtctagaaaacatgttacaaagatattgcaattgaccaggctagagagaaagaggaactgaacaggagaaatgacggagaagagatatacatttgagtaatagtaggaggtaaagtcagtatcccttggtcattcactaaccatagtgggggaaggagcagaaaactcttg

SEQ ID NO: 271225 - DNA, 432 bp, Homo sapiens
taaatcatgctcctgttttcatatattatgagcaaagtgctgttatctgagagtatcagctgactcagaccattcagttcagggattcctctaggctcctgagtaggggcttagatagggcaaattctgatggtcttacaagggaaccccagtccttcatgtcataagagcatctctgcctatagcttcatctgatctcaacacagagaactaataaggtagggacatggcatgatttggacttcaggaatattactttcctagttggaaggatggataataggagcaatattacagtctagaaaacatgttacaaagatattgcaattgaccaggctagagagaaagaggaactgaacaggagaaatgacggagaagaggtcgacgcggccgcgaatttagtagtagtagctagtagtagtaggcggccgc

SEQ ID NO: 271226 - DNA, 698 bp, Homo sapiens
atgactgtttgtcattgggccctgacctcccttgtcatcctgatctctagctagccttcagattccccctcccatgacacactcccaatatgttccacacactgatcccctgatgtgtcatggtgattcctggctgtgcctttgcctgatgaagtctaactcattaatcaagactgggttcagatgtcagctcccttgagaatatgtctttacctgcccctccttctcacacacacatactccttcaatctcccaggaagaaagcatctcttactcctcttgacgaccacccaaccttagcagtatgtttatatgagcatgtcacttggcatgagttctttttccaatttgactaagagctcttttagtgtggggagggttggtgttgtccttattgtagttactgccagggctcagcctcagagcatcagacagaactctgagataggtgctgtaaattttagaggtatgtgctctaaaagttagctgaatgaatgagagaaaaccagaaagaggtcttatgaagcctcaggtgataggaaccagctattggattcttttaaatgacctgcccctcttggattcttaagtgtattattatttcattcataaacccgttttgagccccatttttgtccattgtaagtgctatcataaatacaaagatgaataaaacttagttttcactgcctcaaaaa

SEQ ID NO: 271227 - DNA, 405 bp, Homo sapiens
aaattatttatctcctctttatactccataggatttagtataacttaaatgcaattttatttttatattcaccaatatgtaacttcatcaagtttccatgacaaagtaatttcttaatgggaatgaaaatactgtcacctgtagtcacaactcaataaagcaataaacagcagtaggattctgaaaaactttttttatattgacacatttcattttctccctttattctaacatttatgtggcagggattttagaggcaggacacacacacacacacacacatatacacactggaccaattaccatcaattcaaggtctttactttgtactggaatatagttttgtttttgccataaagatttttttccaacagaaataactcaggaagaataaaaaagaaagtt

SEQ ID NO: 271228 - DNA, 101 bp, Homo sapiens
tcaaagtgataagcataaggaattaaaactttttcaacagcaactttaagtggcatacatctttggaaaaaaattaacagacaattctggcaaatcatgaa

SEQ ID NO: 271229 - DNA, 322 bp, Homo sapiens
taggaagtggccgagctgtctgcctgcacacggggctcccacccagaactggccacagggacagggacactcagggagccccccaagagctggccccagggacactcacggccacgcctgcggccccccataccatggcccttcatggcgtctacttcctcctgagcatttcagctgactccactctgtcctcacccccctttttgtgtctcacggtccttgcttaagtccaagtcacgccctctcactgtctcttacacacatctctatcgctacatgtgaggtctcttaactactttctggaatacagaacataaataaa

SEQ ID NO: 271230 - DNA, 387 bp, Homo sapiens
tattagattgtattgacttaaaggttgagtacatgtgaaagaccatagcctttggaacagccgcagaataatactcagctttaatttcatatgggataaacgtattcaattcagaatactataaatatgtaagcagaaaactgaattgtgagtaagttattaggtaacactaaacatacataaaaattccatcattattgggggtcagtttctcaccttttgtttgacattccttagactttaacaccatgtctaatgatttctacttttccttgggtttgctggtatgattgtctttactaagatttttattatactgattttaaaatgaatttccatgactttgttgaattttattgtacagctatttaatcagtctatcctgag

SEQ ID NO: 271231 - DNA, 435 bp, Homo sapiens
cagttcaagaacatcagacacgctcaacaaacacttgttgcttgactgatacattatggcgggtaacgcgtcccacgtatttcttcttagagatatacattacgctatacgtttctgaagaatggctcgatttacaggggttcccacaacgatttgtcacatataaaagagtgggtggtatttttacgtcaaagatgaacaggcgaacgtccatctaaatcgtgtggtatcagatgcggggaggcgtgggggagggagcgggggagaaagcgttaattcttccagctttagagccagacgtaatatttaaaacgtggattgtttttcaaattaacttttaaatggacacgacagcaccttatcctgcattaatattgcattgcaactagaaagaaaaccagtggaggtacgcctatctcctctctagttggcaaa

SEQ ID NO: 271232 - DNA, 402 bp, Homo sapiens
ctgacctaagattctagacctatgacccagaacaggctgattctatagcgacaaacaaatttagccccaaagcccttggttctgagcactgcagatggtaaaccgggggaaaactttgtccctacaaagtgccacaagtggagtgtcctctggaaatctcatagcaacgaccattttctccactcctcggcacataatcttctactgactcacaagagcaagacccttgggcataggtccttatttgctagctgagctatcgttgcagaaggctgaagaggagagaaacagtaattcagtgtcatgactctttgctcctctttgttttctctagaattagtaaactatgaagagattaagaagaaagcagctgggccaagaataaggcctccaaagctcttt

SEQ ID NO: 271233 - DNA, 358 bp, Homo sapiens
caatcctcccacctcggcctcccaaagtgctaggattacaagcacgagccaacacgcctggctcagatgtctgttgaattgggcatttgcagtgccatgtctgtactaataattgctaccgtgtattcattgctcgctgcaggcctctcggaagcacgtgacatgttatgttgtttaattctcacaataaatctaggtggtatttccccccatttacaggtacagaaacctcagagagcttaagtaactttcccacggtcactcactgttgttgttaagtgaaagaggtgacagtgaactcaggttcagtcacttcagagttgttccttttttttttttttcctgagacagtcttgct

SEQ ID NO: 271234 - DNA, 346 bp, Homo sapiens
tctctagcctgggtcacagagactgactctctctgggggggaaagaaaaaattagaaaacaactgtcatgctgggcgcagtggctcacgcctgtaatcccagcactttgggaggccaaggtgggtggatcacctgaggttgggatttgagaccagcctgaccaacatggagaaaccccatctctacaaaaaatacaaaattagccaggcatggtggcgcatgcctataatcccaggtacttggaggctaaggcaggagaatcacttgaagctgggaggtggaggttgcagtgagccgagatcgtgtcattgcactgcagcctgggcaacaagagcgaaactgtctc

SEQ ID NO: 271235 - DNA, 471 bp, Homo sapiens
gatcattattatatttctaaaaactgcttagtgatctaaaacatctagaagccgtgatatttaaacagatctggtacaaaacaggaagccagtggcctggtgaattctcacacttggagaccagaagtgaaaatgttctgcctgcccagagtagcagcaggccagcaaaacaacaggtgtggccgggcacggtcgtcacgcctgtaatcctagcactttgggaagccaaggcgggtggatcacttgaggtcaggagttcaagatcagcctggccaacatagtgaaaacccatctctgctaaaactacaaaaattagccgagcgtggtggctcgtgcctataatcctagctactagggaggctgaggcaagggaattgcttgaatctgggaggcagatgttgcagagagctgagattgtgccactggactccagcctggagacagagcaagactgtcaaaagaaaaaaaaaa

SEQ ID NO: 271236 - DNA, 431 bp, Homo sapiens
atctttagcatttctgatcttgatttatttatttgtttcttgaattcttggcctcccaaagtgctgggattacaggtgtgagccatcacacccggccacaaactagtttatttctgatattgctggggcaatccagtcattttgtgaagtctgtgatgcttaaaatagaattgctgacagctggggtgggtctgagttcatcaccactacaactgagctgttgcagctgtatgtcagcagacctaggtttagctgactcatcctggctattaggatgagctggggtgctgcttcttgttggggagagcagtcctgatggttctgcagtattgtttttccaatttatgtagactaaaaggattgtaggattggggagagaaaaatggagacttttttcctaaagagcttgagtttgaacggtactgaaaaaa

SEQ ID NO: 271237 - DNA, 639 bp, Homo sapiens
acagctggaaatgctgggacgtgcagcatcctatactgcaagtaggccccatgaaacaaccctaaggcaagaaagcatccactatgctcagagaacagcaaggtggcccagttgggtagagcagagtgacctgtaggaagaataatggatgtcaggaggattactctggatgctatgctgagaagaaactgaagacaatggtggaagtgggaaagcttatgactcagaataactatttctaataacaaattttaagttctcttcatgcagagcagctgacacaaatcttcaactcattgatgatggcatctgactgttccaggtattaagaagagagaaagaatctgagaaattatggcgtactcaactgtggacagctgaaagtctggcatagcgtgccctcatcatcacaaatgggctcgcattacaagctacacttatttgacaactatcagcatttgtcaaccggcactcagatttgaagactcatttcacagctggagcaagagaagacaggaaggaaaaatcagagtaaggtttcaatgagtttctgcaaattctcagaagttttgctgccactcagtgtcacaataacaaaaagaaataaaaatagctgatatttactaaacaaaaactctg

SEQ ID NO: 271238 - DNA, 584 bp, Homo sapiens
acagctggaaatgctgggacgtgcagcatcctatactgcaagtaggccccatgaaacaaccctaaggcaagaaagcatccactatgctcagagaacagcaaggtggcccagttgggtagagcagagtgacctgtaggaagaataatggatgtcaggaggattactctggatgctatgctgagaagaaactgaagacaatggtggaagtgggaaagcttatgactcagaataactatttctaataacaaattttaagttctcttcatggtattaagaagagagaaagaatctgagaaattatggcgtactcaactgtggacagctgaaagtctggcatagcgtgccctcatcatcacaaatgggctcgcattacaagctacacttatttgacaactatcagcatttgtcaaccggcactcagatttgaagactcatttcacagctggagcaagagaagacaggaaggaaaaatcagagtaaggtttcaatgagtttctgcaaattctcagaagttttgctgccactcagtgtcacaataacaaaaagaaataaaaatagctgatatttactaaacaaaaactctg

SEQ ID NO: 271239 - DNA, 990 bp, Homo sapiens
gcggccgcgtcgacaaaaatacaaaaattagctgggcatggtggcagacacctgtaatcccagctacttgggaggctgaggcaggagaatcacttgaacccgggaggcggaggttgcagtgggctgagatcacaccactgcactccagcctggacgatagagctagactctgtctccacaaaataaaaaattttaaaaaataaaataggccgggcacggtggctcacgcctgtaatcccagcactttgggaggctgaggcgggcgaatcacaaggtcaggagatcgaaaccatcctggctaacatggtgaaaccccgtctctactaaaaatacaaaaaattagctgggttcggtcgtgggcgcctgtagtcccagctactcgagaggctgaggcaggagaatggcgtgaacctgggaggcagagcttgcagtgagcagagactgcgccactgcactccagactgggcgacagagcaagactccgtctcataagtaaaataaaataaaatgaataaaataaaataaaatataaaataaaataaataaaaaataaataaataaaataaaataaattgagagtgcctagatggcagggaagatgccagtggagatgactgatgctctttgggatctcactcgatagttttggagattacaagtgtcattcagggaaaatgaggcacctctgtgacttttctattctctatcagatgacaatgaaagttatcctgattgttggccaggcgaggtggttcacgcctgtaattccatcactttgggaggccgaggcgggtggatcacctgaggtcaggagttcaagaccatcctcgccaacatggtgaaaccccgtctctactaaaaatacaaatcttaactgggtgtggtggtgcacacctgcaatcccagctgctcaggaggctgaggcaggagaattgcttaaacctgggaggtggaggttgcagtgagccaaggttgcgcaactgtactcca

SEQ ID NO: 271240 - DNA, 444 bp, Homo sapiens
tgtcttgttttagtttgttggttggttgggtttttgttgtttttcctgggatatggacacattcattattttttttaaagttgtattattctgctctataaatgttcagtaaatatttatttagggagaagccacgtgctcagtattggggtaaaaatggattatagtagttctcaccctagaggtagtcataggctgtaagacaacatttttcaaaccattggtcagatcccttcgcagcttcaaatcacagtgactccctggagatctgggtgactgataagccccctataccctctctgtcagcctggcccagcaccatgttcaagttagggaaggacatcacccttcagtgccgaggacccctgccaggtgttgaatttgttctagaacatgatggagaagaagcacctcagcagttttcagaggatggagactttgtca

SEQ ID NO: 271241 - DNA, 391 bp, Homo sapiens
ttcattaaccacgaccattacaagtcttgttaacatattttgtctatagcctgcaaggaggaaaacatgattcttctctatcaccttctaattaggtatcagtaactcaggggtggccctggggctcatcaacagctccaccattgctctcagagtttggttcctgttcctgtagcttccatgacagtgattctctttacccaactcaccgcacccatggcagtgattctctttacccaactcaccgcacccatgacagtgattctctttacccaactcaccgcacccatggcagtgattctctttacccaactcaccgcacccatggcagtgattctctttacccaactcaccacacccatggcagtgattctctttacccaactcaccg

SEQ ID NO: 271242 - DNA, 422 bp, Homo sapiens
acagtgaatgtggaaactttgcacgtgtttggatgtattgattgccttaactggcagctctttgcactgccagcttccctcaattacatgaggaaccacgagggggcaatgtcttcccgagcaataatagctgagtggtggtcttaggaccccgtggtggcccatgatgctagcactgtgtctttggccattcttgcctgtcatggagcatactccacagaagggcatggtcttcttggatcccggcatgggcccaacaaaaatgacaatgtagtcaatagttccactcagacctcacttaggagcaggtgaactatgttgtgtgatatcaggatgcccggagaacctctcctatccccacccagggaagcatggcttaattccaaataaagaatctgatttctttgtctttaaaaccaagc

SEQ ID NO: 271243 - DNA, 888 bp, Homo sapiens
ccagaggctcgtaatattcaaaatgtccaagatgcaatgcagaatcacgtgaaatacatgagtcaggaaattttcaacaattcaaagacaacagacactaaccccaagatgacacagatgttggaattatgagacaaagactttagatattataacactgtttcagaaagtgaccattccagaaattgatggaaatgtcaaatttttcagcaggaaaatagtaatttgactcacttctaataaatagaatatgatagaagtgatgtgatgtcacttaaaatatttggttatgagaagactgtggcttctgcataggcatgtgctctcttgaatcacttgtcctttcagaaaccagttgccttatcgtgaggacacggcctgtggagagttccatgtagtaagtaactgaagcccatggcccacagccagcaacaaactttggccttctagcaaccatgtgagtgagcttagaagtggatcctctcttgcctgagccttcaaataggactgcagccacagccaactacttgcctgtaacctcatgtgagacgctgagccagaaagacctagctaaaccactcacttctggcttcttaacccccagaaactctgggttagtacgtgttttaactggtaggttttggggtaatttgttatgcagcaacagataactgatacagaacttggtacttggaggtgggcagctgccataatgaaaacccaaaatatgggaggggttttggaacttggcagtgggtgttaagtaggcatgcgctggtaaaaacctcaagtgctttgaagaaactatagcagcatcatgtctgacaaggctgtagatgaggacttctagaagagtgaggtaaatgttattggaaaactggaggaagg

SEQ ID NO: 271244 - DNA, 478 bp, Homo sapiens
tcaaaggttattacatatatgtcatatgcatttgaatgtgttacatactcaatttgtaagccacttaattggaatgtgacatatatcttcctatagaaatgagagttaatagtgcctacattctcaggctagccctcaaaagcctattaaacatctctttgaggaaacactgggcaatggtcaaattcagagctctggttctgatgatgtaaaacgaggttaggccctctgaggcaaagattggaaatgaggtggtagggacagagtcaagcaatgtctctgaggctctcgtgctatacaaaggaaagagctagggctttgaactcaaacagactagggtcatgtcagatttaccagttactagctctgcagtcatcaagaaattatgttctctttgccttcacatagttacctgcagaaggggaatggcttgggagcactgtgaggatgaagtaaaacagcatatgcaatgcacctc

SEQ ID NO: 271245 - DNA, 514 bp, Homo sapiens
gaaaatagggagtgatgtgtaaattaagccattccaagttttaacaatttaggggccatttgaaggtctttgcaggagggaatactcggatagcaaacattgtggtagttgtaaacatgaacagtttttaatgtcaagtcagggagtcctaaccaagccacaataatgaattttactcagctctggaacaagaattttgaaatgttatgttagttgttttacggtatgttgctgagcgtatgcgtgtgcacggttggtgttaagaagggcgtataatctgctgggctttctctattgttgattgttgctaataattctctggttgaagaaaaatatttccttttcaggaacgtattgggaatatatttgaggtgagtaaaggtatatattcttttttgtgcttgggcagaagtactgagtttttactgtttaattgtaataacataaatctaaactattgatacattttgcgtatttatgtgtatatctatgtgtatagaaagtgatacatatg

SEQ ID NO: 271246 - DNA, 364 bp, Homo sapiens
atattaggttttcttggccactacctgtgctgctaagttgaagggcaatgtcttttaggatatttggtcacccctctatttatacacagctccgaagaaacccagcactggacaaattctctcaaacttttccccaagcttggccaccaatctgttttagatgaagactccatttggaggaaatctgctaattatctgcctggctttcaggaaaacagctttatgcattttactggaaaaatgcttttgccttggtagcattcccaaaaccaagtcctgcgactctgtctgaaatcatgctaaaacagaacagaactcagaatcttactacgctcactctgcaaaataaaagcagtacctgaga

SEQ ID NO: 271247 - DNA, 1097 bp, Homo sapiens
gctgcccgcacgccccgacgggagctgcgcccagcctcccctctggagtctgcactccaggcttcttcccggccggtggccaaggccccagcaccacggtccctcctgcagggcatccagcacctacccttccactgggcggctcctggttctggtcccggctggctcactcaggctgcctttggaccagattcttgaacttttccaccaaggatgttgctgctgtttgtagcgtcggatcctggaaaatcgctgtgttggggagcagcaggctctcccttgctcccccagggcctgggaaaatcaacccacctctgccccccgaccccagggctgtaacctggtgtctggtagccccactgtgataaaccgaagcccagcacagtttgggactcgccccgagttgacttatgcagcccccagaacagaggctgaaacccggcgcatcctggtgaagccacacccagccggcctggtcccaggccccgggcacggggtcccctccactcccatctgcttccctttcagagccggggctgagtcggcagggacgcaggctcagggccctggattcccgctttctggacacttgcgtgcatgcccagcaccagctcgcccttctgagaaagcaatccctcctcagaggggagaagccgtggctgtgatgggcaggaagtggtcaggacccactgccgagcaccaactccccatgccaccaccaggggtgcgcctggactcctggaaaggggtcgcgtcagggtgcagcccatcaaaggcttcccaagaggcaagaggcaaggagaagtgtcctactttaaacggccagcctcagtggtcggccctgttcactctgccacctcagagagagtgaacccagcagaggtgtgacgggaggctggggagagaccccagcaccttgagcacacaggagccaggaggagcccaacagagcagcaggggctggggtcttctcctgaagcctgactccatgggaccccaaagaagcagatggaaaactgaaaaagaaaacccctcaagtgagccactggaaagaaagcaaaacaagagaaaataaatgagttgtttgacataaaaaa

SEQ ID NO: 271248 - DNA, 408 bp, Homo sapiens
gtttgccagaggatgttttcctcagtgtctgttcgaccttcagcttttttggtcttccttttacgctgcatctgagctggtctgcctccacgttcttgcgccttacaccgatctccagtgtcaccttggtttaaggctcttatctcataggagcaaagaagggaagaaggactcagacagggcttcgtgtctttccaaaaggatctactgtccctctcctccagggggaacagtaagggacactttctcagtacccacacccttgcctcaatcttttttgtaagcatccaatgaaatctgtggagaagagcctgtgagtggatacaaactccccctgtgtctgcagccccccaggcgatctctgttttcttgctggtccacactaagttcattaaattttaactgaat

SEQ ID NO: 271249 - DNA, 491 bp, Homo sapiens
ctttgctgtgtgtatacattcaaaaagtaatgtatatatgcatatatattatttaaaaagtcaaaatgtatattaaatatcaaaatattgtgtatatacgtgtatacatacacgtatgtaaatgtgtatatacatatgtatgtatgtgcatagatacacttacatacatacatatgtatatatacgtttacatactatgttttgacatttaaaacaggctgtaattacaggctcacacctgtaatcctagcactttgggaggccgaggcaggaagatcacttgaacccaggagttcaaaagcagcctgggcaacatagtgagaccttgtcgctataagaaaatttaagaaattagctgaatgtggtggtgagtgtgtgtagctccagctactggggaggctgaagtgggaagatcacttgaaccgggaggaggaggttacagtgagccgagatcatgcctctgtactccagcgtgggtgacagagcaagac

SEQ ID NO: 271250 - DNA, 250 bp, Homo sapiens
tatcccaatcacactgattgatttttacaaattgtgtaaatgtattaaaatatcatatgtggatgggcgcagtggcacatgcctgtaatcccactactttggaaggccgaggccaaggtgggtagattgcttgagtccaggagttggagtccagccagggcaacatagcaagaccccatctccacaataaataacaaaaaattagccagacgtggtgcccacctatagtcccagctacttggtagactga

SEQ ID NO: 271251 - DNA, 537 bp, Homo sapiens
gaaaccatacacagaggaagtttgccatcagctgaagagtgcttaactgaggcgtggcgagcagactgcacagttcttgccaacatcagagttaatttggtaaatcttggcatctgctttccttcagatatttacctaaagcctccatctgcctctaaatatagatggatgagaagttcagcatcatttaagacacattattttgcacttggctatatataggaatgtactgttgtataagtagccactttaatctggtttaaatttaatttggctcctggacatgcgtatgtatatgttggttaagcatttccttttcctacggtcatctttcaaagtgcacgttgcttaaacatataagggcttacttttctcatgtaacaggaattcaaagtgggtgtttgctagtggtggttcagtggcttgaggatacgggggctgaggtctctgatattctcttggtctgttcctcatggtctcaaggtgggtgcaacaattctagccatcatattggagttccaggcagaaaagtggaag

SEQ ID NO: 271252 - DNA, 814 bp, Homo sapiens
gtaaaactctgtctctactaaaaatacaaaaaaattagccaggcgtggtggcaggcgcctgtagtcccagctactcgggaggctgaggcaggagaatggcgtgaacctgggaggcggagcttgcagtgagccaagatctcgccactgcactccagcctgggagatagagcaagactccgtctcaaaaaaaaacaaaaaaaacaaaaaagaaaaatatgggagacatattaacagcaactgctgttaatggtttctaatagatcccctcagaggtattcattccaagtacacataagcaaatgcatgctttttattttttcacataaatggtggtatgttgtgcaccttgttttttatttcacttaactaacagcatttcttagcgattatttcatcagtatacaaaatgattcctcattcttttgtagggatgcatcgtattctactgtatatatgtatcataatttattggtccttttgccggacatgtagattatttccagtattttgctattacaaacaatgctgcaataaataacacgtcattgctattacaaactgtttgctattacaagccatgctaaaatgaataacatgtaattcccaacaagtgggcatgtatctgaaaaacatctcttcaagaagtaaaatcactgacttaaagggcatgcacatttttaaacttggtagatactgtccaattgtgtcattttaccctcctactaaaaatgtatgaatgtctgtttctctacatctcaccaatagaatgtataataaacctcattgatctttgacagtttgagaggtaaaaata

SEQ ID NO: 271253 - DNA, 430 bp, Homo sapiens
ttctgctcatctgtgtgtagttcttgtttttaagcttccagagagacactgattcctagctagtttctaaccctagcatacagcaagatggaaagctcaggacacaagattaaagtgacagcctggagggcaggacagggagtctgggctgtggctggagcacccatcaccattcctgggccacaagccgccttcagggactggcttcctgttctcccaggccccgctgtggctccttggccttagccccaggttctcaacatgaacagactgtgaactccttgtgaacagcgatgagttttgtacattcccctaactggggcctctctcccgcagtgaatgagtaagtgacagacacagttatactaaagttataagttatgtccagcaaaagagaggcattgccttctctgttgtcatctgtcctccc

SEQ ID NO: 271254 - DNA, 935 bp, Homo sapiens
  misc_feature (1)..(1): n is a, c, g, or t
  misc_feature (42)..(42): n is a, c, g, or t
nttccggccgcagagctccaccgctgaggccaacgaggccantagtttatttggcaattcataaagatagggactcttgagaggaggttgagagcattgtagggttatgtaaagacttccagaagctgtaaagacttccagaagcaagaagattcaaccatctaaaacgccatgcaggaaaatagccaaaccttctccatttaagtagagaataaatcttagtagcgttctctgcagaatataacaacgctgcaaaaaggccatttcacaggaatataatcaaaactgcagattctcagggtttcccgtaagacgacttctctgctcttctgtttgtggtttcttttttagttgtacatctctcctagacaagtccaaggaactactaacgagaagatttcaggaagaggcctacagcaattgcttggtgcttgggttcatttgcggaatcttggcaacaggtctacagagaagcagttccacggcaaaagagctgtggggcagttgaataatccatccaaacaatgaggagtaaaccctgagtcaagaaaccagcaaaaagcagaagactgggtcagcaaataaagggagaagatccttgcctccttcagtgcccctagcatgatattctgaaaggccctccactaaaatacaactacagttttaataaattactaaaatagagaatagaagtagtatgtaagttgggatagggtgatctgaattaagtgttttaacattcatgaactgttcaggacaaaagctgtaagatattggttaacctcaacattgttaaattaagtgtgcactgtagtatcaaagatactcataagaatggagagagtaattttctaaatagtggagggaaaataggaattaatttttttcaaaagtgggacttaggttgtctaaagaaaggccaaaaaaagcataaa

SEQ ID NO: 271255 - DNA, 860 bp, Homo sapiens
  misc_feature (1)..(1): n is a, c, g, or t
  misc_feature (42)..(42): n is a, c, g, or t
nttccggccgcagagctccaccgctgaggccaacgaggccantagtttatttggcaattcataaagatagggactcttgagaggaggttgagagcattgtagggttatgtaaagacttccagaagctgtaaagacttccagaagcaagaagattcaaccatctaaaacgccatgcaggaaaatagccaaaccttctccatttaagtagagaataaatcttagtagcgttctctgcagaatataacaacgctgcaaaaaggccatttcacaggaatataatcaaaactgcagattctcagggtttcccgtaagacgacttctctgctcttctgtttgtggtttcttttttagttgtacatctctcctagacaagtccaaggaactactaacgagaagatttcaggaagaggcctacagcaattgcttgagttgaataatccatccaaacaatgaggagtaaaccctgagtcaagaaaccagcaaaaagcagaagactgggtcagcaaataaagggagaagatccttgcctccttcagtgcccctagcatgatattctgaaaggccctccactaaaatacaactacagttttaataaattactaaaatagagaatagaagtagtatgtaagttgggatagggtgatctgaattaagtgttttaacattcatgaactgttcaggacaaaagctgtaagatattggttaacctcaacattgttaaattaagtgtgcactgtagtatcaaagatactcataagaatggagagagtaattttctaaatagtggagggaaaataggaattaatttttttcaaaagtgggacttaggttgtctaaagaaaggccaaaaaaagcataaa

SEQ ID NO: 271256 - DNA, 210 bp, Homo sapiens
gacatcctgccgcgtcactgcacagtgcgcgcgggccctgagcacccggccatggtgcgcccgtcccggggcgccccagtcacgcacaacgggtgcctcctgctgcgggaggctgagctgcacccgggcgacctcctggggctgggcgagcacttcctgttcatgtacaaggacccccgcactgggggctcggggcctgcgaggccgccg

SEQ ID NO: 271257 - DNA, 1964 bp, Homo sapiens
  misc_feature (1961)..(1961): n is a, c, g, or t
  misc_feature (1963)..(1964): n is a, c, g, or t
ctactgtgaggggatgaaggtgctccctgcatctggccttgctgtcttcctcatcatggctttgaagttttccactgcagccccctccctagttgcagcctcccccaggacctggaggaacaactaccgcctcgcacaggcgtatcttgacaaatattacacaaataaagaaggacaccagattggtgagatggttgcaagaggaagcaattccatgataaggaagattaaggagctacaagcgttctttggcctccaagtcaccgggaagttagaccagaccacaatgaacgtgatcaagaagcctcgctgtggagttcctgatgtggccaattatcgcctcttccctggtgaacccaaatggaaaaaaaatactttgacatacagaatatctaaatacacaccttccatgagttctgtcgaggtggacaaagcagtggagatggccttgcaggcctggagtagcgccgtccctctgagctttgtcagaataaactcaggagaagcggatattatgatatcttttgaaaatggagatcacggggattcctatccattcgatgggcctcgggggactctagcccatgcatttgctcctggagaaggcctgggaggagatacacatttcgacaatcctgagaagtggactatgggaacgaatggttttaatttgtttaccgttgctgctcatgaatttggccatgccctgggcctggcccattccacagacccatcagcactgatgtacccaacttataagtacaagaatccctatggattccacctccccaaagatgatgtgaaagggatccaggcattatacggacctcggaaagtattcctggggaagcccactctgccccatgccccccatcacaagccatccatccctgacctctgtgactccagctcatcctttgacgctgtgacaatgctggggaaggagctcctgctcttcaaggaccggattttctggagacggcaggttcacttgcggacaggaattcggcccagcactattaccagctccttcccccagctcatgtccaatgtggatgcagcttacgaagtggctgagaggggcactgcttacttcttcaaaggtccccactactggataacaagaggattccaaatgcaaggtcctcctcggactatttatgactttggatttccaaggcacgtgcagcaaatagatgctgctgtctacctcagggagccacagaagacccttttctttgtgggagatgaatactacagctacgacgaaaggaaaaggaaaatggaaaaagactatccaaagaatactgaagaagaattttcaggagtaaatggccaaatcgatgctgctgtagaattaaatggctacatttacttcttttcaggaccaaaaacatacaagtatgacacagagaaggaagatgtggttagtgtggtgaaatctagttcctggattggttgctaaatagaaaagcctagtcttctcaagcaatgaggatgactacaagcagcctctaactggatcttaaggactaaagcagaatgtaggagagggattcttccaaaggccttcaaatcaaattagaattcactgagaataataatacttccaatttttttcatagttgtataatcagaatttcaatccacattagaaaagtttttatatgggcaactttatgcgaaatccaaatcaacacaatgcactctgcagttagacaccattattttttcttacctaatatactgaagcagattgatccgtttgatttttatttccaggaggaagactagtggtggattccatgacatatattgtaattcttttcataggaaatgtcattacagtatgaattataattatttacaagcaatggcttttgtggccatcatttggccatcatttgttataataaatataaatttcccaatttttacttaaaagacatcacaacacaaanann

SEQ ID NO: 271258 - DNA, 2008 bp, Homo sapiens
  misc_feature (2005)..(2005): n is a, c, g, or t
  misc_feature (2007)..(2008): n is a, c, g, or t
ttttttttttttagaccttgacaatttttctttaatggataaaaggcaaaaagatctaggaaattgcttttcctttgagccctggagacctggttattaggcttctgattatcagagcttctccccatcttctcagtgcctagagacccagatcccccaacagcttcctggggtgctaggaatctggccccaggggatctggagggtgggaagcccagaaatgggcacaccattcaaaatcagtcagatttcacctgaggcacaaaagacaaatttcatcccaagaagctttcagccagctctatccatttccaggagggggaaagcaccagatctgcctgacccttgagggacaggaaaaatgccatgaatgtctccatgtcacaaactcagctccagaaccttggtggcagtgttccaatgggaagcgattcctgtgggccaccgagaagggctgagctcaaacacttgcctttggaggtccttgtgccctggaaagtcactgccttcggatggccactgtcactcagccaggaggcaaagcacatatttggcacagctattatgacacagatatcaaagaagttctataataaaataataatctttagaagacttactatgtgccaagcactctgctacctgctttacaggaattatttaattctcacaacagccttctgaggacctcggaaagtattcctggggaagcccactctgccccatgccccccatcacaagccatccatccctgacctctgtgactccagctcatcctttgacgctgtgacaatgctggggaaggagctcctgctcttcaaggaccgcacagagagaaagtaacaaagtattttttaaaaagcaaaatttacccagaatcccaccacctggagtgtatcagtctgcaggagctgctataaccaagtaccatagaccaggtggcttagacaacagaaatgtattcctcacagttttggagggtaagaagttcaagatcaaggtactgcaaggattttctggagacggcaggttcacttgcggacaggaattcggcccagcactattaccagctccttcccccagctcatgtccaatgtggatgcagcttacgaagtggctgagaggggcactgcttacttcttcaaaggtccccactactggataacaagaggattccaaatgcaaggtcctcctcggactatttatgactttggatttccaaggcacgtgcagcaaatagatgctgctgtctacctcagggagccacagaagacccttttctttgtgggagatgaatactacagctacgacgaaaggaaaaggaaaatggaaaaagactatccaaagaatactgaagaagaattttcaggagtaaatggccaaatcgatgctgctgtagaattaaatggctacatttacttcttttcaggaccaaaaacatacaagtatgacacagagaaggaagatgtggttagtgtggtgaaatctagttcctggattggttgctaaatagaaaagcctagtcttctcaagcaatgaggatgactacaagcagcctctaactggatcttaaggactaaagcagaatgtaggagagggattcttccaaaggccttcaaatcaaattagaattcactgagaataataatacttccaatttttttcatagttgtataatcagaatttcaatccacattagaaaagtttttatatgggcaactttatgcgaaatccaaatcaacacaatgcactctgcagttagacaccattattttttcttacctaatatactgaagcagattgatccgtttgatttttatttccaggaggaagactagtggtggattccatgacatatattgtaattcttttcataggaaatgtcattacagtatgaattataattatttacaagcaatggcttttgtggccatcatttggccatcatttgttataataaatataaatttcccaatttttacttaaaagacatcacaacacaaanann

SEQ ID NO: 271259 - DNA, 345 bp, Homo sapiens
gttggggagattccctgggacctgcctctctgctgcaggcaaaaaacctgagaaacgtttattctatttgttctgtgccctatatcgataacttttctctgttgaaaaagtttgctttgagtataatatttatttttagtaatgtactgtccccaaatttgaataatgaagatactgttccctaatggtcaagtactatccagactcagtgtgttaaaaagaaatgggtcaggcatggtggctcacgcctgtaatcccagcactttggtaggctgaggtgggtagatcacctgaggtcaggagtttgagaccagcctggccaacgtgatgaaattccatctctac

SEQ ID NO: 271260 - DNA, 635 bp, Homo sapiens
caatttgagtcatattttcattctcttgaatcaaagggtcacttaacaaacatgatttaattatatatgtcttgcctgatttttagtcacagagaaattccgagatgaaaactctggaaaggtgtcattaactcaaggaagacaagggcagagttaggctagcaactagacactctgtgtacagtttcatatacaagcaagactttcctttaatattgataaagaattgagtatcatgtatgcattcccttttatgatatacaattaattgtaagttatttccccttgtatgcaaccatccacatttttcttctgaccttttcctcaagtcttacaactacttttaatgactgcattttggaggtggtcccaggagaacagatgttgccttataatggtgtttttccatttttttctttgattgggcaagggggttggaagtattatttagtcattatatggattcctctaaaaattgttcaatagaatatgtattcatttattcacttacttattgtttatttattgcctagagtatacccaacactgaggatacaataatgatcaagacaggtctaatttctgtcccatagagcttaaattgtaattagaaagaatttttttaaataagcaaa

SEQ ID NO: 271261 - DNA, 787 bp, Homo sapiens
  misc_feature (19)..(19): n is a, c, g, or t
ggaggaaaccgcgcttttnttgggtgttcacggataatgaagctgatgtgagagccctggagagaaacatcagtcaaaggcatagggaatcccatccagcgtccctctactctcctctgcagcttccatggttggaatgctgagccattgctaggacgatgaggctacaggaaagtgaaatgcacctgctgcgatctgatccaactgaccactcctgctgctcctcccttgcacctcaggcatctccttccaatctggaggaaacacttttacctccacttttcttttacagtcctccaaactctgttccttctagggagcacaagtacagaaatagaaacctggactcccttcatcctgcttcacaaacttacaatgttaaagaaagaaaaaaaaaaagaccaagtacattacctggtagaattggagagatgggcacgaaagagctgtaaatacagttagaaaacacactagcatttacaaatgtgtatgagaaacaatgaggaggattttcagagactatcataaccatttatttttctaatatgtgataagtaaacgcacagaaaatcaatttaatatttggggcttttatttctcattttttagattgccagaaagactgtccagtgttataaagtttgtgtcaatattctggaattggcaattttgtcatttatatgggagaaatagctaaaggtgtagtataaagtatttgctcgtaggtaatggaatgttacctttacccaaagatataaaaaataaacggtagaacaaaaactcagag

SEQ ID NO: 271262 - DNA, 1127 bp, Homo sapiens
  misc_feature (19)..(19): n is a, c, g, or t
ggaggaaaccgcgcttttnttgggtgttcacggataatgaagctgatgtgagagccctggagagaaacatcagtcaaaggcataggcaggttgtgaatacaaacctcacttgtttccagacagattcttcatcataatgattaggacaatgacagtacaaacattctcatcctacaaaaataagtaatcacaaccacaccttatccaatatctgtacagcaattgtgccatacacattaaattcagatttttataatgtaatttaatctgtatttcaagccacaatcttgctgaagttcataatgttttgttccaaccattcttgtaatcccctctggtgacatgccatggtgccagcatcttagttgttcccatggcactagtaggtggaggcatcgagactgctgtgtcctctcttcttgcagggaatcccatccagcgtccctctactctcctctgcagcttccatggttggaatgctgagccattgctaggacgatgaggctacaggaaagtgaaatgcacctgctgcgatctgatccaactgaccactcctgctgctcctcccttgcacctcaggcatctccttccaatctggaggaaacacttttacctccacttttcttttacagtcctccaaactctgttccttctagggagcacaagtacagaaatagaaacctggactcccttcatcctgcttcacaaacttacaatgttaaagaaagaaaaaaaaaaagaccaagtacattacctggtagaattggagagatgggcacgaaagagctgtaaatacagttagaaaacacactagcatttacaaatgtgtatgagaaacaatgaggaggattttcagagactatcataaccatttatttttctaatatgtgataagtaaacgcacagaaaatcaatttaatatttggggcttttatttctcattttttagattgccagaaagactgtccagtgttataaagtttgtgtcaatattctggaattggcaattttgtcatttatatgggagaaatagctaaaggtgtagtataaagtatttgctcgtaggtaatggaatgttacctttacccaaagatataaaaaataaacggtagaacaaaaactcagag

SEQ ID NO: 271263 - DNA, 750 bp, Homo sapiens
  misc_feature (19)..(19): n is a, c, g, or t
ggaggaaaccgcgcttttnttgggtgttcacggataatgaagctgatgtgagagccctggagagaaacatcagtcaaaggcatagcttccatggttggaatgctgagccattgctaggacgatgaggctacaggaaagtgaaatgcacctgctgcgatctgatccaactgaccactcctgctgctcctcccttgcacctcaggcatctccttccaatctggaggaaacacttttacctccacttttcttttacagtcctccaaactctgttccttctagggagcacaagtacagaaatagaaacctggactcccttcatcctgcttcacaaacttacaatgttaaagaaagaaaaaaaaaaagaccaagtacattacctggtagaattggagagatgggcacgaaagagctgtaaatacagttagaaaacacactagcatttacaaatgtgtatgagaaacaatgaggaggattttcagagactatcataaccatttatttttctaatatgtgataagtaaacgcacagaaaatcaatttaatatttggggcttttatttctcattttttagattgccagaaagactgtccagtgttataaagtttgtgtcaatattctggaattggcaattttgtcatttatatgggagaaatagctaaaggtgtagtataaagtatttgctcgtaggtaatggaatgttacctttacccaaagatataaaaaataaacggtagaacaaaaactcagag

SEQ ID NO: 271264 - DNA, 351 bp, Homo sapiens
aattggggagggaaaaggaatgaatttgaagattgatacgaagtatgtaccactcagagaaaagggagtcagaattattgaatgttatgcatatttaatgctattggcaaaattgccatttttttagatgaattaatcaatgttgattttaggctaataccattaaatgttggatttctttatctccccttctgattccatggtcaccaagcaaccttctcattgtgatctggtgttctttacaagtctaactacagagaatgaatggctgatcctacagacttcaacaattttctgtcctcagacagtgatttatcataatgaattaataaaatgacttctgactttgaa

SEQ ID NO: 271265 - DNA, 185 bp, Homo sapiens
atgtgagctaattgccaaattactgatgtctatctttgattccagcaaccttctcattgtgatctggtgttctttacaagtctaactacagagaatgaatggctgatcctacagacttcaacaattttctgtcctcagacagtgatttatcataatgaattaataaaatgacttctgactttgaa

SEQ ID NO: 271266 - DNA, 304 bp, Homo sapiens
gagtgtcctcctcctcccgtcctgggaaacctcatccaatgggcaaagctgaaagggcctctgacaggcctttggggacctccttatatatatccttacgtatatacccaagataattggaaacttaacgttcacacaaaaactggtatatgaatgcttagtagtagtattcgtagtagctcaggagtggaaacagcctgagtgtccgatgacaaatggaaatgttctatagaatgtaatgaatattccatagaatggaatattacttggcaataaaaatgaatgaagttccgattcatgctac

SEQ ID NO: 271267 - DNA, 381 bp, Homo sapiens
aggatgaaaatggctttgacacattcaaggtactgagtttgtgcttaggaaacactaaccgctatgactccgtgaccaccctgtcaccttgtaccccatttttctatcctattacaggtttacgcacttcctgtctgtctcctctatgagactggagtctgcggcagacactgtatctactcagttcaccgcctcattccaagcacctagcacagcgcctggcccacagtggatgcgcaagaaacccatggaatgaatgaataaatgaatgaacgagtggacaaaccacttccccaatacctagctcagtgcacggcctatgaccagtgcgggccaatgctcgctaaatatgacctattagtaaatcagtgaaactgcaaa

SEQ ID NO: 271268 - DNA, 750 bp, Homo sapiens
gagaaagaagaaaaatagaaaaagattaaacatatatttgggagattttccaaataacagttcaaactaaaataaccaacagatgcctagttagaattaggccctttcttttaattgaagcattagcaaatgggtctatcacattttctaatacagttttgagtcatgaattaagtcaacaggtatttggttggatagaaatcatgccaacaccatgtatgtgaaatttggtgccatcttactttgaacatcactggattgcatgaaatcatcacggtttcaccatatgaaattccaatctagatggaatcagtgccaaagatgatgttattagagaattacatgttactaacatttttgaaaaatatagaaatcaaattgtggtgtgtgtgtgtgtgtaaccaaatgctagagcaaattgttttgctgaagaagggttgttatcctcaaaaagtctagtcacatacagaaaccacagtctacagaatgaaagaggatcccagagaatatgaaggttgagctctgtgtggcaaagaggagtcaagattttgccctgaggaattgctaaatgggagtcaccctttactgagatgtttgaaaagtaagcttgagggaagatgagaaagtttaatttcagactttagttctaggtacctaatggatatccaagtggagatgtgaaggagacagttggatatataaatgtggattatagaagaaaaacatctgagctagagaggaacagcaggt

SEQ ID NO: 271269 - DNA, 339 bp, Homo sapiens
cttcagttctctgagttcaagaatttgtaacatttcaccccctgctccttcctgatcttctgtggagcatcttttttccatccatgctctactcagagcccactttcccttccctgacaccagcttcactgaggctggttggaacctaacacaaaacattctcagtaatgactgaattcccacaaagaattccatatagaccgcatatgagttgaatcttctaagacatgaaatatttgttctcttcttggctaatatgcaatgcaaatcctgttgcaaatgtacgtcatatacctctgaaattcctgatgtattcaatgaaataacatctttaaagtt

SEQ ID NO: 271270 - DNA, 1017 bp, Homo sapiens
cggcgctatagcaacggtagctagctgcagggccagtggcacggtgagtacccgggaggatgggggaggatgagggtgggtggaggttgctgaccctccccactgcagcgcgggccggggtcctagggtccgctctgccgcctggagaaggccctggagttggccctggagttctgctggcgtgaaagcagcccagcccaagacacctccacatcctcaggcctgaatcacaggccgccctttatccccacgtccaggaccaatttgaaatgttatatcccagccatgaagaggccatgtctggtccaactgatgagactgcaggagacttgcctgtgaaagatacaggtctaaacctctttggaatgggagggttacaagaaacttcaacaacacggacaatgaagtctcgccaggcagtgtcacgtgtcagtcgtgaggaactggaagacagatttttgcgtttgcatgatgagaacattttacttaaacagcatgcccgcaagcaggaggataaaattaaaagaatggccaccaagttaatacggctagttaatgacaagaaaagatatgagcgggttggtggcggccccaagcggctgggacgagatgtggaaatggaagaaatgattgagcagctgcaagagaaagttcatgagcttgaaaaacaaaatgaaaccctcaaaaacagactgatttcagccaaacagcaacttcaaacccagggttacaggcaaactccatacaataatgtacaatctcgtattaacactgggcgtagaaaagcaaatgaaaatgctggtttacaggaatgccccaggaaaggtataaaattccaagatgcagatgtagcagaaactccacatcccatgtttacaaaatatggcaacagtttacttgaagaagccagaggagaaataagaaatttggaaaacgtattcaggtcacaaagaggccagatagaggaggtagagcactggcttgagatcgtgaagatcagttgaggagaacagagca

SEQ ID NO: 271271 - DNA, 717 bp, Homo sapiens
cggcgctatagcaacggtagctagctgcagggccagtggcacggtgagtacccgggaggatgggggaggatgagggtgggtggaggttgctgaccctccccactgcagcgcgggccggggtcctagggtccgctctgccgcctggagaaggccctggagttggccctggagttctgctggcgtgaaagcagcccagcccaagacacctccacatcctcaggcctgaatcacaggccgccctttatccccacgtccaggaccaatttgaaatgttatatcccagccatgaagaggccatgtctggtccaactgatgagactgcaggagacttgcctgtgaaagatacaggtctaaacctctttggaatgggagggttacaagaaacttcaacaacacggacaatgaagtctcgccaggcagtgtcacgtgtcagtcgtgaggaactggaagacagatttttgcgtttgcatgatgagaacattttacttaaacagcatgcccgcaagcaggaggataaaattaaaaggttatgataaaaagcttttagctttttttcttgactcagtaaaatttggagggtatggtattttataaacttaattgaataccccaccttgaatcttgtttggaacaaggcaggatgtaaataagtacaatttttaaaaatggaaaatcttgcaaactagaataataaaccaaaaagattatgagtgttta

SEQ ID NO: 271272 - DNA, 769 bp, Homo sapiens
cggcgctatagcaacggtagctagctgcagggccagtggcacgaggccatgtctggtccaactgatgagactgcaggagacttgcctgtgaaagatacaggtctaaacctctttggaatgggagggttacaagaaacttcaacaacacggacaatgaagtctcgccaggcagtgtcacgtgtcagtcgtgaggaactggaagacagatttttgcgtttgcatgatgagaacattttacttaaacagcatgcccgcaagcaggaggataaaattaaaagaatggccaccaagttaatacggctagttaatgacaagaaaagatatgagcgggttggtggcggccccaagcggctgggacgagatgtggaaatggaagaaatgattgagcagctgcaagagaaagttcatgagcttgaaaaacaaaatgaaaccctcaaaaacagactgatttcagccaaacagcaacttcaaacccagggttacaggcaaactccatacaataatgtacaatctcgtattaacactgggcgtagaaaagcaaatgaaaatgctggtttacaggaatgccccaggaaaggtataaaattccaagatgcagatgtagcagaaactccacatcccatgtttacaaaatatggcaacagtttacttgaagaagccagaggagaaataagaaatttggaaaacgtattcaggtcacaaagaggccagatagaggaggtagagcactggcttgagatcgtgaagatcagttgaggagaacagagca

SEQ ID NO: 271273 - DNA, 707 bp, Homo sapiens
cggcgctatagcaacggtagctagctgcagggccagtggcacggtgagtacccgggaggatgggggaggatgagggtgggtggaggttgctgaccctccccactgcagcgcgggccggggtcctagggtccgctctgccgcctggagaaggccctggagttggccctggagttctgctggcgtgaaagcagcccagcccaagacacctccacatcctcaggcctgaatcacaggccgccctttatccccacgtccaggaccaatttgaaatgttatatcccagccatgaagaggccatgtctggtccaactgatgagactgcaggagacttgcctgtgaaagatacaggtctaaacctctttggaatgggagggttacaagaaacttcaacaacacggacaatgaagtctcgccaggcagtgtcacgtgtcagtcgtgaggaactggaagacagatttttgcgtttgcatgatgagaacattttacttaaacagcatgcccgcaagcaggaggataaaattaaaaggttcaaagaaaaggtgagacaaccattgaagaatgaaaatagggtttttctgcttagaatccatcctaaggaggtggttccagttcagtttctactctgtggacttcaacaacccactggcatgctatgtgcaggccttttactttgagttgggttttagtcatgatgatggctgttttca

SEQ ID NO: 271274 - DNA, 495 bp, Homo sapiens
gacggagtttcactcttgttgcccaggctggagtgcaatggcacgatctcagctcactgcaacttccacctcccaggttcaagtgattctcctgcctcagcctccctagtagctgggattacaggcatgtgccaccatgcccagctaattttgtataaatagcacctcttaaagaggtgctttgagagtatgtttttaaatcacaaggagaaaaatcagaactacaaatatgtaaaaataaatagaaagtgacccaggccaggcacggtggctcatgcctgtaatcccatcattttcgggaggccaaggtgggagaatcacttgaggttaggagttcaagaacagcctgggcaacatggtggaaccccgtctctacaaaaaataaaaaaacataactgagcgtggtggcatgcacctgtggtcctagctactcaggaggctgaggtgggaggatcacttgagcctgggaggtggaggctgcagtaagccatgatc

SEQ ID NO: 271275 - DNA, 338 bp, Homo sapiens
actgaaaatacaaaaaaatttaatacaatctctccattcaatgataaccactatacaagctcttgagtatttactcattttctatcctctgtattttctatcctatgtattttgcctactttctaccctacgtaaaaattgggatcactacaatatacatttttaaatctttatagttagaaagtaattttgttcatttaagaacattaaaagctgcgtacagcggctcacacctgtaatcccagcactttgggaggctgaggcaggcaggctgcttgagcccaggagttcaagaccagctttggtaacatagtgagatcctgtctgtagtaaaaata

SEQ ID NO: 271276 - DNA, 300 bp, Homo sapiens
tgaagctcttcccttgcatgaaaccagaaagcaaagcctaggagcgatggttgtttttacacatgcccaatcccagtaaaatataaaaacatggcatacaaaggggcaaagtaataagtctcaataaaagaaataaaaaaaaacttcagagacttactctaaagaaattcagacctatgagctgtctgacaaagaatttaaaacaactgttataaagatgccaaatgagctaaaagagaacccaaatagacaactaaacaaaaccagaaaaattatccataaacaaaatgagaatataag

SEQ ID NO: 271277 - DNA, 492 bp, Homo sapiens
aacattttcacatgggaacacttagatgggagggaaaccagctataatacctataatacccatcacctcattgactgccggagttgatataaaaatatcacagaccctgggggcatcctcctcttctcctctgcattcttcctgaagctgtacacgcaggcaaaaaggctcctttcacatttgttccctttgctaggtgatctgttgctggggtttcagattagaatcacattcacacgcacatttccaggtgcagtgtaccgcccagtgtggggctctcatatggcttgttgtggttctgtcactaaatcctgtgttcaaagacattctgggatagctgtgaggaattagaagtgactcctgggccaggcgcggtggctcatgcctgtaatcccagcactttgagaggccgaggcgggtagatcacctgaggtcaggagtttgagaccagcctggccaacatggtgaaactgtgtctctactaaaaataca

SEQ ID NO: 271278 - DNA, 389 bp, Homo sapiens
ataggtaaggctcccttgccattgggtttcctgtttaatggttgggtttttccagtaaaggtttctccctgcaggaagtcggagcttcagaggagtgcaaggtcacggtgtttgttatcccacctgcctgtctgtcaagtcgctgaggattggctttgttcctctaccaaaggccacagcccctgccagggaacctcttgtccagcctgccatctgggtctattctttcctccctgtatgtttccagacctagggctggcagcagctcccttctattggtaccctcgaggtactgtgcctgccatgtcttcttgcttcatctaaaccctgcacattcctttgtaaaaagtggttttaattaaactcacctcaaattttccagtgtaagt

SEQ ID NO: 271279 - DNA, 393 bp, Homo sapiens
tatcctgacatacagctgcagagacagacactgtattgcctcggggagaactccagccccaaaggtttctccctgcaggaagtcggagcttcagaggagtgcaaggtcacggtgtttgttatcccacctgcctgtctgtcaagtcgctgaggattggctttgttcctctaccaaaggccacagcccctgccagggaacctcttgtccagcctgccatctgggtctattctttcctccctgtatgtttccagacctagggctggcagcagctcccttctattggtaccctcgaggtactgtgcctgccatgtcttcttgcttcatctaaaccctgcacattcctttgtaaaaagtggttttaattaaactcacctcaaattttccagtgtaagt

SEQ ID NO: 271280 - DNA, 498 bp, Homo sapiens
ctgtcagtttgctacataccttttacatgacagttggctattttagttactttttatgattatagtttatttctttattattttatacatgttctcattatccatttggctacatagagaatccaaattttgaatagtgtggtaaaatggaaggagccctgaatgaagacactgtaagaattgggttattctgttcctactagttgtgcagctttgagcaagtcccttagttttctcatctgaattttttttttctttttttgtcttccctacactgattccatgaatttattatggcaattatctagaaaaaaagaataatgcctacgtccttacaggattatggagatgtaaagagaatatataaaaatagtttttaggctgggcacggtggctcatgccagtaatcccagcactttgggaggccgaggcaggcagatcacgaggtcaggagatcgagaccatcctggctaacacggtgaaatcccgtctctactt

SEQ ID NO: 271281 - DNA, 524 bp, Homo sapiens
ggatcaggaaaagacctggaaaggagagagaattatctacggaatggagagtttcctcacaacagacagctttgccaggtcatttcaaaatgtatcaaataaatatattttgaagtaaaatacttggatttctttcagggcctcctgtcacattgctatcttattgctacaaaaagtctgttttgtcagtcttaagatctctgttttaatgttaatgctggtcagttgtgcctgaattccaaagagaggagagtataatgaagcatgtccgaccctcccttcccatcatggcctgaactagtattttaggtttctttgaaatcccctcggctgagagttgggggtccattcagtggttcgggggcttagaattttatttttgtttagaatatttattattcttttgtttacagcaagttggctgttttcccatattaatgtctggaagttttaaaatgttttttcatgcactgaccttctgccaggtatgtttagtatggatgtttctatgctgttgacaaaca

SEQ ID NO: 271282 - DNA, 377 bp, Homo sapiens
acatgtaatggacagaggtaatagcacctgttgtcaccaggtaccaccgaagacctggactgaacccaatagaaagtgaaaagtggctgaggattataaaagcagcaaagaccaggccttctcagagatgcctttggagactctgcccggggttgtgtcacaccttttcctgaactttggctcaattgaagaaggaaactttcaggggaattccaatagtaaacaacagaaccagcagttttacaataaactgcagagctccatttcaaaacacaaaaatagagcgtctctgcagtgatgtactgccttaaggaagggtaagatttttttcacggatgttaccaaactttaatgaagtacatgttgtccactccgtg

SEQ ID NO: 271283 - DNA, 543 bp, Homo sapiens
tgctaaatttcagatagtgccagtgccacacttgagttacagagctctgtcaagtatgaagttggctatagttatcagtgcaactactgatgacagactttctcattagctgagatgggatgaaagtgtttaactgactcagagtggtaggtgagctcaaataggaaagaaaccaatgtctggtatggatagcaaaggagtcaatgatcccatctttactaccctaaactgcatgacctcacattgtatttgagtgaccttggcacaatccacctgaaaatgaatgtttttttctactaatgaaactctgaacttacagaaaactatctactttcaggccaggcatggtggctcatgcctgcctgtaatcccagcactttgggaggccgaggagggtggatcatgaggtcaggagtttgagaccatcctggcaatatggtgaaaccccatctctactaatataattagccgggtgctgtggcacatgcctgtagtcccagctactcgggaggctgaggcaggagaatcacttgaaccagggag

SEQ ID NO: 271284 - DNA, 545 bp, Homo sapiens
tgttattttcccattcaaaaaaaaaaaaaaaacttgagttacagagctctgtcaagtatgaagttggctatagttatcagtgcaactactgatgacagactttctcattagctgagatgggatgaaagtgtttaactgactcagagtggtaggtgagctcaaataggaaagaaaccaatgtctggtatggatagcaaaggagtcaatgatcccatctttactaccctaaactgcatgacctcacattgtatttgagtgaccttggcacaatccacctgaaaatgaatgtttttttctactaatgaaactctgaacttacagaaaactatctactttcaggccaggcatggtggctcatgcctgcctgtaatcccagcactttgggaggccgaggagggtggatcatgaggtcaggagtttgagaccatcctggcaatatggtgaaaccccatctctactaatataattagccgggtgctgtggcacatgcctgtagtcccagctactcgggaggctgaggcaggagaatcacttgaaccagggag

SEQ ID NO: 271285 - DNA, 426 bp, Homo sapiens
aatggaaactaagtaacatgaattaacatagtccagggtcacaaagcaacatggaacaagaacctggatctgaattcagaggcagaatgctgggcctgagaatcaggagagtcaatggtattagtgcttgtccggaagccatcatgcttcaaaaccaagaagagctgattttccagttggagtctaaagaaatgagtggcagatgtgttcacagtactacaatccaaggcatgattttgtgctgtccttggaaagcaccaaactaaagaagatcctacagaacatagatgatcccatcccggaccatatcctcaagtgaccggctcctgtgtccacgtggccttgccaaaaggcagctagacgttctcagggatttcccagaaggcaaatattcctttcctcataaaatttgcgtatggtgctcag

SEQ ID NO: 271286 - DNA, 357 bp, Homo sapiens
cactatatctctataaatataaagaaagatttcagtaaaatctatattccttcacatttttgacaattaaatttgtataaagatgcagaaatagacacattttttgaagaaaaacatttggaaatataagcaacattcagctcatagatataaagaatttctcacagacataaacacggtccttaaggaaagctcaagggtaagccccagggaaggcatgtttctcaatgtggtcatgaaaaccatgcttgaaagtttccatgggatgtgggtcaactgcacacacagaaaaccaaccatgtcaagagaacctaagaaagtcaaaattggataagcagccctgcacagacaaaaaaa

SEQ ID NO: 271287 - DNA, 491 bp, Homo sapiens
atagggagtacaggcttgaatatgtttggcttagtttagattgtagattaccaaggaagaatggcaatttgtaaaacaaatttagctgctcagtatttttgagagaaaactgaagagtttttctcttgaggttttagaagcttttaagattattagctccctaaacagatatgcatattgtcagtgatatcctaacattttggaggtttaatactattaggttaattataaccaagaaatgtagaatgtagaatgacgcatattttatgcctgaaatttgcttgtttggaaaaaatgtaaaatttcttatgtgggtgatttcaaaaatttgatttgaaatatataattaaaaagttgctatattggcctattttaaattgctatcattgatgggcagcatagtcaatttcacaaagaaggccaaattgtgcaaatactaatatagtgggtgatccctccttgggagagttacaaacctcaatcacaaatgc

SEQ ID NO: 271288 - DNA, 444 bp, Homo sapiens
tggaggcagagttttgcccttgtaccccaggctggagtgcagtggtgtgatctcagctcacagcaacctccgcctcctgggttcaagcaattctgcctcggcctcccaagtagctgggattacaggcgactgccaccacacccggctaatttttgttttattagtagagatggggtttcaccatgttggccagactgatcttgaactcctgacctcaggtgatccacccgccttggcctcccaaagcgctgggattacaggcgtgagctgccgcacccagctgtaaactggatttctaatggtagatttttaggtattaacaatagataaaaagatactttttggcatactgggtattgggatggggttagaacaggtgttctacccgacatttacttaaaatcgccctcgaaatgctatgtgagctgtgtgtgtgtgtgtgtg

SEQ ID NO: 271289 - DNA, 650 bp, Homo sapiens
tgaactaaaaccaaaaaaaaaaatttaatgccaaagagcagaaaacaacttacagatcaatgagctctagagggaagttttttccctcactttgatcttttccctgaaaatgacttcttgcttatgtttgacacaaaggaggaaattccattgaaaataagagttttcttggttttaccaagaggctgatccttttttccagtctcaggttttgcccattttgccacaaactgacaaaaattaacaaaaagaaagatactaaagccctttgagtttggcatcttgcagccccatttgttaaaacctgcaaacatttccaagtactgtaattagtacattcattattgaaacagcactttacatttaatgtgccaaacataacttggtgagcaaattaaacttacatacgttttaaaaccaaatagacaaagtattatatgtctaatctccccaaaacttcaaagctaattttttaatatttaagtttttaaaactccttattcttctctctcttgttcttcctgtctgctaccaaataaaaaatgtctgtccacataccatccaatgctcttgtcctgtgtagactggaacccaagcctcttaagaccaaaactatctgaaatgagttctggcttaggaaaaggaccagc

SEQ ID NO: 271290 - DNA, 604 bp, Homo sapiens
aaatatagttaagtaattgttaactcgggcattgattgaaaggtgtcctttccatcttccctctaaaagcctcaaggattatttctcaaactcctctctccattaaactaataaaacaaaacaaagccacttttataaaataataatactcaatggaacaggctgtgagatgccaagcaatttaaattctaacagtatattttaatgatgcttttctattacagggaaacaaggcaactcagaggactgagagactcaggacttccagacagaggatcaggcgtacctcatgcatgggtgttttggaagaaggccattttgaaacctactctgtatcattacagactttcagtgaattaatttagaataaatccacctccttccctgtatgtggtagaatttcactgggatacaacgtgaggacagagatttgaaccctcagtcccacttatgatgcggggcttcaggggcaccacggacatgctccgcattcacccatctgtgggggaggactaaggaagctgcgctggtgtgtgagaaagtaatgggctcttttaagcccttttacttaaagcaataaaagaataactgcgtcatctgctgg

SEQ ID NO: 271291 - DNA, 551 bp, Homo sapiens
ttgtcaggcctcatttggtcagaagcatgtttgtttctcttgtcagcttcttgattggtttctttccagattctgcagggcagccatatggtcatttctgcatgttttctagattgcttctgtggtagggttccaggtttggttgatgagtatttcagattctacccacactgagagagcttcagttttgctctttggttttatttcagatagcatattcacaacttgtgtccttcctgtcacttatctgaagttcatttgaatttggtgattttattttacgtggcctatgtatttggctaatgtttcatcattttatatgtcaaggaggaagactattaatggctgttgaagtgcttagattatgctaacttaggaaaactaaatctagtaataattctattggatgataaatattaatgtacattagattgggtagaaaaacataccagtcacctttccatatcttgtattctcagttattttgttacctttttttttaaatttattttgaaaatcattgtctataactgcaaggcaaggagaaaatt

SEQ ID NO: 271292 - DNA, 502 bp, Homo sapiens
ccatctgatccttccttgcctagtggtctcctttagcacaggacagcagagcattctctctgtagctcattcagaaccctttcactctgaactgagagataaagaataagatgtcagatgtgtttctgcattgggataagtaaggacaacgcatatcctgtgggaaggatagcttttacacccagaactgtctgagattttacagttaagctacatcaaaaacattaaaaacagggaaacagaaatatcaagtaagaatgaatctagtagaaatatctcaaaagataataacaatatgattatatatttgtactttgtgttaattatttgtgaaatatttttcttgcatgaggcaatagaggcaactcctgcttctttgagcagaatgagaatttagtttaaagatataggggagaaaatagaataagtactgtggcattggcttggaataggtgttattgtgagtatatgactttcattaaaataagaaatatgtaaaagt

SEQ ID NO: 271293 - DNA, 510 bp, Homo sapiens
tgtactctgaaactagactggatcagtactttgagagcagatctatcactgggtgaagattcgtattaaccaagctcacaaggctgatgtataagccagaaactccatatcttgagtgccaaaagtaacaacgaaccacaactgccacaggaccctggagtgctcagttcactataatcagtgtaggctgatgcactggggatgccaagccgtcatcggaacgttgcatgatgaacatgtaatcaaggcttgggaagtctgcagaacaagccatggttcaacatcagcaggccatgatgggatggactagcaagaacagtgctggtcctgttggagaaccaaagggccctggtgggcagccagagtctgaatgggcaccaccagcttctgcttcaacttgcctttcagaagtgccctggctggccagcaacttctacacaatctttctctaaattgaactcagagcaattaattaggttttatattactaaattacaatcgcatttcagc

SEQ ID NO: 271294 - DNA, 450 bp, Homo sapiens
gggcatgttaaggcttgacctccccgtcagctggggttctgttgacttccaggcaaacgcctcttgccaagtcctccaggagcttccttagctccaggagttcaggacggggtggggaggggtcatctgcccttgaaccctggcaggaggacagaggggagactggtttcgggaagagtccgtgtttgtgaatgggaaggcggtgcgtcgcctggcctcccacgcctcctcccctgcgggcttaagatgaagcctcccaggaagaggaggcggcccgggaggctgaatccacccagctatgtgttaccttggaaaccacacacttgtcctcgccctaggccatgtgaagtgagggggccgtggacacgcttctcaggaagcttccagtgtaactcaggatacaaaaaatcacagtcccagcatgggcagctgagagaatgaaaatgttca

SEQ ID NO: 271295 - DNA, 423 bp, Homo sapiens
tggatggttttaaggtatgttttggaggtaaaattgttagaagttggtaatgaattagatactggaaggttggagcaggagaaggtatgtcaaggatgattggtttctgtcttgaacagttatgtgaagggagatgggaaagagcggaggaagaaaaaatttgtaatataagatgaagcattcaggtttgggtacatttaggtttgagatccttgtgagacatccaaatagagatgtcaaagagcaaggcggcttaggaatctcgagctcagaacagaggctgtaagtagacagctgtgttctgtcaggtatgaaaatagatttcaaagccatgggaatgagtgagcttgcctcaggagaaagtgtatcatggggagagaaggcccatgattgggctttgggacccctgacatttagagattg

SEQ ID NO: 271296 - DNA, 546 bp, Homo sapiens
gaaggccactgaaaggggaagctaaaagcattggcttcttaaagatcccaagatgaagattttcttgaaagaagggcatttccgagtgtcgtataacagcttgcttttgactcctcctggcccccagggaagccattaagctggaatgtatcagtggtggaatgatccgttaaattcaaggtgaaaacgtcacaccattcaccctgtcacttgtatcagaaatctttaaaatagaacataagagagtctttatctcaaattctgactcattgggtcattttactcctggtgttatgtagtggttactagaatagaatgcagagttagaattcctgtgggaaacgtgcttttctgaggatacccctcaggtaagtgttctttgataataaatgacagggagcaagagggatccgagacccttgggcttgcaagatttccatcaaaccctcaaataaaaggaggcatcaactgttgtataaattcctccccacctaatttccaggtgatgctctcaaagtattctggcaactttctgtgtaaacccca

SEQ ID NO: 271297 - DNA, 433 bp, Homo sapiens
gccctaatccagtaggactagtgtccttataagaagacgagattaggatacaaacaccacaagggacaacgatgtgaggacacagggagaagatatccatctaggagccagggaaagagtcctcagaagaaacctatcctgcccactccttgatctcagacttcctgcctcctagaaccgagagagaataaacttctgtagtttaagctactcggtttgcggtctcagtcacgggagtccaagctgatgatcacagttgtgatgagaactttacaaattgaatcatgggaagtcttgcaatagtgagatctacgacctggtagatcctataatcctataatctgagatgctgattctacaactctgagctgctaacgctttgcttctgggtcacagaagcttctggaaataaacttgtcccacaaactgataa

SEQ ID NO: 271298 - DNA, 410 bp, Homo sapiens
ttaactcagcactaaaaccaaaggtcttagagcatctgacccctgctatctctctgacctgatctcctgccactctaccccttgcccattatatcccagacatgctggccccctgattattcctctgtactggccagcgtgcttctgattcaggccctttgtactttctgttccctctgcctggaaatcttttctccagttgttcacacggcttgctccctcacttccttctggtctctgctcaaaggccgtattatcaatgtagctttcctggaccatcctatacaaaacagcaccccattccccacaaagcagcagttccaatattcctcagcagtttctctttatctacagcactcatgttatattctttttattgtttattatctgtcttctcctaccttgaggtc

SEQ ID NO: 271299 - DNA, 463 bp, Homo sapiens
agaaaaaatgaagactggcatgctgtgtttatttataccagctctgtgactttgagcaagtcccccctgccttctgggacacagctccctcctctgatgaagcggggtgggagggccaatggtctgacattgaaattatgggctgaatgtaatgaggataaagtcaggcaatcacagagcgccagcccccatccagagttaagtgcttaataaacggtgactgatggcaggttctcagggtgtcccaggaacttccccttcgctggtggttctctaccctgaggcagagtagaatcaaggacttaactcagaccttcactcagaaaaggcctttctgcaggtgctgggctaattctgggatgtggttctctgatgagagaacccagtccacacttggaattcccagaggaacagataccgtggcccttgcacaaccttcctcaaatatacactgtctcagtgg

SEQ ID NO: 271300 - DNA, 553 bp, Homo sapiens
gcctgtgcaggtgtgaaggttaaaaaaaaaacacacaaaacacacacacacaaaaaaaacaagaagcaataaaagggagaatccatgtatttgggtctgatcatgagctcacgattctgtccctttggtctgacaactgtccttgtgttgtgcctggctgtctccattcctgcagctgaatgttcttgatatctggtagacaaatgctcacaagtggctcttcaagagtgtgttactccacttggccttcagaatctgcttctcaacgttcacctccccaaagagaaacatttgcttgggttttgactgggcattaacatatttgagtcttccatgggtttctatttatttaggtcttcttactgtcctgtcgctaccaaaaaaattccttaaaaaattagctaggcatggtggtgcacgcctgtattctcatcaagtcaggaggccgaggtgggaggatctcttgagcccaggaggttgaggctgcagtgagccatgattgcacgactgaactccactctgggtgacagagtgagatcctgactcaacaaca

SEQ ID NO: 271301 - DNA, 654 bp, Homo sapiens
tccccctagcagcgcaccctggaaccccccgacaccgcatggcaccgcacgcctaccttgtccacccagattctcgcgccctcggtccactccgacaactctcaggagcgcatccaggcccggcgcctccgcatcgctgcgcgcttagaagcccggaggcggctgacctgaagatgacaaaaggccagaagactccttggcttacttcgtccgaccacccggcaccctcctcctcatgtttatggttccaacctgacaacaaccctggaccacagagacctcttcctggacgactgccaacttcaggccagtttggaccggttccctgagactgcacagatcctggacttgtgccctaagcatcacctttttgcatttatgacccaattgtagtacatttaaatgttaaatctccaccccaaagtgaacatgagtagcatattgttgtatgttccgtgcacatgtaagcctaatgcacgtgcgtaatgagttttctccgtaaatattcacaaccttctcctatatcctgtagaatatgcgtttcctacctcctcacctagcagaaatatctgccttattttctccccttcaaagcctgcttctcagtctcagttgaaagcttgcttcctgcctgcaggttgtgtcctttagaaa

SEQ ID NO: 271302 - DNA, 2555 bp, Homo sapiens
  misc_feature (15)..(15): n is a, c, g, or t
  misc_feature (18)..(18): n is a, c, g, or t
  misc_feature (21)..(21): n is a, c, g, or t
  misc_feature (24)..(24): n is a, c, g, or t
  misc_feature (36)..(36): n is a, c, g, or t
  misc_feature (1321)..(1321): n is a, c, g, or t
agcctatttggttcncantantanaacacgctcgcntttaaaaagcaggctgtcggtcggaatttgggatcacctgaggtctggaggtggtgcggagggagccgcctagggaccaggactcctgccatgaatccgccggggtccctagaggccctggacccgaacgtggacgagcacttgtccacccagattctcgcgccctcggtccactccgacaactctcaggagcgcatccaggcccggcgcctccgcatcgctgcgcgcttagaagcccggaggcgggaagcacttggagaatatttagatgggaagaaggagagtgaggaggatcaaagcaagagctacaaacagaaagaagaaagccgattgaaattggctaaacttctgctctgtggcaccgagttggtgacaaatatccaggtggctatagatatcagagagattcacaggagagtcgaagaagaggagataaagcgtcaaaggattgagaagctggagaatgaagttaagaccagccaggacaaattcgatgaaatcacctcaaagtgggaagagggcaagcagaagagaattccccaagagctgtgggaaatgctcaatacccaacagctgcactgtgctggactcttagaagataagaataaactcatcagcgagttacagcaggagttaaaaacaaaggatgaccagtatgtgaaggatttgaagaaacagtcagatgacatctgcctgcttctggagcggatggaagaacaggtgaagaatgtgatgaaaacctttcgtgaggagctctataacattgagaaagcatttgaggtggaacgccaagagctactggccagtaataagaagaaatgggagcaagcccttcaggctcataatgccaaagagctggagtatcttaacaaccgcatgaagaaagtagaggactatgagaagcagctgaacaggcagaggatctgggattgcgaagaatacaacatgatcaagatcaagctggagcaggatgtgcagattcttgagcagcagcttcagcagaggaaagcaatttatcagctaaaccaagagaaattagagtacaacttgcaggtgctgaagaagagagatgaagaaagcacagtaattaaatcccagcagaagaggaagatcaatcgcctgcatgatatacttaacaatctgagatcaaaatatgccaagcaaataaagcagtttcaggaggagaaccagtctctaacctcggactacaaacgtcttgtgatgcaattcaaggagctacagaaagccatgaggcattttgctcttattgatgatgagaagtttngggagatttggctgatgaatgaagaggaggcgaaggacctaatagccagagcctttgatgtggacaggatcatccacacccatcatctggggcttccctgggcagcacctgatttctggttcctgaacaatgttgggcctatttctcagcagccccagaagtccgccacacagatagtagaagaaatgcttatgcgctcagaagaggaggaggcagaagaggccgccgcggaaccagagtcctacctggatttgccgaagcaaatttctgaaaaaactaccaagaggatcctgatgctcctgtgtgacgagtcggggttcctcatagagagcaagctgctgagccttctcctgcccctggagcagaatgaatgctatctgctgaggctggatgccatcttctccgcccttggaattgaaagtgaggatgacttgtataaactggtgaacttcttccttaaatatcgagctcaccgtttatcttccagcctccagatcaagccctgcagtcaggcgagcatggagaaggcgagcatggaggagacaagcacgaggtcagaattggagctggcagagcagacggagatggagggagaaaaggaagaaagcctggtggaaggggagaaggaggaagaggaggagaccccaccctccccctgggtcatccaccccaatgatgtcctcaagattctggaggccttcgtcatgggtctgaagaagcctagggactcgcgggccccgctgagggtacagaagaatgtgcgtgacaactccaaggactcggagtactggcaggccctgaccacagtgatcccttcctccaagcagaacctctgggatgccctctacacagccttggagaagtaccaccttgtcctgacccagagggccaagctgctgctggaaaacagttctctggagcagcagaacacagagctgcaggcgctactgcagcagtatctgaactccaagatcaactctgaactgcaagttcctcccactcaggtgttgcgggtacccacaaaatgagctggaccgccaaaggctgatgtgttagggctggcctgatgctggtgtctgtgccggagccagctcatatcacccactgggccgcacctgggcctgctctctggattttccagggctgtctttatagcctgtcgaaataaggagccagaggagttacctgtgtcctgcattatgattaaagccttttaaagttgaaaatgaatctc

SEQ ID NO: 271303 - DNA, 826 bp, Homo sapiens
  misc_feature (15)..(15): n is a, c, g, or t
  misc_feature (18)..(18): n is a, c, g, or t
  misc_feature (21)..(21): n is a, c, g, or t
  misc_feature (24)..(24): n is a, c, g, or t
  misc_feature (36)..(36): n is a, c, g, or t
  misc_feature (753)..(753): n is a, c, g, or t
  misc_feature (757)..(757): n is a, c, g, or t
  misc_feature (761)..(761): n is a, c, g, or t
  misc_feature (792)..(792): n is a, c, g, or t
agcctatttggttcncantantanaacacgctcgcntttaaaaagcaggctgtcggtcggaatttgggatcacctgaggtctggaggtggtgcggagggagccgcctagggaccaggactcctgccatgaatccgccggggtccctagaggccctggacccgaacgtggacgagcacttgtccacccagattctcgcgccctcggtccactccgacaactctcaggagcgcatccaggcccggcgcctccgcatcgctgcgcgcttagaagcccggaggcggctgacctgaagatgacaaaaggccagaagactccttggcttacttcgtccgaccacccggcaccctcctcctcatgtttatggttccaacctgacaacaaccctggaccacagagacctcttcctggacgactgccaacttcaggccagtttggaccggttccctgagactgcacagatcctggacttgtgccctaagcatcacctttttgcatttatgacccaattgtagtacatttaaatgttaaatctccaccccaaagtgaacatgagtagcatattgttgtatgttccgtgcacatgtaagcctaatgcacgtgcgtaatgagttttctccgtaaatattcacaaccttctcctatatcctgtagaatatgcgtttcctacctcctcacctagcagaaatatctgccttattttctccccttcaaagcctgcttctcagtctcagttgaaagcttgcttcctgccnctgnccanggttaagtgctgcggtttaaagaaataaagnttctctttagtttcgggggggggggtgggggcgc

SEQ ID NO: 271304 - DNA, 396 bp, Homo sapiens
ttatgggcatgaccttgtttctgtactcccagcctccaaccagcaagaaaatgggggtctcagtcccacagccacaaggactgggattctgtaaatgccccagatgagctgggaggcagattcctccccagagcctgcagatggagttcagcctgcccctgacaccttgcgtgggagacactaacagggagaagagctgagcctcccccagccttctgacctacagcaccatgtgatcatgaatatgtgttattctaagccactaagttggtggtaatttgttatatagcaatagaaaacagatgcattaagtttgtctacaatgcccatgcctgcagtcatattctttggcttcctagaaggtgaccagcaatacatgtcagagtgtacaattag

SEQ ID NO: 271305 - DNA, 327 bp, Homo sapiens
agataattattatttttgattgtttgtattgttgttaataggtaaataggagctataaggcaaccaaataaagatatcttgaaagcaaaaaggtctaaggtaatgagatgcttgttcttctcatgcagatctgtgttaaatccttcatttttgtaaagccttttcatagaggcccactggacatgtaagatgatgatatttcaaagctggagaggtagcactatttctaaattgggaatacatgcctggctgcttcaaatattaatcataaggcagctatcgaattgacaagaaactgaaaactattgtaatcccaaacatgcttta

SEQ ID NO: 271306 - DNA, 932 bp, Homo sapiens
aagagccctgaggaccaagactggaaggcagagaggatgtgacatcaggtgggatggctggggacagccaggtattcacaccacagttaggatcttgtcttgcatctccatggaccatgaacaagacttgtttgtacagaggctgtaaactgctggctatagtaacagaggctagagaagcagcaagagcgtgagccagcttacatgtacatggctgtgctattatctgggcaatggtgccctgaacagggggtgcggcgcctgtggtcccattacaagtggctcacacttctaatcccaacactttgggaggctgaagtgggaggatcactttggcccaggagtttgaggctgcagtgagctatgattgtgccactgcactccaggctgggtgacacagcgagaccctgtctctaaacacaggagaaatcagaatctgtggacgtccttgcatttattggacactctagtgtttggatgttttgcattgtgcagtcagggtttgtcttttcagcggttaggcttctagaggtgttattaagccctggaggagggcagaaatgagatgcagatgcctgttgaggggcaattcatggctggggaaggagggatgttgggtgaaggagagaattcactcataatcttcccacccgctcagatccagctcagaggaaagtccctgaaaccgcaggagacaactctgatgttttcagagcatggggagagcacggtggggtgatctggagacacggccagcagagacttggagccaagattcctggatccccaacaaatcactgaattcaggccaggcacagtggctcatgcccgtagtctcagcactttgggaggccgtggtggaagggtcgcttgagcccaggtgctcgagaccagcctggggaatatagtgagacctcatctttacaacagca

SEQ ID NO: 271307 - DNA, 471 bp, Homo sapiens
ctttgcagtggggaggagcctggcctctcctttcccagggtgtagtacctgggattcaatttgtgaggcgggaagcgcactagcaggattctgactttgcagagtgtccttgtttccctttttttcctttttgttgaataaatcttgtttttctcacccttcaaattgtctgtgagcctaattttttcgtggttctgtgacaaggaccttgtctttagctgaactaaggaaaattcctgcagcaataaaacttctggaatgaagtttttgtttaggaaagaaaacaccaacagcaaaacatacaaattgccagcttaaaaaaactcataatatgcaagaaattatttcaaaatcaacttgaattttttaaaaattggcattttaaatctataatctatataaaatttaaatttatatatttaaatatataatctaatcatataaatctataatcatgtctaagtgtatcag

SEQ ID NO: 271308 - DNA, 951 bp, Homo sapiens
actttgtgggtgcttctgcccttccacgtagagcagctgtcaggaactcgggacactttcccagcccaattcacagaaggaaggccagaagcttaacccagtagtgtctgagtacctgcttggcaaagccttctacggccaaaatgaaaaccctgaatccactaccaggtgctctaggtaagacaagacaagccaaaagccagaaataccatctctggacatggcctcaaagtaagagctccgccagcccaactaaaagttaaaccaactcctgctctggaaaacttagtacccgaggttgaactgcccagtctctttcctgctctgctggccaaatccatggcaggtccaagtcacatgcctcttttcgtgaaggaaaaatcatcagcacctcctacaaaggtcttcctaatcacttcattttgggggtaggggtgtggattttaaaactttgaagactatgtcacactcaccttgcccctcacctctggccttgacaaccatcttgctttacaagtgaattccgccaggtttctaaagatggtcacaacacaggtgccaggaatgccttcctgggtacatggagttcccgcccacgaccacagaagacattacacaaaactgcccaaaaagtatgaaatggcaatctgacaacaacctgacttaaaagccagtaaagacatcagaaaagatgttggtgtgcagcaagaaacccttcgcagcacctcacatgggcaaaaccaaagaggtaagaccctgatcttcctaatggcagacagtgaactacgaccaccccagaaatcacataaaagcatagaaggtaatttctattcaacaaataattactggcactcacagagaaaagcatggtgggacacaaattaatcaggcaaggcactgccctcgaggcactttcagtcttggcggggagtagtggagggcagaagaaaa

SEQ ID NO: 271309 - DNA, 182 bp, Homo sapiens
gtctaatcacatggttctcctcctgttttccatcatttcctgttcatctttaaggttccagtttttgtgtctctgcctggagtaaggaacagatatattatttagtgttttgaggtgaacctaattcattaattgtgttacttggtaagaaattgcatatattgcatataaacaataaatgt

SEQ ID NO: 271310 - DNA, 432 bp, Homo sapiens
tgcagacattgccaaacatgctctgcgtgactgccctagagagggcagttgagagaatgggaaaggataatgtgtgtatttgtgaacagataactttgagttaatgaagagatgaaatggctaagtattatcattaaggaggaatttttcatgttttccattatttaaaaaacattggcacagagttttcaaatgttggactgcactgaggtctaggtttctcccctttagtgtttattttctttgaccccatatgcacataataaaaagactgagtaagaatggaatgcttgtaaattagtaatgctaatctagctacatccaagggcttgaaactgctctacaaatatattttcactgtaagtttattttgtttccttcaacattgactgtgttctttttcaaataaacggaccagaggcataataaaat

SEQ ID NO: 271311 - DNA, 1818 bp, Homo sapiens
  misc_feature (1802)..(1802): n is a, c, g, or t
gcttattataagaacctcctagtgtatttgtgaattgaagagctccttcttatttttcttaactaaatttgactagataattgaaattctaagtagaaacttcaatcaaagcaagatctatagttacaagttaagatgttaattataatccccaggataatcaccaagaaaataaataaaaataaaaaataagcagcaaaggaattaaaatgatacactagaaaatatgtttttaacatataggaaggcagtaatggtggcacacagggacaaagatgacacaggacatatagaaaacaaacagcaaaatagccattaaacataagtggattaaacactgcaaccaaaaggcagagataggcagaatgaaaaaatacatgaaccaagccaggcacagtggctcatacttgtaatcttagcactttgggagtctgaggtgagcggattgcttgagcccaagagtttgagaccaccctgggtaacacagcaaaaccctgtctctacaaaaaatacaaaaattagctgggtgtggtgacgcttacctgtagtcccagctacttgggaggctgaggtgggaggatcacctgagcccaggatgtcgaggctgcggtgagccattatcgtgccacggcactccagcctgggtgacagagtgagatcctgtttcaaaaaaaaaaaaaaaacaaccatgatccatctatccatcttatatgctgtatataagagacaaattagattcaaaggcacaaatagattgaaagtaaaaggaagaaatatgatacaccatgcaaacagtaaccaaaacagaacagaagtgaatgtagtaatatcagacaaaatagactttaagacaaaaattattagagacaaggaagaataaaggctcaattcatctggaattcataacaatcataaacatatatagacctcgtacagaggcccaaaatatacaagcaaaagttggcagaattgaagggaaactaacaattcaacagtaaaacttgggactgcgtgtggtggctcatgcctgtaatcccagcactttgggggacttgaggcaggcggatagcttgagtccaggagttcagggccagcctgggaaacatggtgaaaccccatctctatttatttaatatataattagcaaaaaatgttggaaaattcaatacccaactttcaatgagagatagaacaactagacagaagaccaacaaggaaatataagacttgaacaccactatagactaactaaaagacatctatgatgcactccaccaaacagtagcagaatatatatatatccttttcaagtgcacatgaaacattctccagaatagacgatatgctaggtcaaaaaacaggtgtcagtacatttaacagtactaaaataatactaaatacgttctctgagcacaatggcatgaaattagaaataaataacgaaggacatttggaaaattcacaaaaagtggaaattaaacagaatacttgtaaataaccaatgggtgaaagaagaaatcatgagggaaattagcaaatactttgggttagatgaaaacaacaacaaaacataccaaaacctatgggatgcagctaaagcagtatttagaatgacatttataactgtaaacatctatattaaaaaagaatgatagtgaatcaataacctatatttctgccttaagaaattagaggccgggcgcggtggctcacacctgtaatcccagcactttgggaggcccaggcgggcggatcacgaggtcaggagatcgagaccatcctggctaacatgtgttatggtnaaacctcgtctctact

SEQ ID NO: 271312 - DNA, 344 bp, Homo sapiens
gcagctgcctcagtgacgactgccggcatcgcggcgacctgaggagatcaagccgcaggccccgccgtcgccaccactcccgccagtcttccttctccgctcccggccggggcgtcaggaatgggccccaatcgccgtgggccccgcaccctgcgtcgcccgtaggccccagtagccggaggccgaccggcctcccactacccctcgccctagccaagccgtccccaccccaaatccccgggaaggaagatgagggagacgggcccggcgcttagcagccagagcagcagcagcagcagcagcggtcgggggagggtgtttcgccgtttcctctcagccgccag

SEQ ID NO: 271313 - DNA, 158 bp, Homo sapiens
atggcaagaacttcaagtctctaaagaaagaattgaagaagacctcagaagatggaaagatctcccatgctcatggattggcaggattaatatagtaaaaatggccattttaccaaaagcgatctacagattcaatgcaatccccataaaaaaaaaat

SEQ ID NO: 271314 - DNA, 980 bp, Homo sapiens
ggggcagacgtgggacgggaaggacggctgccgggactggcgcgcggggacactgggccgacgcgtggagtagcggggagagcgggaagcctgagggggcggggccggcgcgaggccgtgggtgcggcacgaggatgccggcggcgggacagcgcccgtaggcagccccacgggcagggcgcgcgggcggggcggggcgggccgggccagaggagctcccggcatgtcgcaagggctcccggccgccggcagcgtcctgcagaggagcgtcgcggcgcccgggaaccagccgcagccgcagccgcagcagcagagccctgaggatgatgacaggaaggtccgaaggagagaaaaaaaccgagttgctgctcagagaagtcggaagaagcagacccagaaggctgacaagctccatgaggaatatgagagcctggagcaagaaaacaccatgctgcggagagagatcgggaagctgacagaggagctgaagcacctgacagaggcactgaaggagcacgagaagatgtgcccgctgctgctctgccctatgaactttgtgccagtgcctccccggccggaccctgtggccggctgcttgccccgatgaagccggggacactcctctgcccagcaaggagccttggtcattttcatacctgggaggaaggcttttccttcacaattgtatacagggggcacctgtggccaggcctcctcctgggagctccaggaccagccagctgtgttccctgcagactgggctcagcccgacatccaacaggcgccaaactcacagagcccttgtgcagatccagcatggaggccaccctcaggagtgacttctcatccaccctggcagctagtaggttctgctgttatgcagagccatttcctctagaatttggataataaagatgcttattgtctctcccttctccagttctgggaatttacaggcacaatacacttccttttcctgg

SEQ ID NO: 271315 - DNA, 606 bp, Homo sapiens
agttctacgcctctgtaaaccctgatggagaggaaactgaacaggaatatgagagcctggagcaagaaaacaccatgctgcggagagagatcgggaagctgacagaggagctgaagcacctgacagaggcactgaaggagcacgagaagatgtgcccgctgctgctctgccctatgaactttgtgccagtgcctccccggccggaccctgtggccggctgcttgccccgatgaagccggggacactcctctgcccagcaaggagccttggtcattttcatacctgggaggaaggcttttccttcacaattgtatacagggggcacctgtggccaggcctcctcctgggagctccaggaccagccagctgtgttccctgcagactgggctcagcccgacatccaacaggcgccaaactcacagagcccttgtgcagatccagcatggaggccaccctcaggagtgacttctcatccaccctggcagctagtaggttctgctgttatgcagagccatttcctctagaatttggataataaagatgcttattgtctctcccttctccagttctgggaatttacaggcacaatacacttccttttcctgg

SEQ ID NO: 271316 - DNA, 590 bp, Homo sapiens
atgtgtatgtgtgtaagagtgtgtgaatgaatatgagagcctggagcaagaaaacaccatgctgcggagagagatcgggaagctgacagaggagctgaagcacctgacagaggcactgaaggagcacgagaagatgtgcccgctgctgctctgccctatgaactttgtgccagtgcctccccggccggaccctgtggccggctgcttgccccgatgaagccggggacactcctctgcccagcaaggagccttggtcattttcatacctgggaggaaggcttttccttcacaattgtatacagggggcacctgtggccaggcctcctcctgggagctccaggaccagccagctgtgttccctgcagactgggctcagcccgacatccaacaggcgccaaactcacagagcccttgtgcagatccagcatggaggccaccctcaggagtgacttctcatccaccctggcagctagtaggttctgctgttatgcagagccatttcctctagaatttggataataaagatgcttattgtctctcccttctccagttctgggaatttacaggcacaatacacttccttttcctgg

SEQ ID NO: 271317 - DNA, 346 bp, Homo sapiens
gcaaagatgttagcggattactttggagggaaacaaaacaaaacaggaagtaaggacgtgagggaagaaaagaaatggagcaagaacttgaaagggaatcagggctccagaagaggctctgttttgttttataatgaaataaacttgagcatgagaagcactcagagaagtcggaagaagcagacccagaaggctgacaagctccatgaggtgagaccgtggtaggggcaagccaccttagagccacacagcctctgccttgcacgggagtgggggtgatgactgttctctttatcacgatttcagcaacactcatatctaatttctgccaggtccttccagccca

SEQ ID NO: 271318 - DNA, 440 bp, Homo sapiens
ctgggtaatttatagaggaaagagttttaatggactcacagttccacatggctggggagacctcaatcatggtggaaggcaagaaggagcaagtcatgtcttacatggatggcagcaagcaaagcgagagcttgtgcagggaaactcccccttataaaaccagtggctcacgagctgtaatcctagcactttgggaggccaatgcaggcagatcacctgattgtcaggagctcaagaccagcctggccaacatggtgaaaccctgtctctactgaaaaaaaaatacaaaaattagccaggcatggtggtgtgtgcctgtaatcccagctactccagaggctgaggtaggagaattgcttgaacccgggaggtggaagttgcactgaaccgagattgtgccattgcactccatcctggtgacagagcgagactgcatctca

SEQ ID NO: 271319 - DNA, 506 bp, Homo sapiens
aatcagctgccagcgagccaagagaaaagcaggcaggagaagatggaacaacacacttgctgagtcttccggcctttatctttctcccatgctggatccttcctgccctggaacatcggactccaagttcttcagcttttggactcttggacttacaccagtggtttgccaggggctcttggggcctttgaccacagcctgaaggctacactatcggcttctctatttttgaggtttgaggactcaaactggcttccttgtccctcagcttgtgattgtgggagtcaatactccttaataaactccccttcataaatattaatgcacctatcctattctgcccctctagagaaccctaatacactcatctacaagccaaggagagaggcctgtaacaggtatctcctcccagtcctcagaaggaaccaaccctgccaacaccttgacttcaaccttctggcctacagaactatgagacaataaattttgttgtttaagctacccaa

SEQ ID NO: 271320 - DNA, 223 bp, Homo sapiens
aagggtatttggtcagatgtgcccatcactctggcagcagagtaaaggataggttttatgagagagaagaccattcagatattccagaaaagaaataagagccttgggccgggtgtggtggctcacgcctgtaatcctggcactttggaaggccgaggtggtggatcacgaggtcaggagaccgagaccatcctggctaacatggtgaaaccccgtctctact

SEQ ID NO: 271321 - DNA, 91 bp, Homo sapiens
taagtcacagaatccttactctttggaatctaaccacatatataaaatgaccaacttacaaaaacatacattaaaggacttttaatgtatc

SEQ ID NO: 271322 - DNA, 1214 bp, Homo sapiens
gcctgtagtcccagctattctggaggcagaggcaggaggttgcttgagcccaggagtttcaggctatagtgttctgtgatcccacctgtgaatagtcccagctattctggaggctgaggaagagggttgcttgagcccgggagtttcaggctatagtatgctgcgatcacacctgtgaatagtactgcactccggcctgggcaacaaagtgagaccctgtctctaaaaaacaatcatagtgataatacaatatttttttaaaaaaggtaagtttagcccagtaatagttaaggtatttcccaaggtttcacaaatagagagttataggggtaaattctagtaaagctgtttgtgacatgccttgtgaaaattattcagtcacttttataaccccatggaaaaatgtaggtggatataaaccaatttttttctttgctcagagtgcatataaattattattcttgggcgtgtaaaagtttttcttattgggcaacaacaacaaaaaacaatataaaaacagttgatttactggtgtcactgtgtttcattcatgcaggaaacatgttgagtgcttattttaatttattgatagggtttctctgtcgcccaggctagggtgcagtggtgcgatcacggctcactgtagcctcgacctcctgggctcaagtgatcctcccactttagcctcccgagcaactgggaccccaagtgtgtaccaccacacctggctaatttttaaattttttgtagagatgggggtctcactgtgttgccttggctggtcttgaactcgactcaagcaatcttcctgcttcagcctcccagagtgctaggattacaggtgtgagccatcatgctgggctttttagtgcttactatgtggcagcctctgctagatgctagggatagaacgatctaccaagagacagtatgtgtacatacctttaaggagcttacagtctggtaggaagcataggagactgttacaatataggataataataagtgtgacgatggggtgaagtgcattggtactaaagtagcctgaaggggagcaactagccaggccatggaagggtcggggaagatttaaccaagggaagtaacatacatgttagcacagaccttaaggacaagaaagatgtgggcagttgagagtcaggaagacaggagctggcacctgtaagtgcctagaaccaaaagaatcatgagtg

SEQ ID NO: 271323 - DNA, 356 bp, Homo sapiens
taaaatttactcaatttaaaatgtctgttatgggtttttttcttacattgacagcatctgctaacgtttaccgcctcttaagcgttggcaaatgataaaacatcattgttgctgatgtgtattacctcatttaaccttcacaaaaaccagaagatataaatatcattacttctgtattacagactaaagtttaaggagatttcataacctggacaagatcaccaagtaaatggtagggtctggctttgaacctaaaccctctggttccaaagtctcatctcttaaccactactatacactctcttcaaaaaacaatacactaaaatgttaacaatagaattactctaagttttact

SEQ ID NO: 271324 - DNA, 422 bp, Homo sapiens
gaaacgtccacgggcgaaggctgcgggggatgggtgcctgtctggtcagtgctccaagggaagcccagggatgtttggtgattcagcaggtggcagccttccagctctgaagacatgccgtggccaagcaaagaagcaagcaagcaagcaagcagcagcctgtgcctgctgtcggaggcgccagctttgggggaacctccaggtgctgccttctgcctgtggcagctcacttgtcttatcttgcttcctgtttagctctggaggccctggtatttcgagtttccttactgcgcctcttaaaatatacagcaatatatagcatgtttttgagtctctgcatctctgtgacctgctgggtagcagtggggtggctgctgccgccatgcagttttaagtagttactctgcagaaagtgacagtga

SEQ ID NO: 271325 - DNA, 283 bp, Homo sapiens
gctgtccttgaagttttttcccttgcctcctccccagtttgcctgttggtcccactagggcagtgccatattggcaacttcccatgtcctccacttacagcagacaaattggaaacctcccttgtgggaggaaggatgggaggatgggctccattacaaagcaatattctgaaggagaagagagccatttggacgggaagatggagctggtaaatctggcttgtctccctgcatcgggggcaagatggattttattcataaatattctcagtgatcttgagct

SEQ ID NO: 271326 - DNA, 427 bp, Homo sapiens
gataaaatcatgaagtttagttgcatggaatgaaaataaatgtttaaatatacataaagcctgggttatttacatgtgggaagatacaatacttaatttcttaggcaggacaaaatcaaaatgattgaaatgtggaattacttcctcagtttggatttgaagaaaaaacacaaaatagtagtaggttgcaacctaacaggaatattgagagtcagataattttatacttgactaacactgaatttttatttggtatttcctttgatacatgaatgaagctgccacgtaatcgagataaggccaaagattttgaggtggtcacacactggtcaaacacctctgctgaaaccctggagtcctctgcgactcctcacagcatagagtattggctttggagtcagattcaggtcaaaccaaactcttcttg

SEQ ID NO: 271327 - DNA, 204 bp, Homo sapiens
gaggccagaagaccaatagataaaaaatatctcccacccgtattccaacctattaccaagttctacatttctagctctgcaggagcctcctcccaggtctccctgggtcccatctgcccttctgccaccagtctccacccagtcaccagagagagagcttcttaaaatggaaactggatcagatcatgtcacccctgcttagaa

SEQ ID NO: 271328 - DNA, 374 bp, Homo sapiens
ctctaatcataataaagcttaggaaaatatgtgtgtaacttcagggtgctggggcagtatggaaacgggaggcctcttaaaatctagaaaaccatagagggaaagattgatttatttgagtcctatatatcaggaacatgcagatttaaatcatgagatatgatttttacccactggattgtgaaagaattagaaaaggtgaacacatctagcgttgcagagggactgctgactctcacatttattactagtggatatgtattgccataatctttgtggaaaggagactgatggtatctgttactaatgtatgtatgggccaggcatggtggctcacacctataatcctagcactttgggaggccaaggtggga

SEQ ID NO: 271329 - DNA, 591 bp, Homo sapiens
tgctactgtcacaatgggagacagcctcaggatgaagccaacactcagagaatgacaaaatcaaaacttggagattaactgacctcatatagcattgcataagcccctgaatcaagttatgcctgaagcttagtccttgagccttcaactacatgaaccaatatatttctctaattaaccaggacctttttattgcattgggcccatctggatatcccaggataatctccctacttcaagagagaatgaaggcaaggagaatgtaagaactcagaaggcaagaagagaagctggcattagaatgcggttgaacaagagaaagagttggagatgctgagttctggaggcagatctacctaaggaggaactctctgttcatcgtcttccatggcctcatctgtgatggacactggagaataaacctttcttaaaggctgcatagcattgtaccccattttcctgctggtgtaggatgtctctccatcctgacaattccagaatgcagagcatgtggacctttcctcatctattcagaacctcatctattcagaacctcatctactcagaatttaaaaacattatttaagaaga

SEQ ID NO: 271330 - DNA, 452 bp, Homo sapiens
tgctactgtcacaatgggagacagcctcaggatgaagccaacactcagagaatgacaaaatcaaaacttggagattaactgacctcatatagcattgcataagcccctgaatcaagttatgcctgaagcttagtccttgagccttcaactacatgaaccaatatatttctctaattaaccaggagaaacggactttctttaaatcatcaatctttaaaaacatcaagaaatggtggtcttcaacaaatgaggaggaatgaaggagaatgatcctattttccagtgaattatcactttactttggagactttgtgggaagacttactacgaaagttccttttgaagaactgaagtgatcttatccctgcctgaaaatgtaactctccttctctagtaatataatgaccagagaagagtgttatttcagctgattaaaatagctttgttgtaaa

SEQ ID NO: 271331 - DNA, 111 bp, Homo sapiens
acctctttgctcctctggcaggaatttcaaaatttggccccggtcagtcacaaactccctcctggttcccaggtgttctttaatttttcattgctatgatggaaatgtcac

SEQ ID NO: 271332 - DNA, 962 bp, Homo sapiens
gcaaaaaaggcaaccgctctctgtttctgaccgtcatgtctacaagtatcgctgtaaccattgtagcttggctttcaaaactatgcagaagcttcagatacattcccagtatcatgcaattcgggctgcgacaatgtgtaacctctgccagcgcagtttccgtacattccaggctttaaaaaaacacttggaagcaggccaccctgaactgagtgaagctgaacttcaacagctatatgcctccttgcccgtgaatggagaactgtgggcagagagcgaaactatgtcccaggatgaccatggcctagagcaggaaatggagagagagtatgaggtggaccacgaagggaaagcaagtcctgtaggaagtgatagtagctctattccagatgacatgggctctgaaccaaagcggaccttaccttttagaaaagggcccaattttacgatggaaaaattccttgatccatctcgtccatataaatgtacagtgtgtaaagagtcattcacccaaaagaacattctcttggtccactataattcagtttctcacttgcataagctgaaaaaagttttgcaggaagcctccagtcctgtcccacaagaaaccaacagcaacacagataacaaaccctacaagtgcagcatctgcaatgttgcatacagccaaagctcaacattggaaatccacatgaggtctgtgctccaccagacaaaggctagggctgcaaagctggagcccagtggtcatgtggctggtgggcacagcattgcagcaaatgtcaacagccctggccaggggatgttagattccatgagtttagcagctgtaaacagcaaagatacccatttagatgccaaagaattaaataaaaagcaaactcctgatttaatctctgctcaacctgcacatcacccaccacagtcaccagcacaaattcagatgcaactacagcacgaat

SEQ ID NO: 271333 - DNA, 390 bp, Homo sapiens
agctttgcagataggctatgaagttgatggatatctctgattgggcaccccagctggtaggaacacagctgcagctcctgttccacttcctttcttgtactgctgaacatccagatagaggcattgacatgcatggtttccaactgatcacttcctactcccttaaggacctcctgtcaggcagcattgatgagaagacaaaaaagctctctggctggagccactctctatgtggaatttgcatgttctccccatgcctgcactgatattctcccacatcccaaagctgtgcacagattttgactggttcccagaagaagattcagccacccatgaccctgaactggaataagcaggttggaaaataaatgaatacacaaatataattta

SEQ ID NO: 271334 - DNA, 232 bp, Homo sapiens
ctggggcttcaggagctgtaaacgttcacccctagacactgccgtggagtcaagagccccacagcctgcccatctgtatgctcccctagaagtttgagcagcggggcactgaagaagcaagccacacccacatcgcacgccctgcgagggggatgacggaacctttcccgtttcaatatgaccataggtatttaaatggtttttaataaaagatatttactgtgggaaatta

SEQ ID NO: 271335 - DNA, 333 bp, Homo sapiens
ggtttctactacatcatttcccttttctcttaacaataccagcttctcggccgggcatggtggctcacgcctgttaatcccagcactttgggaggccaaggcgggcggatcacttgaggccaggagtttcagaccatcctggccaacatgatgaaaccctgtctctactaaaaatacaaaaattagctgggtgtggtggtgtgtgcctataaccccagctacttggagggctgaggcaagaggatcgcttgagctggggaggcagaggttgcagtgagccgaggtcatgtcactgcaccactccagcctgggtggcagagcaagactgtctca

SEQ ID NO: 271336 - DNA, 201 bp, Homo sapiens
aaatctgtagctcttaacttgaattgtaaatattggtataaactcctgatgtatttctatttaaaaacgttttctggatgtgtccactgaaaaggtctagaaccaatgattaacccccccaagaacaaggagctcccaagcatccatgctttcgtatccaaatgccttttttattgaaaggaaccagggtccttgagagaa

SEQ ID NO: 271337 - DNA, 662 bp, Homo sapiens
gatgtcttcaatttatgatgtgtttattggaacataacctcaatataagttgaaaagcatatgtattttcaattctggcatgaacctatgggaatcttttgcatttaagaacctccccattttaataatttcatgggtctaagattcttcatctgtttataaggaactttagtcttagtgattagagactaaatttttttttgagcagtaagaaaacagccttttgggacagatagtgagtgattcttaggaacttgacattgccaagaaattttatagatgccgaagaattcttatgtgaaattcacataagcatgcccattactaaagacagtttgtataaagtaaccctaaatgtttattgaggaacctacagcttcaactgacttacgtgcagatatgtaccaggagaacatcattttagcttgggcgtctttacttggggttttcagaggatccaggaacctcactgtatgcaaagtcttgtggatgtacctgaatgtttttggaggcaggtcacatagtttctgaaagtgttctcttattttcctcaaatgtaggtaaccattgttacaagttatttaacaggagaatagtaacaatgtctaacttatgctaatgattttgtgtgctgagctcccattaattaaaatgtcttcaga

SEQ ID NO: 271338 - DNA, 1063 bp, Homo sapiens
gatgtcttcaatttatgatgtgtttattggaacataacctcaatataagttgaaaagcatatgtattttcaattctggcatgaacctatgggaatcttttgcatttaagaacctccccattttaataatttcatgggtctaagattcttcatctgtttataaggaactttagtcttagtgattagagactaaatttttttttgagcagtaagaaaacagccttttgggacagatagtgagtgattcttaggaacttgacattgccaagaaattttatagatgccgaagaattcttatgtgaaattcacataagcatgcccattactaaagacagtttgtataaagtaaccctaaatgtttattgaggaacctacagcttcaactgacttacgtgcagatatgtaccaggagaacatcattttagcttgggcgtctttacttggggttttcagaggatccaggaacctcactgtatgcaaagtcttgtggatgtacctgaatgtttttggaggcaggtcacatagtttctgaaagtgttctcttattttcctcaaatgtaggtaaccattgttacaagttatttaacaggagaatagtaacaatgtctaacttatgctaatgattttgtgtgctgagctcccattaattaaaatgtcttcagaatgcttgtttccagatccttggtctgtattattaagatacatgtctaggtgctacttcaggcttacagaatcagtctttggaagtcagatcaggaatctgcattttaacaagcatccaggtgatttcttgagcccctctgaagttagagcactaccattatatattgtatttcatatgttaatcttttgatttatggccaagtggacaattcccttaatttttaaaagcttgtcccttgattttctaagatatttgctctagttccggtcgccatttttagtaaaaagtgatgacagctcagcctgttatatgtagatttctcatttcttactttctgaagaaaattaagctttctgtgtcacttctgagcacgaaacaagattaaattattggaatctga

SEQ ID NO: 271339 - DNA, 458 bp, Homo sapiens
ttttttttttccgagacgagtcttgctcttgttgcccagtctggagtgcaatggtgcgatcccggctcactgaacctccacctcctgggttcaagcgattcttctgcctcagcctcctgagtagctgggattacagacacgtgccaccatgccctgctaatttttttgtgtttttagtagagacgaggttttgcaatgttggccagactgatctcgaactcctaacctcaggtggtccaccagcctcggcctcccaaagtgctgggattacaggcttgagcaccatgcctggcctaaaaattcttgattcagttctagatttttacttgataaaataaaaaggaggcaaccctaggttaggtcgagggcaaaacagaaggacacagaaactacagtcccaagtttagtcattagtggggtggaaatctgatttttttaaaaaaatgtacagaacttag

SEQ ID NO: 271340 - DNA, 554 bp, Homo sapiens
gctctggagaacaggtggtcggtttcctacgaagctaaacacacagctactgagctaccgtgggacatttatcccagagaaacggaaactctcattcacacacaagtccgtaacaggcgttcagagacgtgtctgttgtagccaaacagtggcatcaacccaggtgtcctacaggtgaacggttcaataggtggtctgcacaccacgagatggcccttggcagggagggggagtggcggatgccccgagccctagtgaagagtgccagtccagaggctgcagctgttggtccccttctagaacataactaagatgacagtctgggcatggtggctcacacctaccatcccagccctgtgggaggtgaggccagcgggtctcttaagcctaggagtttgagaccagccatagtgagaccatctccaaaaaaaaaaaaagatgacagaactgtagtgaagcattcaggtcgtgattgctgtggtgctgagaggaatccgtggtgcggtcagtggcgcggccccgcactcacacacacgagtccagctggccacgtc

SEQ ID NO: 271341 - DNA, 442 bp, Homo sapiens
gaatgtatagttccgggctccaaaacaaaggcagcccatcttagcctgagccactctgacttcactctaggaaatactgcctagatatctaaaggaaagtgatagcaactgcaaccaactgtttctgaggtctgcctgcccaccaatggccccctcagcacatgggaacacgtgtggaggtgcctggaacagacactgactcagcggggttctgtacagaggcagtgcgggtgaagaaatgaatgcagattccccaacaatccagaggtatatgcaagaggaggggcaggggttctttcaagtcaccttccaggtgaccaggtgcctttacaactctaaggctctgtgagtatgtttttttcttaccttatggaataaagggaaaaagaagacagctgccctgggtatggctttgggtcggaataaacatttctcaaattga

SEQ ID NO: 271342 - DNA, 355 bp, Homo sapiens
cgtcgacgcccctcaaggtctcttcagtttctgatccggggagccctgcaggttgtcaggatgggttttgtgggcttattgctgctttccaggacctttgagaagccgtaagtctccttcctaccaggaagccctcgctcaggaacgcacagaccgggggggagagagggtagcacagagccagggagcagggccaggcggagcgaagccaccgaggccactgcctgcagtgacgttcgaaacggacagtaggaaaaggacaaaacttgaatgacacagcagaggggtcaggagtgggaggcagaattcgccatgctctgtcatctcctccaaagccgccatgggcaatgacaga

SEQ ID NO: 271343 - DNA, 385 bp, Homo sapiens
tctgtagtcgctctgggtgagggctcctggtaggaaggagacttacggcttctcaaaggtcctggaaagcagcaataagcccacaaaacccatcctgacaacctgcagggctcccggatcagaaactgaagagaccttgaggggctccagttccacagggagcagcggagaggaagggcccagccgggggggagagagggtagcacagagccagggagcagggccaggcggagcgaagccaccgaggccactgcctgcagtgacgttcgaaacggacagtaggaaaaggacaaaacttgaatgacacagcagaggggtcaggagtgggaggcagaattcgccatgctctgtcatctcctccaaagccgccatgggcaatgacaga

SEQ ID NO: 271344 - DNA, 434 bp, Homo sapiens
gacggtggccactcttgttgggaaccttcacatagagtcctccaaggagagaaggcagaaagtgaaaaggttagtaaatctatggccagaaggctggcctctggacttccaggaccatgggcatttttatgaatgccatgacagctaaagaattagaggaaagactcaggcaatatgccaagtaacgtcccactccacttggaccaaactgttaactcaaaactaatgtggattaggtaatgtgattgttaagcaacgctataattaaagatactccaaattggagcttagggaatcaggatggcttggtaagccccacctcatccttctgccacaagtgatgggctctttcccaatcttactggctattctactgaatcataagtaaagctacaattacaggagggagtcccaggccctctcctagtaaagaa

SEQ ID NO: 271345 - DNA, 427 bp, Homo sapiens
aaaggagagaggcacagacccggatgagatgacacacactcaggcacttaaagagacatttaaaatcaacatgttccaatcgggaatctagtggtcggcagagttcaatggactgaaatgcaagaagttgaatcagccccagggaggtaactcttaactgtgatggtgcgtccaggagctgggaaaggagcttccatgacacttcgcatgaatgggtaaacaagggctggagacatttctcttctcttctctacttcatccagaatctatatacgcaaagtgttattttattatggactaagttaaaaaatataaaagaatgccattacaggaactgccaaacctggtgtacaaactttaaaataacccaaataaaatttaagacagataagcttctgcaatcaataaaagttaaataagcatcata

SEQ ID NO: 271346 - DNA, 463 bp, Homo sapiens
tctgtgggaatttgatggtttgaattcaagtgtctgtaatggtgaaggcgaaagtcctgcttgactgaggcctccgtagcctgtgactcatctgagcagtgtcccttcagaagctgcttaaacatttccctgagcttaaagaattgcactgcactctggcaatgaatcagcgttcctattgctccacatcctcaacagcatttggtgttgtcagttttctggattttggccattgtagtagatgagaaaattgagaaacggagagatgaaaacatttgcctaaagtcaaccagttataaatggcagaggcaggatttgaatgacagctgtacaacttcagagcccctccctttatttcacaacactgaagtgctttggggcgggcatgctggtcaatgtataggggtggtttatttatttattttctaactaagttactgcaggcagccgtggcttagttaga

SEQ ID NO: 271347 - DNA, 222 bp, Homo sapiens
cgagggcacagagagattcgagttgtcacccaagctcacatagcaccagtgacagaggtgagatttgaatcaggcagcctctgtctagagttcccttcctaacctccattctatactgctttcaaagatccagcccttccctcaaatcacgttttcttacttagactagggtttgattcatgtttactcactgggaataaaggtcagttaaacagaatgaga

SEQ ID NO: 271348 - DNA, 339 bp, Homo sapiens
aagatcataatatttacatatactgcaaatgtaatcttaattataatgtagtactcagcacaccatataatccatgggcagttttctcagttttaaaagtgactccaaaataattcataaaatatgatttttctacatctaatcaacccaattaatttgatcaattgaattataatttatataaaatatctcaatcagtactgcataatttcatttactattttcttttagtgcaagtcagtatttagaaatgatgagtaattaaggtttaccaatcttattttgtgctctagatttctgatacaactgttgtaatttttaaaatgtcagtataacaga

SEQ ID NO: 271349 - DNA, 1530 bp, Homo sapiens
aaggatcccgctgagatgctgggcatcagccatcctcctgcctcagacctccaagatagccaggaccacaggcacgcaccctgaggaggaagaaataccaggtgcgcatgatccaagaaaaagccatctgaggacgcggcaagaaggccgccatctacaagccaaggagaggggcctcaggagaaatcgaacctgtcacaccttgatcttggacttccagccttcataactgtgagaaagtaaatttctgtgtacaagctaccaggtcggtgggattttttatggcagccctagcagactaagacaggcatcaatggttccaatgtttacattttttttccggtaagcagaccgaagcccagagagatgaagcaatttgcccaaagtcacataccaagttaactgaagagttggggttagaatccagctcttgtgacttctctcttttcagtttcccttcccactccccccactgaaaagcttttgagtgactcttttagaagtcccggttctgtatatgaagcagaattgagcacagctgctctaatgaagggctcagagctcccaggcttttctctctcccctgccccttttccctgttgcacctctgcagtgtcctgagggttgaatggaatctagtttgaaagctattgctctacctcactgcctcctgaatgcaatgtcacaaattttcccaacttgccatttctctcacactgacataaagcattagaaacctgttgtgaagtaggaaagctaactgggtcagtagctgataagataatctggcctaggggatagatgattaggatttcagagaaggaaaggtcacccaattgatttgactctgtcctggggcgatgatatggtgaagatttctacagatgcagcagaaacatccggaaaccaggtgtgtcccagctctggtctgggaaccatttcataaattggcaaatatccaggatatacacatggctaattctgaggtgtactgaagtttcaataaagctactttggtaatgactgggagaagaaaatcctatggctggacttcattaatgttgtatggccaaggacagtgtttctctaattatggcctgtgaacctccctggatctcgatcacctgcatatttgggaatatgcaggttccagggtcccacctgaaactacagaatcagtattgagatcccaggtgattctcatgtacactcaagtgtaagattattagcacctggactttggaagcagccagataaaagtttggatcctgggttggctacttcctagatgtggccaagtcattttacttgccatgcttttgcttttcttgtctgtaaagtggacatgatacctattttacagggtggttttgaggaataaggtcagcattaaacatttatcctctttagggagacagagagaggagatgaaatagagtagaattgagaaaagcagtttcttagacctccctgtgaagtttttcttatttcaacaaataataaaataaaaaattcatacactttcttagt

SEQ ID NO: 271350 - DNA, 516 bp, Homo sapiens
agatggctgttcttagagcatctctgaagaaagatgctataaataaagctcaaatgattattatctagaattaggaaagccaagactcaaagaaaaattcctcttaatcatttgttcatctcaaaatattataagtaaatgtttagaaaagcttagcttgtcaggttatcagagaatctgattttcttatgtcctgtcagtttactgtcctacagtttactttttataaaagtaagcttcacaaggactaatctttctgcaaaagggatattgagaagatcagtacaatatctttcttcccgtggtcttaaaaataattgtgtgattatttgttataacaaaaaccagactcttagaatccttgattctgagataagttactggcgaaaactccttcactggaggtatttttaaaaataggacaaaatttgatgtctttagattgatagaggaatagtactacttgggagagctgaaatggattaaatgtttcttgccaaactttattatatctat

SEQ ID NO: 271351 - DNA, 451 bp, Homo sapiens
ggcatgaagctttgttctctgacataacctatgcatctagcactgtgcctgcctacaggaggtgctcagttactaggaaattaacaaaactgccttgcagatctttcctggctgaagatgaggagtgagggaagagaaagaagacaactaaattaggccctcagctcctatttccagaacagttctgagagtgtctgtttcagagtttgagtttccacaactgcctttgttaacaggagggatctataaaaaaccaatggtctggaccaggggctcccactctgaaagtctgtgactaccaggggcagtggagttctttcacgattcgcctaatgttgttgtcttagaaataataccacttatacaaaatacaaaaccagcaggactatttcccaaataaatgtaaatgagactggaattaataaaggtaaattcattttttaaaattaca

SEQ ID NO: 271352 - DNA, 683 bp, Homo sapiens
aaaaaaaaaaaaaaaaaatcaaatgagaacaaattacgtgaatcatttatcacagtgcctgccacaaaaggagcacccaataaaagttatctcccaggtcggtggtgattcttattatcctttcatgttccttggctatcaagactgaaggggaagtttctgatgagcagaaatccctaaggtattgagggaatttatggaagagtcaattattccaaccccctgcctctgatctcagttattcctggggtacttgggtttcagaagccccagggttaagtgttgaactctcacttggagcccaaagtggaatatggtgaggagttcattatatttcataatgtgaaaaaatatttcataatatgaacaatagcaaggcgctcatagctcagacctctctgatacagtccatttctttttatgaggtctcatgccaagagacggaaaagagctctaacagccctgagcagctttagagtattacagtgtgccaggaactgctttaagtgaccaagagcagtacccagattacttggaggtggtggacctttccacaagcagagtttcgttaagcaagcaaggggcttttggagaaatttcagattcgcatctttcaaagactgagtcaattctctgaaaagtaaattgctaagagccaatttgctaaaagtcagctctcaaaa

SEQ ID NO: 271353 - DNA, 477 bp, Homo sapiens
gcgttttttcccctctgacgggcagactatgaggtttcctaagtgctttccctaagtccagaatcaaagagatttgattggttctttccttcaccagcttattttattgtgttggatgatgacttggcttttcatgtaaccctgagagagagggatttgtttacgctcccctgggctttgggaggggactgaggtctttgaggaagaaggcagctttggataacatcgagaactaggatttggtggtgaagttgtataatgagaccacattctacccaggactgaacatgactatcgaagccaacctactcagagcatttgatacagaagttaaaatgggttcagtcttctttgtaaataaaattgtatgtttttccttgtggctgtggggtcccagttagaataagctgtttataatgacataaataaccatggcatctctagaagttatgcatcaacgtcttttcaccagtgtgc

SEQ ID NO: 271354 - DNA, 440 bp, Homo sapiens
gcaaccttctaaatggaagggcaaagcctcaactatctaaaatgcagcttttaaggactcttagatgtatgatatgccttatgtacaggagattccatctataccttgacacccacaccactcccacccctgttctctcttccaagaaggtttttggcagcaaatagttctctttaattattatatttaaatatttgtatatatttaattcacattagggataacaactaagaattatttaattggcaggtttattaggtagttgttgattgatgacatgtataacaatccaaatggtatgataggtgaagccaatgcagtggcacatgcctgtaatcccagcactttgggattgcttgagcccaagagttcgaggttgcagtgagccatgattgcatcactgcactccagcctgggtgacagtgtgagactccatctca

SEQ ID NO: 271355 - DNA, 343 bp, Homo sapiens
ttgctgcattggctggtgtctccaatagagtgtcgaaaagaagtgccgagggtagacattcttgcacagttcccaattttagaaagaaagcattcgggctttcaccatcattaagtgtggtgtcaaccttgagtttgtcacttacaccctttatgaggctgaggaaattcccttctattcctaaaatgctcagtttttattacaaatgggtattaaattctgtcaagggccgggcgcagtggcttacgcctgtaatcccagcattttgagaggcctaggtgggcggagtttgagaccagcctggccaacatagtgaaaccccgtctctactaaaaattccaaa

SEQ ID NO: 271356 - DNA, 924 bp, Homo sapiens
gtgtatactgttggggtgttgggtgcaccaaaatctcacaaatcaccactaaagaacttactcatataaccaaataccacctgtacctcaataacttatggaaaaaaaaatgggactacggcttacttgggagaggggctggtaaatgctctagactttcgtttgagaacttgaagggctgcatcctatgagtaagagtgagcaggaaatagactagccccataaagactgaagctgagctatcagttaggtcaatccagttggattaagatagtttggaattactggtgcccttcagctacctgccagaagcaaaatttttcctctctggaggaaaatagcatcatccagagcctctaattatctctgataccttttcatttaaaatattctgtactcaagcagaaataactaggcatatgagtagacaagatgtaactgaaaaccaaaagaagaaataggtgatacaaaaagatccgtcagggttgcagataatgaatggagttatcagatatagtctttaaaataactatgattaatatgttcaagctctcagatggaggctcagagatacaggaaaggacgaagagcaataaaaagtgtaaatatgtaggtaaagttaaatgattgttggctatccaaaaataattcaaaatatatgcaacattaaaatacacaacaaaaatagttcataatttgggagggggttaaatggaggaaaagtgttctatgttccatgcattgtctaagaagtagtaaaaatatgaatttagattggatttatattagtcaaagatgcatgttttaatggctggagtaataactaaaagaatagttaaggaatgtgcaactaacaagcaaatagagggggaaaatagaataataaaaattagtgataaatccaaaataagacaagaaggagag

SEQ ID NO: 271357 - DNA, 473 bp, Homo sapiens
gcggcttgcctggcatttgatatcaagatggcggccaatgcctcacttgtagcccaaatactaagaaaaactgtggcaagaatcacgggtcctaggacctgcctaactgtggttttaggaagctgaacgtccccaaatttcatgtatctggcatctgcaggtttgcgacccagagtagctgggccaatgggcacctggcagcagctcacagacaaatgcggaatttcaaggtcctcctaagccatcgccacccacacttctcccgaggaatcttttctcccccacagcaagtcagggccgaatagaactcggttcaagaaattctcagtgtttagagctcaaaaagcacataacttgctattgctaactgtgggatgtaagccctgcactaagggtcaaacaggtacttaacaaaagtccttcaacggtggaatataatggcctccagcaaataaagcatataaatattttct

SEQ ID NO: 271358 - DNA, 448 bp, Homo sapiens
tcacatcctcctcattccaccacctctgctgggaggtacagagcagtgctccagtgccccatctgcatggaggtgactcctgagggtgtcggccccctgtcagtcatttgagagcagaacagggaaactggaccgcagaatatcctgctggaaaatgacaagctaatgagaggaaatacgtcaagatgatcaatgactttgggaggctgaggtgggaggatcacttgaagccaggtgttcaagaccagcctgggaaacattatgagacctcatgtctacagaaaataaagttgctgggcataggggtacatgcctatagtcccagctacttgtaaggctgggaagggaagatttcttgagcccaggagttcaaggctgcaatgatctatgatcgcatgactactccagcctagctagaaagcaagacctgtctcaaaaatagaaaaag

SEQ ID NO: 271359 - DNA, 382 bp, Homo sapiens
actttatttctgactctcaaacttcgccccgatcccccaacctcgtctgttttcacaacctattcctgagcccaaaatgtgtctctgaacttccaagctcgtctctgctccacaaccccgcccatatctgcctccccacaaactccatggctacaccccaaacctctctgacttaaccccatatctgaccttcaaattccacctctatctccccctaagccccatatctgccccctagaccttatatctgctcccttcagcccggtgagaccctcccttgagggctgggattggaacgttacctggggtgaggggctggggccgagggagagtggagggtgccagctgctgcctgctgccgccgttggggcaacacttactc

SEQ ID NO: 271360 - DNA, 201 bp, Homo sapiens
aagcccaagcctgtccaccagatgtgggccccggccagtctcgctcacaggagggtctccggggacagcagtcagaggccgagggttttgctgagctgaggcctgctgtaacttggagagctgcatgtttatgctactgtctccattctcagccaggccttctagggctgagcatgggccctgccccacgcaggagtgaca

SEQ ID NO: 271361 - DNA, 556 bp, Homo sapiens
gatttctgagccttcataactctaagaaattagctttttaaaaataagtcacctagtttcaggtattctgttataagcaacagaaaaatggacaaagtatgtcttaagtaaatctcacaattgcctgtacggtagatataaataaatattattactcctattttacagaagacagaatcagagaggctcagcaaatgccagaactcaaattcaagcgcaactctgcctgatggaaactcaggtgatttccactctgcctccacctgcattcctcagcaccctgcagttggtccccagactctatgctccatgctgcttgtgtttgttggttggctggtttcgtgttcatgtgttctggcttcttcattttgggtctttacatctttacatctctatagcagttcttcccatgttgtgtagcagttgtctctacgtgacagtctgtcttgtgaggtcgagttccctgaaggcagcaagcatgtaattggtaaattctcatcagttagccatgtctggaacatggtaggtattcaataaaggtttttgctcatttaat

SEQ ID NO: 271362 - DNA, 380 bp, Homo sapiens
agtcagtgtatatcaatttttttttactgtatcactgcattcagaggtatcaaattttgcttgcagcgctgtaaaagtttaccagtcagatttgtcggcccggcatggtggctcacacctgtaatcccagcactttgagaggccaaggcgggaggattgcttgaggctgaaagtttgagaccagcctgggcgacatgatgaaactccatctctactaaaaacacaaaaattggccaggcttggtgccatgcacccgtggtctcagctacttgggaggttgagtggggaggatcgtttgagcccaggagattgaggcttcagtgagtgattgcacccttgcactccaacccagacaacagagtgagagcctgtctctaaaa

SEQ ID NO: 271363 - DNA, 410 bp, Homo sapiens
gcaggttcatagatacacccttcaaggctgtccctccaaatgagaagagcatgaactatgtggttgtacagcttgggtgtgaattccagcttggccactatgtgactttggaaaaattacttaactttgtgtgcctaatttcctcatcggaaaaacaaagataataaaacatacctcttggggttgttgtacggattaaatgtgcctgtgtatacagaacccctaacacagtctctcagatgttgtaactgtttaacaagtagtgatgtgattattgttgataatgttgatggtaaggccacttaccccaccatgggttcaattttaggaagctcatcgttgctgcatggctgagccctgtctgcaataccgctagtatcagtaataaaatggatactttgatctctacc

SEQ ID NO: 271364 - DNA, 442 bp, Homo sapiens
tgggctacatcaccaaggattaactagcacatggaacttacatagcaacatggagcaaaataataaagattacgaatagtagtgctgcaaagtatggtatagctgaagtgctaattagatagtatagataatgtgtactataggaattcagtccaatgcttttgggacatttattttaattttacattataccagtggaaagtaattaaacaattatgtcattaaagaaatagtagccaaataaattcaaacatatatggtcaactaagttttgacaaagaaaataagagaacatgatgaagaaaggctagtcttttcaatgaatgatactgggaaaatggaatctccacatgcaaaagaatgaaattggactctaatgccatatgcaaaaatcagctcaatttggctaaaagacctaaacgtaaaacctaaaaccataaaa

SEQ ID NO: 271365 - DNA, 271 bp, Homo sapiens
caccaacgcggagtccacctccttcaaccctacatggtcgatcacatcattcacaccagagaagacatagacggtattaaggatgataacagtatttggaactgaagacctgatgggaaaaaaaccttcaagttctatactgtactgtggataagcggctcagttcagcagagctggagttgaacaactttgttcctctggtgtggtaaattgacctaaaggtgacctctgacgatttcctgaaataaatatgcaatgttacattttcaaa

SEQ ID NO: 271366 - DNA, 505 bp, Homo sapiens
cagagctttacatttacatatcatctatgatatggaattttattattattacctagagaagttgtcattgatcctctcactctccctgttaatgagcttaggctgccttatgtcttctggggagtgaagtatctataaacacattcacacgaaagttctgggaactcagtactgatgttacttcccagaatatttgcattaaaaaaatttctatctttgacatgaaactactactctgaatttatccaaaggaattcatgagataaatgctctaatgtctgatgcaagatactcaccaaagcattataaaaatagcatccagtgggaaacaatctcatgtccaataaaaggggactgactcagttagtggattaataggcaccacatgatgccatagaatggtctttatcgacacaacatgtgtctgtgctatatggtgaagaaacagaccaaaactatatgtaaactagctagactgtatggaatgatcacatttagtaggaaa

SEQ ID NO: 271367 - DNA, 328 bp, Homo sapiens
tgcctcccaaagtgctaggattacaggtatgagccaccatgcctggccccagccctgaatcttgtctacttcctttgcttgcttacttcgtgctgccattgcaggctccccatccaaaaatgtagccctctttaggccagcaactccagagactgttgaattcaggcacagtttgtatgagctatagcgcctcatccctgtattagagtaaatacgcacaaaaacacaaggtacttttctgtcctcttaaaattaataatggcttcatttgtaagacatttgaagttataaacgttctggaataaagttgtcagaaaatctttgcagc

SEQ ID NO: 271368 - DNA, 443 bp, Homo sapiens
actcatggtttctgcactggaaaaagcacaactgaggtggaaaactagcttccccaccatcatgggttccctggcaggagccctgttcctgcctgactctatgggaagaattgccagtgcctgaatggagtaatgttcctgatgacagcctaagacagaggaggcaagtggcactaccaaccctagtcctagaaactgtgctctgcaactcttccaaaggagatgccaaatgtcattgactgttcagcagctacttgctataggaggtacgttccacaggtccttttggcacaaatctatagctagcctccccacactgctaggaatatccaccttgggaagacccccattcagtatgagcagtactctaatcatttgctagaggcaaggcttcagtagccatctagtgccaaaaaggaggcagtgaaccaatggaatttaaa

SEQ ID NO: 271369 - DNA, 461 bp, Homo sapiens
tttctgaatattaaggggaaacaaacaaaaaactagagagaatgcatgcaattaaacagtctggcctagaatgtacacagttttgatcctagattgttctataaacacataggcactatctcatttacatgcacacttttcctattcagcaaatatctgagtgcctactatatgctgaggataggggaaaggctggcaccccatgcacttttcagatgtctacagcagaaccccaaagattggcacaacttaagtaacagaatccaccaagacaaacttcctcatccaatctattcagatccaatcctgtcggttctgatttctaaaacatcctctgtcaactgacaaaaagacctcactcttcagatgaaaccactaccatgaacaaactcctggactatggccttgtttaaaatatcaatataataaagaacattcataaaataagggctacatacaga

SEQ ID NO: 271370 - DNA, 736 bp, Homo sapiens
agtgagagaaagggtatatgaagtttgcaaatgacgatacttgttctctttattttgttacttaggttgtatttcacatgaaggatgtgagaattttatgcgtatgaaggaagcattagctttaaaaatactgagaaacatgctttttcttttgtccttcagaatgaggggcttcctttgtaaggtctggagttggttatgggttttgactctgaggatgacattgagttttaattcagcttgtcctggttctgcagtcaaaaattccatgttagcctggctcgagacttaagagacaaatagatggcacaggcacaagcgtgtgtacacatgcacccaccgtcatacaaagtgtaagggaggagtggttttaaataagatgagaatgaagtgacaaaaggtaactgtcattccttcatgttcattcttttaaggtaataatatgtgatggaagtaaaaacagcgaaaatacccaagaattagcccaggatatgcaaatttaaatgtctgcagtggacagaaaggaaacaaagaagtgaatcacactgggaataagaaaatggagactagagatggtagggagaatgagcttccctttttaaggaggcagcaatcttacagaaattgagcctaaaattgtcagtattgcaagagaagacaaaaattcagatttttatgtcaacaccactgattatagaatgttggtagctaaattgaaataaaatttaaatattat

SEQ ID NO: 271371 - DNA, 451 bp, Homo sapiens
gagtttgtaattactaagatataacaaactgcatttctagaaccccattttttcagttaatgaaaataaagctgctagctacagttttaaataatttatgtgttgcaatcatactcaaggacacaaaactatgagagctggtataagaataaaccactgcatattattatacaggtgaatgtcccctaaagactggtaactggctaccggcttgcactcagcaaagcactgcttctgcaactcaacctaaagaaaactgactgtacctctgcattcactgccaaaatctggaggttcagaacttacaaaataaagcccttcatcaactgagccctcctggacttctccaatctaagcctgggtttgcctcaaagcacgcttcctgtaccacactcctaagggtctgaaattcatgttacttcctgaagtaaaatgcccttccctctcttca

SEQ ID NO: 271372 - DNA, 317 bp, Homo sapiens
caaaaaagctagaacaggcaagttggtcttgaagaagcagtaagttgtaggagttattctgctggatttcaaaactcatttagagctacaataatttaaaaactatagtactagtgtaagtatatagaagtatatcaagataaaaagaatacagactcaaacattatgctcacatatatacagttatttaaagtttttaaaaacaaacacgccagtgcctctcattggggaaatgaaagacttttcaataaaaagttcttgagtgaaagaagtttaagaccagcctgagcaacacagcaagaccttgtctctacaaa

SEQ ID NO: 271373 - DNA, 331 bp, Homo sapiens
cgaaatggagtcttgctctgtcacccggcctgggcaacagagtgagaccttgtctcaagaaaatttttaaaaaggcagtatcttctgatattaaggaagatgggtatttctagtggaatttcaataaaaatttttctataaatagggtataggactaaaaaatgagtatcctgattttttactacttctttgaatcttggcatctttttcaattatgtttctcatctatgatagatattaaaaccaataattaagataaattgaatgtaaacccatacctcctcagcagatctgtagaacttatgtaaaaaaataaaaatacaaaataaat

SEQ ID NO: 271374 - DNA, 546 bp, Homo sapiens
gagcaataacccatccatccttcagtgattcatactgattctctgtgtcatttgccatgtgaaacattttacttcagtttgctatgaaaatttcagaaacctatttctgaagatataattacctaaaatcgcatcatccaagaagcctgttcagactggaatgcagagctgcaaaacattccaagcagtcggatttttagaggatgaagcttccaggtccaaacagagtagcttcttagtacctttgggcctttcacactttttagtcttgcagctacagtgaagaagagcagcatcattaattagctgtgtaaccctgccaccccccaccctgcattccccgcccaggaaccctcataaggcctcagggtcctcaactgtaagataggaagggtgtctgacctctaaggtttctctcaactccaaaattctgtgattctgtataggtgctttgcgcttgattttaagtttctacacaaatattactctaaaaaaagaaagtcaatgtaaaaacatttgggaataaaagaagaaattccagtattc

SEQ ID NO: 271375 - DNA, 563 bp, Homo sapiens
ggtgcgcaaacataaggcttggttctttttgagaaatgatgacaaacataactgcatgtgttctttttagatgtcaagtctgcttcaagctttgtctgcttatttttctaataaaaaggttttagaaaatcttttagctgttcctttgaatctaacaatattaatataactagagctttaatagaaatttcgtaagggctaaacaagaataaattagtcacagtgttttatgaattgcatgaattcccatcatgaagagaaatttgattaggctgtgggaagccaaaaatgtttctaaattattagcacctagttcctcaatccatttgcctataaatttggtataaaaacattgctagtgaaattttaaaaattatttttctataaaggcaggtccctgttactctcttatattaaatagaaatatcacaagatggaggaagggaatagaattctgaaccttctgtgatgtgagcagccatattggtggaatacaggccttacttagagtgggatattcattgcttggcaataaaggttaattgaactttgggtgagaggct

SEQ ID NO: 271376 - DNA, 449 bp, Homo sapiens
atcggccgagacccagaagggtgagagggggaagccgcaccctcttcgtgggtgcgatgctgtgaacgtcttccttcaaggaaagagctgcttctggattttccttgaactccaggaggtgctaagaaagcttcgtgactgtggcagatgcggctcagcggcccctcccaacccgcccgcgccagttgggaaagtgactcccccgctccccgccagttgggaaagtgactccttcctgtgggcagaaggcagcggacctggagggagccctcgggctctgagagtcacgcggggggcggcctgctctcccgcgccccctagcggagcatcggctcacacgcacctgagaggtcggaagaggcgggcgcttctctgcctcccccacccaggccccttgcagtttgtatgccctcaccctggataaaagattttggttcaactagaaaaat

SEQ ID NO: 271377 - DNA, 327 bp, Homo sapiens
ccttccttttcaaaattgtcttggatatttttgtgcatttagtcttctaaatgaactttaaaatcaatttgttgagaataaagtgttgttgttcttgttgttttccagcctgggaaacagagcaagatgcgtctcgctgtctcgaagaaaacaaaaacaaaaagaatccacaagaatctacgttgcctctgcggagggccctggtggctgggtgggggaaggggaaaagagacgaaaacttcctcttagttgtagagctcttgcattttgaatcattacttttccaaaataagtaaataattatgttgaataaatttaagttcaccc

SEQ ID NO: 271378 - DNA, 716 bp, Homo sapiens
cctgcgtggcaagggggaggcgtctgcttccgacacacatgctggggaacgccagccaggaaggggaggatccggacttagctggcaggggggatgtgaatcatctctgcaggcctgcacgggcgggcccggtgggggcagggtgctcccctttgaaaaacgctgcgccctgctcttcagcctcagtttccccatctgtaaagtgtgcattccaggcctccttgggctggcccagagctgccctgggcaggggctttcagcccttcacaccagaggctgggtcagctgagtgagtgctcctttgtcctcccgccatgccccaggctcctccctgctccccaggatccacacctaccctggccccgaccctgggccatgcctcaccacacttcctgtcttctctcacatctctcacatctgggagtcctctcccgccagcctgtgcttgcatctggggatccatgccagggataggacctgtcctccctgctggcttgggacatgccctctcccagccactctgaggagggctgactgaggaagggctcgtcaagctgggctttgcaggatgtgtaagagttctccccacgaggcgcagggcattctgagcccagggaatggcttgtataaggatgcagaggcatttgaaatggccaagtagttgcaggaatcgactggaaaccggggtggtaaggtgaagccatagaacattccag

SEQ ID NO: 271379 - DNA, 189 bp, Homo sapiens
gatctctgttaaaaataatattgttagtgtgttggatagatcaaaggtttgagctatcatgaggcagagtgtttcacctctagctcagtgatatgattctctttcaaaccgtccttaatttaaagaccgagaagtgagttttctctctgtacacttccaagtaaaaaagcaatgttagtaaatacaagt

SEQ ID NO: 271380 - DNA, 360 bp, Homo sapiens
tatgcagcaaaccaaaaaagtgaattgaaataattacatcaagacagtggaggggatattgcaaaaacaaaggggtttgtttgaatgcatcgaattgctctctactttcagactgaatccttagcatcatattatgctcctgttttttagtcaccagtatagatcctggaattgccaggtggagagaatgttaatcactgtccatggtcacagtagatcaatatttttaaatatctttacacgatttgcccaaagaaatgtcttttggcagttgtataacccccatttaatatacctttcaatgtgacaggtttagaagatttttgtatacgttttgtaataaactgatatatattagga

SEQ ID NO: 271381 - DNA, 498 bp, Homo sapiens
ataaagtattgctttattattgtattcagtgtacatggaatattgagattccatgtagcatgtcatataagagaagaattttgtcacaaaaccttagggatgtagattatcatttgttcaacaagcaaatatcctggaatttaaggaagcttttgactttcattgatagggtgtttgggtcagtgatcagcacttaaaagtgcgtcagcaatcaacatataaaagcgcatgggccagacatggtcactcactatcccagctacttgggaggctgagacaggaggtttgcttgaggccacaagttcaagaccagtctgggcaacatagcaagtctccacctcttaaaaaaaaaagttaaaaagaaaaaattgactgggaatggtggcacgcacctgtagtcccggctacttgggaggctggggtggaaggatcacttgagcccaagagttcaaggctgcagtgagctatgacagagcaagaccctgtctctcttaaaga

SEQ ID NO: 271382 - DNA, 992 bp, Homo sapiens
tgcagtgagctgagattgcaccactacactccagcctgggtgacaaagcaagattctgtgtcaaaacaaaacaaaacaaaaaaggagggactcagagagccagggaccagggaaggacatgaagcagtgttcggaggacagagagagagaagaatggggaggggaaggagcggcacatggggttgagcagaggagaaaatcagaaagatggcttagagaagccagcagtctgcaagtctggggaggatggagagtggtttggggttttgggtcggggtctaaggtgatcagatgcagaagcattacacggtggcctggtttctttactcagcccctggggtagatcccagccccccatgtaggtcccttggctggaaaaggaagagggagtggtcagatgaatctgaggaggagccggagaaggagctcgcccctgagcctgaggagacctgggtagtggagatgctgtgtgggctcaagatgaagctgaagcaacagcgagtgtcatccatcctccctgagcaccacaaggacttcaacagtcagcttggtaggaggataccccagagagcacctccaatcctgttctttctaaaaagaggaaacttccaataaccacacttttccaatgggaaagatacgcccccagtggctgagctctccacgcaggaggactcagaagtgatcactcatgagggacacttaggagacgatagaagactaggctagacttgataaaggttggcgcttgggatgagaaagcttggtttcgggccaggtgcagtggctcatgcctgagatgctagcacgttgggaggctgaggcaagaggattgcttgaactcaggactttgaggctgcagtgagctatgactgcaccactgcactccagcctgggagtacagtatgcatagactctgtctcctttacatactactgtactatatactctgtagcttgcatcagctctgtcatcagccgtgttaggtacgg

SEQ ID NO: 271383 - DNA, 1028 bp, Homo sapiens
tgcagtgagctgagattgcaccactacactccagcctgggtgacaaagcaagattctgtgtcaaaacaaaacaaaacaaaaaaggagggactcagagagccagggaccagggaaggacatgaagcagtgttcggaggacagagagagagaagaatggggaggggaaggagcggcacatggggttgagcagaggagaaaatcagaaagatggcttagagaagccagcagtctgcaagtctggggaggatggagagtggtttggggttttgggtcggggtctaaggtgatcagatgcagaagcattacacggtggcctggtttctttactcagcccctggggtagatcccagccccccatgtaggtcccttggctggaaaaggaagagggagtggtcagatgaatctgaggaggagccggagaaggagctcgcccctgagcctgaggagacctgggtagtggagatgctgtgtgggctcaagatgaagctgaagcaacagcgagtgtcatccatcctccctgagcaccacaaggacttcaacagtcagcttggtaggaggataccccagagagcacctccaatcctgttctttctaaaaagaggaaacttccaataaccacacttttccaatgggaaagatacgcccccagtggctgagctctccacgcaggaggactcagaagtgatcactcatgagggacacttaggagacgatagaagactaggctagacttgataaaggttggcgcttgggatgagaaagcttggtttcgggccaggtgcagtggctcatgcctgagatgctagcacgttgggaggctgaggcaagaggattgcttgaactcaggactttgaggctgcagtgagctatgactgcaccactgcactccagcctgggtgacagagcaaaaccctgtgtcaaaagaaaaacgaaggccgggtgtggtagctcatgcctgtaatcccattactttgggaggctgagatgggtggatcacttgaggtcagttgttcgagaccaaccagacc

SEQ ID NO: 271384 - DNA, 396 bp, Homo sapiens
ggctcatgcctgtaatcccagcattttgggaggtcaaggtggacagatcatctgaggtcaggaatttgagagcagcctgaccaacatggtaaaaccccgtctctactaaaaatacaaaaaaattagccggacatggtggtgggcgcctgtaatcccagctacttgggaggctaaggcaggagaatcgcttgaacctgggagacgcggaggttgcagtgagctgagatcatgccattgcactccagcctggcaacaagagtgagactccatctcaaaaacaaacaaacaaacaaaaagatacaaaaggcatccatattgaaaaggaaaaagtaaaactattcatacatgacataatattgtatatagaaaatcccagggaattaactaaaaaaaaaa

SEQ ID NO: 271385 - DNA, 460 bp, Homo sapiens
aaggaaatgaaatcaatctatgtattttgatacctcagttaagtttctcagtttagaaaaatgatacaaaacaaaaacttgcatacaacctccgctgtcattgctgttatgtcacaaaatatcttagactacagtttttttcagggtcaaagacgtgatggctcagagttttgtctcattcctagattattctttttgcagtgttttcctttctttgagttctttaagctttcttctctttattaatgtcaccaaaaccaggaaaaatctgagaatctatcattgatactcacttgctgtctgattacatttaatctgaagctaatttgcattttaatcatctatctgcgtttaaattctattctttgtgagttttattttttattttattattatttttttgacatggagtctcactgtgtctcccaggctggagtggagtggcgcgatctcagctcac

SEQ ID NO: 271386 - DNA, 411 bp, Homo sapiens
ctctacaaaaatacaaaagtaagccaggcatgatgatgggtgcctataatcccagctactccataggctgaggcaggagaatcgcttgaacccaagaggtggaggttgcagtgagctgagatcatgccattgcactccagcctggacaacagagtgagactccatctcaaaaaacaaagaaagaactactgtatagcataaatcatctgtgatttgtacctgtgattttttggtgtcctaagatatttccagtgatcacaagctgctgcaaagtcctgaaagaaatttcaaattaccagctacttaggaggctgaggtgggaggatcgctcaagcccaggagatcgaggctgcagtgagcttgatcactccactgcactctagcttgagtaacagaacaagaccctgtctc

SEQ ID NO: 271387 - DNA, 331 bp, Homo sapiens
acttactccagattgccagaaaagaatgtaatttgctcctctagtatactctttgctcttttgcaataagtagccatccatcctatcattccccaaatatttattgagtgcctaccttgtgtgagacactctgccaggccttttgtagacatatcccctatcctcatgctatatatgctcttctccttctaccttccagagcactttatatgtagtagatactaaacaaagaatagaagcaagtcattcatttattcagctggtgttcattgagaacatatacgccagacactgttctagatactgaagtatggcacagagtgaaatagac

SEQ ID NO: 271388 - DNA, 489 bp, Homo sapiens
aaccaagagcctgttgttagcttattaagtaaggaattgttaaggcttaacaaaaaatgtttatttgcatgtggtaacattttagtggtgtgacatgaagcaacttaaaatggtttattagattttgcgtgttgaatatttgtatgtttttaaaaggtttaagaaattgaaaatgacgaattttgccttggcattcatgtgaaaccatgtgatcattatgttccataattggtcatatcatgtcttcccagtacatttcagtattacatttttcaagaattgatgaagcatatcttgtttcattgtatactcttaaaagattttcttgaaacttaattttgcaattgatcatgaaacagtagcacatttgtttggggcagaagtttatttttaatttaccttatgtctttgcatttcatttttgtcacgaagtttggttttaaaatgacctaacggaacctttaaccaacatgttctttggaatatagg

SEQ ID NO: 271389 - DNA, 307 bp, Homo sapiens
gcacaggcatcagaagcagagctcttgccacccaaggccctgagggaccagtgaagtaggagccgtggggagagggtgcctgagaggagcagggacactcagccgagggacacagccagccaaggcggcctcacaaagaggattttcatggaaacaaatgccctgactacttcattcccacatcttcggctgaggctcccatggcaagtggagagagcagctgcaggtggcctcggtcacttgggtcagctctcctgcttaaaacaaacacagaaatcaataaaagtgttgattgtattatttaaaa

SEQ ID NO: 271390 - DNA, 230 bp, Homo sapiens
cattaggtttaagatgcttattaaacatccaagtggatgtgttgattatttatttgaatgtgaatttggaactcaggtccatatgaatttgggagatcctcagtatatagatggtatttaaagtctcaaacctagataacattgccaagggaatgttgaaggtaagatagagaagagatgaagtctgagggctgagtcttgaggcacttcagcgtttagaggttgtggag

SEQ ID NO: 271391 - DNA, 395 bp, Homo sapiens
gaagctcacaaaactgagcttcaaaatcttactctgtaatgtcacgaagccaggatagtgactggctaacgtttccagcaaccaacaccagcccaactttcttgcagctgccttctccatagaatgctggagatgaaaaagaggaagaataaaaaggagaatgagacaggtagctcttcttaccctgtgccaccttgctctagcagtggttctcagccaggggtggtttggcataccccgcaacccccaagatattgggcaatatctggaaacagggttgtcacaatgtgggggtaaggatggatgtgctactggcatctggtgggcggatcttgaggtcgggagatcgagaccatcccggtaacgcggtgaaacctcgtctctactaaaaatac

SEQ ID NO: 271392 - DNA, 434 bp, Homo sapiens
agaattttaagcacctcaaaaacacagttctataaaagtcatcttttttcagaaactttccacttatctctcaagttcaaagtagcagaggtgagtactggttttccctctgtctgactcctttaattttgtctttgtttccagagtaaactatgctctagattccctatatcataatgaaagagagaggaggaaaaacaaagtatccttttttaaggggggaccatctctaggtattatttagcctgcaatagcatggcttgctttcttatttaattatttttatttatgttcttccactatttatttctccttcatgtcttttatgcattagattgtattgaacctagttccaaatatgtttttttcataaaatttggttactgttataagtaagcaaagttgagatgagaaataaactaaatattaaatct

SEQ ID NO: 271393 - DNA, 144 bp, Homo sapiens
gccactgggaaaaaatattcaaagcaagaaagaatgtgaacagaacttatgaccatgatgattcaatgttttaccacaatgctttctaaaacagaagagtgtaaaaggatattcaaagtcaatttcctcagcgaggctttgcag

SEQ ID NO: 271394 - DNA, 354 bp, Homo sapiens
ctagccataaggttgagtgtggacagtgcaatctatcttcaagtggcattctttacaatcaattaaatgacagatcttgagcctagtttagagacggtcttgcatattatgccgataccaccgaaagtggacagctccattgttacagccttaggggtgactctgataatatgtatgtcctattgtttctgtttctttgaaccctggttaatagaatatataatattgctgtaatgtaatatactgtattatattatcaatatattgtgtattttattaaaatactaatattatatattacaatgtaatatcaattgtgcactataatatacatgtgtaataatgtaatagcaa

SEQ ID NO: 271395 - DNA, 350 bp, Homo sapiens
atcagagcctgattagctcttccgaactctgtattcacaagcatagagaaaccagaaaggaaaccatacctcatagtacaacataaaaacaaaatatcttaatcattcgttgactaaataacataataccattactgaagctaagaaaagtctgttaaggaacttttctaactgtgtcttgtacaacacactagacattccattctgagaattagttcatggatagctgaaagaaagaaattaggagaattgcttgaacctgggaggtggaggttgtggtgagccaagatcacaccactgcactccagcctgggcaacaagagtgaaactctgtctcaaaaaataaaata

SEQ ID NO: 271396 - DNA, 595 bp, Homo sapiens
ggcgcggtgtggctgtcagctgggagggatccctccgcccatgtaaacatcataaagggcaaggggagcgtctgttgtgggcgggggagcggctgccttcccggagagtcctctcggtccctaggttcccctcaagacgccggcaaccgccccgtcccttaacgtcacaccgggtctgctgggagccaaacagctgcggcctgatctgggagcgatagaatctcatcacttagggtcactaccggaaatggaggaagccggactgggagaccttgagagttgggagcgagagggaatcgtaggacgcagctgagaattgggaaagattttcttaggcttgttcttcctgtccatctcagttaaataataatcataactcatgtaagtctagaatttgtctcaaagttatgcctacctggctcgtaggatgccaacgttaggagtgaaaatagtcaacgctctcccgagagagcacatgacactacatgagcttcatcaagaccctcggaggcccagaatgcgcaccaaagagccatcgacgataattcttctacccaacttttatttagtattattaaatattcagtaaagttaa

SEQ ID NO: 271397 - DNA, 423 bp, Homo sapiens
ctctactttgtgtattccaatgcctattcaattagaaggcaaatgttcaagaaaaggaactgcttatgcttttcctctgatacctggtagtaaatgtcatggactacacggtcctttctaaaccccatgaaaatgccagcttctttaacccaaataactgcctgtgtctgtatctgtatctgtatctgcctgtttataaatgtataaaaagtgagtgattagaaattatatatatatttttatatttggtttgaagaataccttgatgacataattgagaaactgaaattggcatctgttaaatgtgtctgaaatattttcttttcccttatagaggacaatggtctcaaaactagttactgttttatgttttggaacattttctttaaaaaaataaatagcaatttaagtatctgtaaccaa

SEQ ID NO: 271398 - DNA, 822 bp, Homo sapiens
atggagcagggctatagcagtgaaccaattggttggtaagtgaaacctgtaagatgcctaattgagtaatttaatgactaattttattaggctaaacagaacagaaaccatgctaatctgtaacaaataagtggcgccagcctattacagtgaatgctattggttagactaaagcagataataaaccaagtgtaggaaaaatgacattttctgattacatccagaacaggcatagaaaaggtataataaagcttgaaacaggtggctgacaatgcagaaatcaatcactgaactgaaaaggtaaaatgaacattgttagaggaatttaggattaagatggatgtagagcttgcaaaagaaaacctagctctctaatacttaaagttctctagccctagaaaaaaatacctcagcaagaaattgcaagtaataattgcaccaagagtcagcatctattttaactgtatgtttaattaagtttctaactcaaatgagaaattttgggccatttttgtcaaatttttgcttagatggctacaaatacttagcaattcattttcatagattttgtagcatccacaaagccctccttactgcagagaatgcagaggtatttatccaataaactttcatgtaattgctgctatacagcaaaactatcattaccggtaattaaagttgtgatacctgaaaaaaaaaaaaaaaaaaaattggggggcgcgagaaatttaaaatttgggggggccagataagaaggcaagggtcagagacggagatggggttaaaaaaaggggagggttaaaccaggggggtgtaaggggg

SEQ ID NO: 271399 - DNA, 568 bp, Homo sapiens
aaggcactatttattttatactttgtgtgaacggggctcctggagtctcgaatacctgatattgcctgatcataaacaaaagtgcagcttatatgtgagaagtggtctgctttttttcttactcatgttattcttcaacaactctttctatgtttcatttagcagccttcaaattaaagctttgcaaaatgcagttgaaaaggaagtccaagcagaagacaatatctacattgagaatagtctttatgccacggactaagacccagtggtgctctttgagagtttacgcccatgagtgcagaagactgaacagacatcagcacatcagacgtcttttagaccccaagacaatttttctgtttcagtttcatctggcattccaacatgtcagtgatactgggtagagtaactctctcactccaaactgtgtatagtcaacctcatcattaatgtagtcctaattttttatgctaaaactggctcaatccttctgatcattgcagagttttctctcaaacatgaacactttagaattgtatgttctctttagaccccataaatcctgtat

SEQ ID NO: 271400 - DNA, 1917 bp, Homo sapiens
  misc_feature (1049)..(1049): n is a, c, g, or t
gagtagctgggactacaggcgccagtgaccacgcccggctaattttttgtatttttagtagagacggggtttcacccttttagccaggatggtctcgatctcctgacttcgtgatctgcccgccttggcctcccaaagtgctaggattacaggtttgagccaccgcgcccggccctgtttcctttttgtttgttcccctgataccctgtatcaggaccaggagtcagtttggcggttatgtgtggggaagaagctgggaagtcaggggctgtttctgtggacagctttccctgtcctttggaaggcacagagctctcagctgcagggaactaacagagctctgaagccgttatatgtggtcttctctcatttccagcagagcaggctcatatgaatcaaccaactgggtgaaaagataagttgcaatctgagatttaagacttgatcagataccatctggtggagggtaccaaccagcctgtctgctcattttccttcaggctgatcccataatgcatcctcaagtggtcatcttaagcctcatcctacatctggcagattctgtagctggttctgtaaaggttggtggagaggcaggtccatctgtcacactaccctgccactacagtggagctgtcacatcaatgtgctggaatagaggctcatgttctctattcacatgccaaaatggcattgtctggaccaatggaacccacgtcacctatcggaaggacacacgctataagctattgggggacctttcaagaagggatgtctctttgaccatagaaaatacagctgtgtctgacagtggcgtatattgttgccgtgttgagcaccgtgggtggttcaatgacatgaaaatcaccgtatcattggagattgtgccacccaaggtcacgactactccaattgtcacaactgttccaaccgtcacgactgttcgaacgagcaccactgttccaacgacaacgactgttccaatgaacgactgttccaacgacaactgttccaacaacaatgagcattccaacgacaacgactgttcngacgacaatgactgtttcaacgacaacgagcgttccaacgacaacgagcattccaacaacaacaagtgttccagtgacaacaactgtctctacctttgttcctccaatgcctttgcccaggcagaaccatgaaccagtagccacttcaccatcttcacctcagccagcagaaacccaccctacgacactgcagggagcaataaggagagaacccaccagctcaccattgtactcttacacaacagatgggaatgacaccgtgacagagtcttcagatggcctttggaataacaatcaaactcaactgttcctagaacatagtctactgacggccaataccactaaaggaatctatgctggagtctgtatttctgtcttggtgcttcttgctcttttgggtgtcatcattgccaaaaagtatttcttcaaaaaggaggttcaacaactaagtgtttcatttagcagccttcaaattaaagctttgcaaaatgcagttgaaaaggaagtccaagcagaagacaatatctacattgagaatagtctttatgccacggactaagacccagtggtgctctttgagagtttacgcccatgagtgcagaagactgaacagacatcagcacatcagacgtcttttagaccccaagacaatttttctgtttcagtttcatctggcattccaacatgtcagtgatactgggtagagtaactctctcactccaaactgtgtatagtcaacctcatcattaatgtagtcctaattttttatgctaaaactggctcaatccttctgatcattgcagagttttctctcaaacatgaacactttagaattgtatgttctctttagaccccataaatcctgtat

SEQ ID NO: 271401 - DNA, 1658 bp, Homo sapiens
  misc_feature (1049)..(1049): n is a, c, g, or t
gagtagctgggactacaggcgccagtgaccacgcccggctaattttttgtatttttagtagagacggggtttcacccttttagccaggatggtctcgatctcctgacttcgtgatctgcccgccttggcctcccaaagtgctaggattacaggtttgagccaccgcgcccggccctgtttcctttttgtttgttcccctgataccctgtatcaggaccaggagtcagtttggcggttatgtgtggggaagaagctgggaagtcaggggctgtttctgtggacagctttccctgtcctttggaaggcacagagctctcagctgcagggaactaacagagctctgaagccgttatatgtggtcttctctcatttccagcagagcaggctcatatgaatcaaccaactgggtgaaaagataagttgcaatctgagatttaagacttgatcagataccatctggtggagggtaccaaccagcctgtctgctcattttccttcaggctgatcccataatgcatcctcaagtggtcatcttaagcctcatcctacatctggcagattctgtagctggttctgtaaaggttggtggagaggcaggtccatctgtcacactaccctgccactacagtggagctgtcacatcaatgtgctggaatagaggctcatgttctctattcacatgccaaaatggcattgtctggaccaatggaacccacgtcacctatcggaaggacacacgctataagctattgggggacctttcaagaagggatgtctctttgaccatagaaaatacagctgtgtctgacagtggcgtatattgttgccgtgttgagcaccgtgggtggttcaatgacatgaaaatcaccgtatcattggagattgtgccacccaaggtcacgactactccaattgtcacaactgttccaaccgtcacgactgttcgaacgagcaccactgttccaacgacaacgactgttccaatgaacgactgttccaacgacaactgttccaacaacaatgagcattccaacgacaacgactgttcngacgacaatgactgtttcaacgacaacgagcgttccaacgacaacgagcattccaacaacaacaagtgttccagtgacaacaactgtctctacctttgttcctccaatgcctttgcccaggcagaaccatgaaccagtagccacttcaccatcttcacctcagccagcagaaacccaccctacgacactgcagggagcaataaggagagaacccaccagctcaccattgtactcttacacaacagatgggaatgacaccgtgacagagtcttcagatggcctttggaataacaatcaaactcaactgttcctagaacatagtctactgacggccaataccactaaaggaatctatgctggagtctgtatttctgtcttggtgcttcttgctcttttgggtgtcatcattgccaaaatgtttcatttagcagccttcaaattaaagctttgcaaaatgcagttgaaaaggaagtccaagcagaagacaatatctacattgagaatagtctttatgccaccgcgcccggccctgtttcctttttgtttgttcccctgataccctgtatcaggaccaggagtcagtttggcggttatgtgtggggaagaagc

SEQ ID NO: 271402 - DNA, 1535 bp, Homo sapiens
  misc_feature (701)..(701): n is a, c, g, or t
gagtagctgggactacaggcgccagtgaccacgcccggctaattttttgtatttttagtagagacggggtttcacccttttagccaggatggtctcgatctcctgacttcgtgatctgcccgccttggcctcccaaagtgctaggattacaggctgatcccataatgcatcctcaagtggtcatcttaagcctcatcctacatctggcagattctgtagctggttctgtaaaggttggtggagaggcaggtccatctgtcacactaccctgccactacagtggagctgtcacatcaatgtgctggaatagaggctcatgttctctattcacatgccaaaatggcattgtctggaccaatggaacccacgtcacctatcggaaggacacacgctataagctattgggggacctttcaagaagggatgtctctttgaccatagaaaatacagctgtgtctgacagtggcgtatattgttgccgtgttgagcaccgtgggtggttcaatgacatgaaaatcaccgtatcattggagattgtgccacccaaggtcacgactactccaattgtcacaactgttccaaccgtcacgactgttcgaacgagcaccactgttccaacgacaacgactgttccaatgaacgactgttccaacgacaactgttccaacaacaatgagcattccaacgacaacgactgttcngacgacaatgactgtttcaacgacaacgagcgttccaacgacaacgagcattccaacaacaacaagtgttccagtgacaacaactgtctctacctttgttcctccaatgcctttgcccaggcagaaccatgaaccagtagccacttcaccatcttcacctcagccagcagaaacccaccctacgacactgcagggagcaataaggagagaacccaccagctcaccattgtactcttacacaacagatgggaatgacaccgtgacagagtcttcagatggcctttggaataacaatcaaactcaactgttcctagaacatagtctactgacggccaataccactaaaggaatctatgctggagtctgtatttctgtcttggtgcttcttgctcttttgggtgtcatcattgccaaaatgtttcatttagcagccttcaaattaaagctttgcaaaatgcagttgaaaaggaagtccaagcagaagacaatatctacattgagaatagtctttatgccacggactaagacccagtggtgctctttgagagtttacgcccatgagtgcagaagactgaacagacatcagcacatcagacgtcttttagaccccaagacaatttttctgtttcagtttcatctggcattccaacatgtcagtgatactgggtagagtaactctctcactccaaactgtgtatagtcaacctcatcattaatgtagtcctaattttttatgctaaaactggctcaatccttctgatcattgcagagttttctctcaaacatgaacactttagaattgtatgttctctttagaccccataaatcctgtat

SEQ ID NO: 271403 - DNA, 1286 bp, Homo sapiens
  misc_feature (452)..(452): n is a, c, g, or t
taggtctaggtggaggctggccctggctaatcggccgaggctacagtggagctgtcacatcaatgtgctggaatagaggctcatgttctctattcacatgccaaaatggcattgtctggaccaatggaacccacgtcacctatcggaaggacacacgctataagctattgggggacctttcaagaagggatgtctctttgaccatagaaaatacagctgtgtctgacagtggcgtatattgttgccgtgttgagcaccgtgggtggttcaatgacatgaaaatcaccgtatcattggagattgtgccacccaaggtcacgactactccaattgtcacaactgttccaaccgtcacgactgttcgaacgagcaccactgttccaacgacaacgacttgttccaacgacaactgttccaacaacaatgagcattccaacgacaacgactgttcngacgacaatgactgtttcaacgacaacgagcgttccaacgacaacgagcattccaacaacaacaagtgttccagtgacaacaactgtctctacctttgttcctccaatgcctttgcccaggcagaaccatgaaccagtagccacttcaccatcttcacctcagccagcagaaacccaccctacgacactgcagggagcaataaggagagaacccaccagctcaccattgtactcttacacaacagatgggaatgacaccgtgacagagtcttcagatggcctttggaataacaatcaaactcaactgttcctagaacatagtctactgacggccaataccactaaaggaatctatgctggagtctgtatttctgtcttggtgcttcttgctcttttgggtgtcatcattgccaaaatgtttcatttagcagccttcaaattaaagctttgcaaaatgcagttgaaaaggaagtccaagcagaagacaatatctacattgagaatagtctttatgccacggactaagacccagtggtgctctttgagagtttacgcccatgagtgcagaagactgaacagacatcagcacatcagacgtcttttagaccccaagacaatttttctgtttcagtttcatctggcattccaacatgtcagtgatactgggtagagtaactctctcactccaaactgtgtatagtcaacctcatcattaatgtagtcctaattttttatgctaaaactggctcaatccttctgatcattgcagagttttctctcaaacatgaacactttagaattgtatgttctctttagaccccataaatcctgtat

SEQ ID NO: 271404 - DNA, 1438 bp, Homo sapiens
  misc_feature (570)..(570): n is a, c, g, or t
acccagcattgtgagtgacagagcctggatctgaacgctgatcccataatgcatcctcaagtggtcatcttaagcctcatcctacatctggcagattctgtagctggttctgtaaaggttggtggagaggcaggtccatctgtcacactaccctgccactacagtggagctgtcacatcaatgtgctggaatagaggctcatgttctctattcacatgccaaaatggcattgtctggaccaatggaacccacgtcacctatcggaaggacacacgctataagctattgggggacctttcaagaagggatgtctctttgaccatagaaaatacagctgtgtctgacagtggcgtatattgttgccgtgttgagcaccgtgggtggttcaatgacatgaaaatcaccgtatcattggagattgtgccacccaaggtcacgactactccaattgtcacaactgttccaaccgtcacgactgttcgaacgagcaccactgttccaacgacaacgacttgttccaacgacaactgttccaacaacaatgagcattccaacgacaacgactgttcngacgacaatgactgtttcaacgacaacgagcgttccaacgacaacgagcattccaacaacaacaagtgttccagtgacaacaactgtctctacctttgttcctccaatgcctttgcccaggcagaaccatgaaccagtagccacttcaccatcttcacctcagccagcagaaacccaccctacgacactgcagggagcaataaggagagaacccaccagctcaccattgtactcttacacaacagatgggaatgacaccgtgacagagtcttcagatggcctttggaataacaatcaaactcaactgttcctagaacatagtctactgacggccaataccactaaaggaatctatgctggagtctgtatttctgtcttggtgcttcttgctcttttgggtgtcatcattgccaaaaagtatttcttcaaaaaggaggttcaacaactaagtgtttcatttagcagccttcaaattaaagctttgcaaaatgcagttgaaaaggaagtccaagcagaagacaatatctacattgagaatagtctttatgccacggactaagacccagtggtgctctttgagagtttacgcccatgagtgcagaagactgaacagacatcagcacatcagacgtcttttagaccccaagacaatttttctgtttcagtttcatctggcattccaacatgtcagtgatactgggtagagtaactctctcactccaaactgtgtatagtcaacctcatcattaatgtagtcctaattttttatgctaaaactggctcaatccttctgatcattgcagagttttctctcaaacatgaacactttagaattgtatgttctctttagaccccataaatcctgtat

SEQ ID NO: 271405 - DNA, 1883 bp, Homo sapiens
  misc_feature (1049)..(1049): n is a, c, g, or t
gagtagctgggactacaggcgccagtgaccacgcccggctaattttttgtatttttagtagagacggggtttcacccttttagccaggatggtctcgatctcctgacttcgtgatctgcccgccttggcctcccaaagtgctaggattacaggtttgagccaccgcgcccggccctgtttcctttttgtttgttcccctgataccctgtatcaggaccaggagtcagtttggcggttatgtgtggggaagaagctgggaagtcaggggctgtttctgtggacagctttccctgtcctttggaaggcacagagctctcagctgcagggaactaacagagctctgaagccgttatatgtggtcttctctcatttccagcagagcaggctcatatgaatcaaccaactgggtgaaaagataagttgcaatctgagatttaagacttgatcagataccatctggtggagggtaccaaccagcctgtctgctcattttccttcaggctgatcccataatgcatcctcaagtggtcatcttaagcctcatcctacatctggcagattctgtagctggttctgtaaaggttggtggagaggcaggtccatctgtcacactaccctgccactacagtggagctgtcacatcaatgtgctggaatagaggctcatgttctctattcacatgccaaaatggcattgtctggaccaatggaacccacgtcacctatcggaaggacacacgctataagctattgggggacctttcaagaagggatgtctctttgaccatagaaaatacagctgtgtctgacagtggcgtatattgttgccgtgttgagcaccgtgggtggttcaatgacatgaaaatcaccgtatcattggagattgtgccacccaaggtcacgactactccaattgtcacaactgttccaaccgtcacgactgttcgaacgagcaccactgttccaacgacaacgactgttccaatgaacgactgttccaacgacaactgttccaacaacaatgagcattccaacgacaacgactgttcngacgacaatgactgtttcaacgacaacgagcgttccaacgacaacgagcattccaacaacaacaagtgttccagtgacaacaactgtctctacctttgttcctccaatgcctttgcccaggcagaaccatgaaccagtagccacttcaccatcttcacctcagccagcagaaacccaccctacgacactgcagggagcaataaggagagaacccaccagctcaccattgtactcttacacaacagatgggaatgacaccgtgacagagtcttcagatggcctttggaataacaatcaaactcaactgttcctagaacatagtctactgacggccaataccactaaaggaatctatgctggagtctgtatttctgtcttggtgcttcttgctcttttgggtgtcatcattgccaaaatgtttcatttagcagccttcaaattaaagctttgcaaaatgcagttgaaaaggaagtccaagcagaagacaatatctacattgagaatagtctttatgccacggactaagacccagtggtgctctttgagagtttacgcccatgagtgcagaagactgaacagacatcagcacatcagacgtcttttagaccccaagacaatttttctgtttcagtttcatctggcattccaacatgtcagtgatactgggtagagtaactctctcactccaaactgtgtatagtcaacctcatcattaatgtagtcctaattttttatgctaaaactggctcaatccttctgatcattgcagagttttctctcaaacatgaacactttagaattgtatgttctctttagaccccataaatcctgtat

SEQ ID NO: 271406 - DNA, 1798 bp, Homo sapiens
  misc_feature (964)..(964): n is a, c, g, or t
gagtagctgggactacaggcgccagtgaccacgcccggctaattttttgtatttttagtagagacggggtttcacccttttagccaggatggtctcgatctcctgacttcgtgatctgcccgccttggcctcccaaagtgctaggattacaggtttgagccaccgcgcccggccctgtttcctttttgtttgttcccctgataccctgtatcaggaccaggagtcagtttggcggttatgtgtggggaagaagctgggaagtcaggggctgtttctgtggacagctttccctgtcctttggaaggcacagagctctcagctgcagggaactaacagagctctgaagccgttatatgtggtcttctctcatttccagcagagcaggctcatatgaatcaaccaactgggtgaaaaggctgatcccataatgcatcctcaagtggtcatcttaagcctcatcctacatctggcagattctgtagctggttctgtaaaggttggtggagaggcaggtccatctgtcacactaccctgccactacagtggagctgtcacatcaatgtgctggaatagaggctcatgttctctattcacatgccaaaatggcattgtctggaccaatggaacccacgtcacctatcggaaggacacacgctataagctattgggggacctttcaagaagggatgtctctttgaccatagaaaatacagctgtgtctgacagtggcgtatattgttgccgtgttgagcaccgtgggtggttcaatgacatgaaaatcaccgtatcattggagattgtgccacccaaggtcacgactactccaattgtcacaactgttccaaccgtcacgactgttcgaacgagcaccactgttccaacgacaacgactgttccaatgaacgactgttccaacgacaactgttccaacaacaatgagcattccaacgacaacgactgttcngacgacaatgactgtttcaacgacaacgagcgttccaacgacaacgagcattccaacaacaacaagtgttccagtgacaacaactgtctctacctttgttcctccaatgcctttgcccaggcagaaccatgaaccagtagccacttcaccatcttcacctcagccagcagaaacccaccctacgacactgcagggagcaataaggagagaacccaccagctcaccattgtactcttacacaacagatgggaatgacaccgtgacagagtcttcagatggcctttggaataacaatcaaactcaactgttcctagaacatagtctactgacggccaataccactaaaggaatctatgctggagtctgtatttctgtcttggtgcttcttgctcttttgggtgtcatcattgccaaaatgtttcatttagcagccttcaaattaaagctttgcaaaatgcagttgaaaaggaagtccaagcagaagacaatatctacattgagaatagtctttatgccacggactaagacccagtggtgctctttgagagtttacgcccatgagtgcagaagactgaacagacatcagcacatcagacgtcttttagaccccaagacaatttttctgtttcagtttcatctggcattccaacatgtcagtgatactgggtagagtaactctctcactccaaactgtgtatagtcaacctcatcattaatgtagtcctaattttttatgctaaaactggctcaatccttctgatcattgcagagttttctctcaaacatgaacactttagaattgtatgttctctttagaccccataaatcctgtat

SEQ ID NO: 271407 - DNA, 343 bp, Homo sapiens
atctgtactaggggccaaaaaactttatgaaacgcagatagaaaacagtttaggcttttctgggccctatgtctccatcgtaactgttctaccttgtcattatagagtagaagaagccatatataaatgaataaacgtgaccatattccaataaaactttatttatgggcactgaaacttgaatgttatgtcacattcatgtttcacaaaatattattttagattgtttttcaacaatttagaagtgtaaagacatgtctagcctacagagtgtacaaaaacaggtggtgggccagatttagctcctatgtatagtttgctcacctatggttcatacaatgta

SEQ ID NO: 271408 - DNA, 447 bp, Homo sapiens
ttttttaacagtctcctgggagattaagatgagtgatctagaggaggaagatgttgatgaattcagctccagtggttttaagtgcccaacatgctttgcagtgcaaggaaggaaatgcgatacagaactcaaatggtgtgcagcagataaaataaagtgtattgaattctctggcatcataaacacaggtattcgtgacgtagccattgaaatgaagagatgcacacaagcagacctatgcaaagagacgataacttcttagatgggttttccaattgctaacaagagtagaaattgcaaatcagccatcagaaatggggccagaatcagacccccatctcccatcttctttgttcttttcctggggagggtacttcatggagctctggcaagagcctagccacttccatttatgaattaaacctgaatttttttgttaaaatattc

SEQ ID NO: 271409 - DNA, 403 bp, Homo sapiens
agcccattaaagcagcttggaatggggctgtaccctgcaaaggcacaggggcagaactgcccaagaccatgggagcctacttcttgcaccagtgtgacctgaatgtgagacacagggtcaaaggagattattttggagctttaaaattcaatgactaccctgctggattctggacttgcatggggcctttagcccttttgttttgtccagttctcctatttggaataggagcatcctcatccaatgcctgtaccctcattgtatcttagaagtaattaacttgcttatgattttataggccatgctaatcagcattcagttccagattccaatttattctcagtgtgcctgtataaattttctttccatatatatagaattaaatttctattacttatttgaa

SEQ ID NO: 271410 - DNA, 416 bp, Homo sapiens
agtaatgagctgagccttggcccccagaagtttcccagaaatgaagccagtcaacggaacccaccttattccacaatcaaaccatcaaaggtgtcaaagaatataagagcaaaaaccccatccaaaggacagtgatatggtttggctctgtgtccccacccaaatgtcaccttgaataaatccccatgtgtcaagggcaggaccagaaggagataacttaatcatggggtgcttccccagtgagtgagctctcatgagatctgatgattttataaatgggaattcccctgcacaagctctcttgcttgacaccacgtaagacgtaattttgctcctcatttgccatgattgttaggcctccccagcctaacaatgtggaattgtgagcaaattaaacctctttccttataaattac

SEQ ID NO: 271411 - DNA, 645 bp, Homo sapiens
aacttctgaccttaaatgatctgcccgcctcggcctcccagggtgctgggattgcaggtgtgagccaccagcctggcctctagttattttttacataatgttcagcatacaataaaaattaggagacatgtgaagagaaaggaaaatgtgaccaatggtcaagagaaaaaagaaaacagtagaagcagaaacaaatataagccaattgtttaagttcacaggcaagaactttaaaataatcacaattttatttttaaaaaatagaggaaaagatggaaagtagatgagaagaatttcaacagagaattggaatagagacaaaaacttctagaacagaaccctctgaatgggtttaacagcaaattggacacagcaggagacaagattagtgaattcaaagacagatcaataggctgggcactgtgactcacacctgtaatcccagcactttgggaggctgaggcgagtgaatcagctgaggtcaggagtttgagaccaacctgaccaacatggtgaaaccctgtctctactaaaatacaaaattagccgggcgtggtggtgggtgcctgtaatcccagctactctggaggctcaggcagaagaatcgcttgaacccgggaggcgcaggttgcagtgagccgagat

SEQ ID NO: 271412 - DNA, 496 bp, Homo sapiens
catgtggggaggaagaggaagggtaaaccctttaaaaaataataatatatagaaagtataaagtaagaaatgtcaatgtatgccaagcatacattggaaaaagatcactgcttataagtccaccacccatgggtaggtctgttcagttatttgctgcgtgccaggcactgtgctgagcaggtgccatgtactctctgatcatcataggagtgcccgtagtaggccctgtgatggttcagcagataaggaaaggagactcactgagccagggtttctttccgggcctgccatttgcccacactctgcccctcccccaggaacagtccgtcaccactggactcttggaagcataatttcagaagtcaggaagctcaggcagtttgcagagggagtaaacactttctgagagtcagaaagtgtggggatgcacctgcagaatgtctgcttaccacgccaaaaaagcctgggcttttccctgcctttgtgtgggaagggg

SEQ ID NO: 271413 - DNA, 430 bp, Homo sapiens
aataagtatttttagttgctgagaccagatcaacctatatagaaaaataaatctggttccacttttacttcctatataggatatcattaacatattttccatatgaatagggactgtcatgtaccatatgttattcatcatatggcatcatgcctgtttcaaggcacattttaatatagcacaaaggcaaagagttttaaactggaatgtctgctgtgcattatggtttagactttctggttatcatgaagcctgattaagttagctttctacatgtataccatagaatgagctctcaacaaattacctagaaaagttaacttagcaagataaattttgggcaaaataaaagtaaactcgtagaattttagctcactttaggcaaggtcacagagattttgcagttgaagcacattttattggatgaaca

SEQ ID NO: 271414 - DNA, 455 bp, Homo sapiens
gtcaacctggaaagaactcaaacgcccttcaactggtgtatcatgactgtggtgatggctccacacatttatcaaaacccatagaaatgtataccaaaagaagcagatttgactatatggaaaatttttagaaaggatttgggggggaacccaaagtggaacacaaactttaaaaaatgaacgcaactatctttggccaggcacagtggctcgcacctgtaatcccagcactttgggaggccgaggcaagcgaatcacttgaggtcaggggttcaagaccaggctggccaacatggtgaaaccccatctctaaatacaaaaattagccgggcgtggtggcgcgtgcctgtagtcccagctactcgagaggctgagacatgagaattgctagaacctgggaggcagaaattggagtgagccaagatcgtgccactgcactccagcctgggtgacag

SEQ ID NO: 271415 - DNA, 461 bp, Homo sapiens
taaagagacaaggtcttgctctgtgctggagtgcaatcaaagctttgagcaagaagccttgaagcaaactgcagtcttgaactcccgggctcaaggaatcctcctgtcttagcatcctgagtagctaagactacaggcgtgtgccaccacacctgcctaatttttcttttttttgtgtggagttcggggtctcactacattgcccaggctggtcttgaaccccttggctcaagcaatcgtcctgccatggcctcccaaagtgctgagaacaggtgtgagcaaccatgcaccacgcccagccattataacaattattaatctactgattatggcatctaacatgcttgcaaaaatttcaggttttttcctttgggattatttcctctcaacacagtcctcaagaattaccaaatcaaaggggctgatggcaacacccactgtggttggttcatttaacgttc

SEQ ID NO: 271416 - DNA, 449 bp, Homo sapiens
aggaggagaaaagcggggcagcatcaaacccctcccactggggcaacctgctgagcatctccctggccttggccctggccataccacacaagtgtccaatgagtcactgatcctgaagaacaagagaagactgaccacagaccccaaaaggaagcaggagtacaaccttcgaagttggtgggcaacaagaggtcagaggttgacaagcatccacacagctctaagactagcatcatgtggctacccaggacctgggagagtgctgcagagcaggagcaggaaagggaccggctgttcccatagaacttcatgtcacaggtctgggagccagggggccttggttctagtcccaactctccctctaagttgtcttatggccacaggtgagtgaaatagcttctctggcctcagcttcctcacgattaaaatgacacagttgtgcaaaattg

SEQ ID NO: 271417 - DNA, 322 bp, Homo sapiens
acacatatataatatatatgtataaatatataatatacataattatatataagtataattatatatatacacacccacatatatatatctatgtaattttcttagtggttgtcctggggattaacattaacatcttaatttataacaatctaatttataacaattagattaatacctactcaatttcgatggtatacaaaacctttgctcctgtatagtctcatttgcttctttgtgctcttattgccacaaattacatctttatacattgtatgtccatcaacttaaatttacaattattgcattatgcagttgtttctca

SEQ ID NO: 271418 - DNA, 421 bp, Homo sapiens
agaaagatttctccaaagtggctgtaccattttacacccctgatgataatatattagtattctggtttctccatgttctcaccaacatttggtgctgttagtcttttgatttcagccattctagtggaagtgtggtggaatgtcattgtgttttctatttgcatttctctgattactgaagatgttgaggactagatatctaccattgcaaagcatccattcaagtttgtgcccccttttacaatggatttttctttttattgttgatttgtaggagttctttatatattctggatgtaagtcctttgtcagctacatgtactatatgtatatttttccaagcctgtacattacctatccattttgttaataatgtctatggatgaacaaaacataaattttgataaagcccaactttctc

SEQ ID NO: 271419 - DNA, 161 bp, Homo sapiens
aatctattataactgataacctgctttaacttaaatttattgtgttaattatattttcttactttgcagaagaaaagcaaatcacgtattatgttttctaggtaacagctattgaacctataattaatcatggaggagccagtgcaagcactcagcattta

SEQ ID NO: 271420 - DNA, 434 bp, Homo sapiens
caggagctgagtcgatatgggaatactatttgatgtatatatttctggattggtgattgaggaaaattaatttctctgacatgaaaattaatacttttagttgagttggaattataatttttgtaagaaaatagattattatgggccgggtgcagtggctcatacctgtaatcccagcactttgggaggctgaggcgggtggatcacctgaggtcgggagttggaaaccagcctgaccaacatggcgaaaccctgtctctactaaaaatacaaaatttgctgggtgtggtggtgcatgcctgtaatcccagctacttgggaggctgaggcaggagaatcgcttgaacctgggaggcagaggttgcagagagccgagattgggccattgtactccagcctgggcaacaagagcaaaactccgtcaaaaaaaaaaa

SEQ ID NO: 271421 - DNA, 228 bp, Homo sapiens
tcgccaagtctctcacttgcctgttgaccctcagtaatttagacttgaccaaatagtcctagtgaattaactactaagccctaagacacacattacttggtttttttgttgttgttgctgttgtttttgagatggagtgtcggctgtgacgcccaggctggagtgcagtggcgtgatctcagctcactgcaagctctgcctcacgggttcatgccattctcctgcctc

SEQ ID NO: 271422 - DNA, 496 bp, Homo sapiens
cttggtctgctttgccctccattaagcctggcatgaatggaagtgtggaagaagtataacgaaactgggatccatagagggttatctgcctagaagagggtcagcagtccagactagatcttgagtgtctgacatcagcgtgagcgactgtcctatcacatcagacgtgccgtgagagagaggactacagaggctgcacatccctgagaaaagcaagaagcccggatatcaggagatgtggggatgccgggtgttcacaccaatggcagaaagaggagtgacagaggtaacaccaggattctacaagacatctgagggtaaagagagaaggaaaataaaaaaacacaaacttgatgacaactattcagtttagtgcaatacagactgtgttaagtgcaggttaataaggagcagtgaagaaaagaggaaaataattaagctatttggacctgtgactagatgttgttataattaaaattctttcatttctcacttt

SEQ ID NO: 271423 - DNA, 373 bp, Homo sapiens
tctctctagacaatctattagatgaagactaggtgaggtgcaatttcaactttaagttgtatttgctatatacagattgggcatccctaatctgaaaatccagaatccaaaatgttctcagaatccagtactttttgagtgccaacatgatgcggctcaaacaagtgaaaaattttacacgtgacctaaagtgactggtcatagtcaaaatgcagaaacataacacagaatttagtcagcatccccagagaaaaataaatgacctcaagctatgtatatgaggtatatatgaaacataaatgaattttgcatttgaacttgtgtcctcttcccaatatattgtatcatctaaatgcaaatattccaaaatctg

SEQ ID NO: 271424 - DNA, 364 bp, Homo sapiens
caataaaatcacatcatcccatgtggctagaaagggagagaaacttgaaatcatgctgaaccataataatggtaaaggcaaagtctgaaatgagtaaatgaagacagcctgcatttaaagccacaggaaaaaaaattctagaacaatactatcttagaatctaccatgaatctatttctcagataacttcagtatttgaattaagcatattgattccactgatttgttgattctgttgaggatatatccctatgatgtccctgggaagcgatggggcattcccagtcatctgggatgtgcagtttctaaatattatcaatggcgcctcattcattttacacaaataaaactcgatagaaaaata

SEQ ID NO: 271425 - DNA, 604 bp, Homo sapiens
tacagagaaaccgttatgtaactgattattaccatttttgtgtatacattttatttaaagaataatattttgaagaatatgaaacatctagttctaatggctttaaaatttacttacagcaaaaaattacttagtattttgaattaaagaaaggaaattattataatattttattagataaaacgtgaagctttaatatatagctgaattacattgaatgaatttaacatgtaaagtctcagtgcaagagtatgaaattcatatttttgttatgacattgtttatagcaattactagaaagctaatttagttgtagcatatgtgaattttaaatatagtctcatttcccatttaaatatggatcaagttcattatagttatcatatggaaactcttgccaataagtctagataaaatctgaaataaaacctaagtatcaaaaggaaaactgaaagccctttcctttagctctaattgaaagcaaataaaattttggttagtagtattttcatggacttatttattattacgcaaaatgtcattgaaatgtgaaagcaagaagaattgattagtaagttgtgtttaaattttaattccccacaaa

SEQ ID NO: 271426 - DNA, 358 bp, Homo sapiens
tgcagaaacacaatttctcctggggctgatatttgagagtcaaatttcctgcagtttagatatttccaccagcaaaatgtggataggctataaggctgacaactgtgtccaaagcaataatcgcttgagaacttttccatgtgccccatcactctgcattgtacagcatattctttaacacatttatttcatttttcaattcactaagtgcttgctgagcacttgcccattttcctttatttgcaaaatgcaggaatttaacctatctttgagtacaatttaggaatatggtctaagtttctatgatacaatgttgccatttaaaaataaatgtaacataatgctcctaccccctttt

SEQ ID NO: 271427 - DNA, 416 bp, Homo sapiens
ccacaggaattttccatctctattataaccttataggaccaccattttatatgcagtccatcattgtctgaaatgtcattatgactgtatatacaggatctatatgagaaaaaccacaaaactctgatgaaagacatcaaagaagaactaaataaaatggagagatatttcacattcacagataggaagactcaatgtgtgtgtgtgtgtgtgtgtattttgttttttttttttggtagagaccttgtgtctacaaaaaaaatacaaaaattagccaagcatgctaatgcacacttgtactctcagctactcaggaggctgaggtgggaggatcacttgagcttggtaattcaaggcttctgtgagccatgaccacaccaccgcactccagcctgggagacagagtgagaccctgt

SEQ ID NO: 271428 - DNA, 287 bp, Homo sapiens
tcttggtgactctagagccagaagtcaacagtgggatggacagatcatctccagctcctgtcttcaaaacgcacctgtgttttaacggctccccagggaaggagatccagtcactggctaacattctgcgatggtgtctgatagccctcaccagctccagaatgttcctatccctcttaggctttctttttgtatcttcatcactctgacgttggtgcgctttcaggccctgtttgctgcaaccctgactggaacctccacatttaagttcctaatgaaatcttctc

SEQ ID NO: 271429 - DNA, 229 bp, Homo sapiens
atttatagcttaaaacagtaaactttacatactgtatatactactataactttctctcctgaacctaattaggaaaaaataagttattgtacagattttcagggtcttttaaacataatcttaggtgagaggagaaagctttctaaatagggtacagaacccagaacacatatggggaaaaattgaaaatttttatcaaatgaaaattagtataacccaaaacatgact

SEQ ID NO: 271430 - DNA, 823 bp, Homo sapiens
tggtctcgaactcctgacctcatgatccacccacctcagcttcccgaagtgctgtgattacaggcatgagccacagcacacagcccatctttttttaaactatgttgtttaatcatcacaaatctattcatctatccactcctttatttatctatccacctcttatttgtacacatttcaaagtaaactatagacatctgtatacttatctttaaatatttcaatatgtacatcattaactggtgttaagtatttctttatagcttttcctcttggtggaaagtttacatacaaagaaatgtacacattttaagtacatgttcactgggttttgacaagtacatgcatcagcaaaacccaaaaccctatcaagatagagaatgtgcccgggcgtggtggctcacgcctgtttttccagcactttgggaggccaaggctggaggattgcttgaacccagaagttcgagaccaacttgggcaacatggtgaaaccccatctctaccaaaaaaacataaaaaaaaaaaaaaaaaaactttgttggggggccttgggcccttgaagaaagcttttcaaaaaccattctggtttggggcgcgcggggcccaagttaggttagcgcaacacctgcgcccaaccggtgttcccaagggagaaccgtgcggccaggaccacagcgggcttgtggtttctccacccaatataaaaaaacgcgcggcggggacacccgggccgtgtccgtaacacaactcccaagggggcgtcgagaaggcccatacgggggggctatcacacagagagtccaagcagaactgatatgactag

SEQ ID NO: 271431 - DNA, 841 bp, Homo sapiens
ttttcttcagtggtacatcctacataattacagtgcaatagcaaaatgaggcaattggcatgggtgctgttagtaccatccatagaccatattcagatctcatcactttcacatgcacccatttgtgtgtgtgtgtgtgtgtgtgtgtggtttagtgcagtttcatcatacatatgggtttatgtatccaacatcacaatcaagataactgttccactacctcacagatccctaatgctgcccattatagtcatacccatctctcttccctcctccccatccctaataccagtcagccactagtctcttctccagctctagaatttcatcatttcagtaatgctatataaatggaatcatagggcatgtaatccttgggattggctttcttcacttagcataattctccaaactcttgtgtatttcaatagtctattcctttttattgctaagtagtagtccatggtatggatggaccacggtttgtttaatccatccgaggacctttttaaaatacttgtgcccagatgcagtggctcactcctgtaatcccggcacttggtgaggtcgaggcgggaggattgcttgaccccaggaattcgagaccatactgggcaacatggcaaaaccctgtctctacccaaaatacaaaaattagctgggcgtggtggtgcacacctgtagtcccagctacttgggagactgagatcagaggatggtttgagcctgggaggcagaggttgcagtaagctgagattgtgccactgcactccagcctgggcaacagagccaggccttgtctcaacaatcaatcaatcgatcgtgtgttcctgatattaaa

SEQ ID NO: 271432 - DNA, 1223 bp, Homo sapiens
ttttcttcagtggtacatcctacataattacagtgcaatagcaaaatgaggcaattggcatgggtgctgttagtaccatccatagaccatattcagatctcatcactttcacatgcacccatttgtgtgtgtgtgtgtgtgtgtgtgtggtttagtgcagtttcatcatacatatgggtttatgtatccaacatcacaatcaagataactgttccactacctcacagatccctaatgctgcccattatagtcatacccatctctcttccctcctccccatccctaataccagtcagccactagtctcttctccagctctagaatttcatcatttcagtaatgctatataaatggaatcatagggcatgtaatccttgggattggctttcttcacttagcataattctccaaactcttgtgtatttcaatagtctattcctttttattgctaagtagtagtccatggtatggatggaccacggtttgtttaatccatccgaggacctttttaatcatcacaaatctattcatctatccactcctttatttatctatccacctcttatttgtacacatttcaaagtaaactatagacatctgtatacttatctttaaatatttcaatatgtacatcattaactggtgttaagtatttctttatagcttttcctcttggtggaaagtttacatacaaagaaatgtacacattttaagtacatgttcactgggttttgacaagtacatgcatcagcaaaacccaaaaccctatcaagatagagaatgtgcccgggcgtggtggctcacgcctgtttttccagcactttgggaggccaaggctggaggattgcttgaacccagaagttcgagaccaacttgggcaacatggtgaaaccccatctctaccaaaaaaacataaaaaaaaaaaaaaaaaaactttgttggggggccttgggcccttgaagaaagcttttcaaaaaccattctggtttggggcgcgcggggcccaagttaggttagcgcaacacctgcgcccaaccggtgttcccaagggagaaccgtgcggccaggaccacagcgggcttgtggtttctccacccaatataaaaaaacgcgcggcggggacacccgggccgtgtccgtaacacaactcccaagggggcgtcgagaaggcccatacgggggggctatcacacagagagtccaagcagaactgatatgactag

SEQ ID NO: 271433 - DNA, 261 bp, Homo sapiens
catttgttagtggcatactcagaaaataactaattagggctgagctcggtggctcatgcctgtaatcccagcactctgggaggccgacatgggaggactgcttgaatccaggaattcaagaccagcttgggcaacatagtgagacccggtctctacaaaaaaaaagtatctggctgtggtggtgcgcacttgtagttctcctacttaagaggccgagactggaggattacttgagcttcagcccaggagttcaaggctgca

SEQ ID NO: 271434 - DNA, 262 bp, Homo sapiens
aaaaaattaatgtcctaaattatatcatgaacaataagtttcagaaaaatggaagcaaatatgaggaatatttttacaaatttgttagttggggggagtcataagccaaacttttgactacataaaatcttaaagctttaatacagtgaaagacatcatgttacaaaataatggacagaagagacctgcaacaatagaagagacaaaggattaactgtgcagggacatatgtaattttacatgtatgtgcacacatctctgt

SEQ ID NO: 271435 - DNA, 501 bp, Homo sapiens
gcctccatctgggcacatgtttcagttgttttctaaataccaagagcacagattgctcagtaataatagctctcctgcaaatctggaatcacttaggcagctgcagtgcctctaagcctccttgcatccaaggctgtgatcaaggaggactggtgtctgagtgggcttgagaagggcccggagaacagcgggtttcctgatcacaaatcagcctgtcattcagcatgtgttcccttggtgactcagggcgatatctgcccttctccggaggtcaagggctcatcgtgtcaattgtggtcttgagtttgttttttttttcctcttgaaatcattgtaattaagctaaaagtatagtgttggtatccagcacatgtttgcaaagtatttaacaatgagcaaaaactttaagaataaattaaagcatctagtttactttttgccaacagccaggttcctgctagaaatgattttgaaataaatgttgtcttggaaatagaaacc

SEQ ID NO: 271436 - DNA, 345 bp, Homo sapiens
aacaatatatctgcaaaagaatagacagaccaggcaacacaaagaagaaaggattttttaaagtgaattgaaattttatttttatacaaaaacctgcgtgtgaatcttacattacagggttattcataattgtcaaaaactggaaaccaccagctgcccttcaacaggtgaatgaagaaacactactaaattagtgagtgatactttaagagaaacatgatgttttatagcctcaaaatatctcactgcaggccagtcatggtggctcgcgtctgtagtcccagcactttgagaggcaaaggtgggtggatcgcctgagcccaagagtttgagaccaacatggac

SEQ ID NO: 271437 - DNA, 453 bp, Homo sapiens
taactgatgaccagaactccagctgccaggaagtcttggaaatgtggttttcatgtttctagtttgtgaaatacagaaggacacacaagcaggagattggaaaggataccaagagcctatcaatattgtactcttccacacacccaccatactgccactccatatctgatacctcttgccacccgtatttaagtggtcacacaataacaacgtcatagtaggcatatcccacctaatgtaatgtaactatcccttgcccaaggtaacatgtacttacctgtctcaaaaaaagggagacctgagctgggcgtggtggtgcgtgcctgtgatcccagctactcgggaggctgggacaggagaattgcttgggtctgggaggtggaggttgcagtgagctgagatcacaccactgcactccagcctggtgacagagtgagactccatctcaaaaaa

SEQ ID NO: 271438 - DNA, 479 bp, Homo sapiens
tagggctactagaaaatttagctgggtgaggtggttcacacctgtaatcccagcactttgggaggccaagacatttccctacatacctagaattttgtttacgatgaacagaatgttgggtaagagtctcttgagctgaaacagttacacccccgcagctgggaaaagctattccctctgcattaggccaacgggaagcccacacctcctgatacaacccataccacggttgccttcccctcctggatgtcacagagaaggatttaaaaatgactcccggccagcatggtgtctcatgctcagcacattgggaggcctagacgggaagattgcttgagggcagcagttcaaggcaagcctgggcaacatagggagaccctgtccctattatttttttttttgatgttaaaaaaaatttaatttaattaaataaaaatggttcccaagtcaaagagaataaagaaccacagaagttaggt

SEQ ID NO: 271439 - DNA, 379 bp, Homo sapiens
ctgggtcatgaacagcatccaataatggaaagagtcaagttggtttcataaaaaaccacatggagtggaattcctgccagaagaaaggattctctgaccaacagaagggggcaacagtgcttggcaggccaaagtaacagacgtccactatacttactttctaaatttgcttgttcattgatataagtttgaacaaggccaatgacagcttctgtcacaaaactaggaaactttatcagtgtgatttcagtttattagaatagtgcttgtgatctatcatataaccaaatgtctctatattgtccacaagaaattcataagaaactatgtttaatattttttattttcccgttccattaatccaataacctctatttta

SEQ ID NO: 271440 - DNA, 815 bp, Homo sapiens
atttttacctagaaacctttctagcctctcctcatctcttgactgtcttggccttggcaagaagaatacacgtccctacccagctatcttcagctcctgtccttcctcccagctgccagagaattgtcagcaggaggaatggcaccagctgtgacccggctccttttcctccagcttgttctggggccaactctggtcatggacatcaagatgcagattggcagcaggaacttctataccttaagcattgactatcccagggttaactacccaaagggtttccggggctattgtaatggtctgatgtcctatatgcgaggcaagatgcaaaattcagattgcccaaagatccattatgtgatacatgccccttggaaggccatccagaagttctgcaagtatagtgacagcttctgtgagaattacaatgaatactgcacactcacccaggattccctccccatcacggtctgctccctgagccaccaacagccacccactagctgctactacaatagcaccctaaccaaccagaagctctacctactctgctcccgcaagtatgaagctgatccaataggtatcgctggtctctattcgggaatttaattcctgagccactccccaacctctaccaccacaggccagctgtctccatttccaacactctgatccctgtaacaagacttccttcctgacttacgaggcaggcagggtcccctcccaagagaccaggtgggtgcgaaaatgtccagggctttgatcaccatgcaaagtggtgctatcttctaggttctttccagcttgtttacccc

SEQ ID NO: 271441 - DNA, 1021 bp, Homo sapiens
atttttacctagaaacctttctagcctctcctcatctcttgactgtcttggccttggcaagaagaatacacgtccctacccagctatcttcagctcctgtccttcctcccagctgccagagaattgtcagcaggaggaatggcaccagctgtgacccggctccttttcctccagcttgttctggggccaactctggtcatggacatcaagatgcagattggcagcaggaacttctataccttaagcattgactatcccagggttaactacccaaagggtttccggggctattgtaatggtctgatgtcctatatgcgaggcaagatgcaaaattcagattgcccaaagatccattatgtgatacatgccccttggaaggccatccagaagttctgcaagtatagtgacagcttctgtgagaattacaatgaatactgcacactcacccaggattccctccccatcacggtctgctccctgagccaccaacagccacccactagctgctactacaatagcaccctaaccaaccagaagctctacctactctgctcccgcaagtatgaagctgatccaataggtatcgctggtctctattcgggaatttaattcctgagccactccccaacctctaccaccacaggccagctgtctccatttccaacactctgatccctgtaacaagacttcctttttccaacctctttttcttccagtcttcttaccttggctcactggcatttcaaggtatcttctctcacccattccccagaggttcctgcttcccttctcttccagaagctcctcccaaatcccccagactccagagtctgcccctgaccaggcagcgaatgaggcaggcccggctctaatcgaacataaatttctaaaaccacatctgagtatgtaagatgtaaccattgggggaaactgggtgaagggcacacgagccccctctgtaccattttttgtaacttcctgtcaacccataatcaattcaaaataaaaagttaataacaca

SEQ ID NO: 271442 - DNA, 329 bp, Homo sapiens
tttggagatctgacatggtttggctctgtgtccccacccaaaaatctcatcttgaattgtaatccacatgtgtcaggggagggacctcctgggaggtgattggatcgtggggggcggtttcccccatgatgtttttgtgatagggagctctcacgggatctggttgtttgataagtgtctggcatttcccctgcattctctctctcacctgccgccatgtaagatgtgccctgcttccccttcaccttccaccatgattataagtttcctgaggcctccccagccatatggaactgtgagtcaattaaacctcttttgtttataaatta

SEQ ID NO: 271443 - DNA, 2050 bp, Homo sapiens
  misc_feature (1583)..(1583): n is a, c, g, or t
  misc_feature (1612)..(1612): n is a, c, g, or t
  misc_feature (1656)..(1656): n is a, c, g, or t
  misc_feature (1836)..(1836): n is a, c, g, or t
  misc_feature (1882)..(1882): n is a, c, g, or t
ttttttttttttccaaacaacagcattctaggcagaaagtcacaaaacaggaggaagcgagtctgattcccagcatcagataaactgctaaactctactgtgggtaagaacaaaactgtgcttaccagaaaacttaatttttatttcgatgaatttctaatagtgaaataaattactttaaagcacaacaaagaagaaagtcaacacccaaacgttcttgggctcaggaagtatggtgcttgacgggagggttaaaagctgtcagccctgaagacaggcaggaaagtctctctttatgaccccctcccagcaaggctgtgttttttcaacacttctaacccttctgcatgggaatcttggaatgtttttttgttttgttttgttttaaagagacaaggtctcgctatgttgcccaggctggagtgcagtggctattcacaggcgtaatcccactactgatcagcaggggaagttttaacctgttcgtttccaacctgggccaattcacccctccttaggcaacctggtggtcccctacttctgggaggtcatcatactgatggctgaacttggtgcagacacgtctctggcacagtgtgctacagcccaggactcttgggctcaagcgatcctcgtgcctcagcctcctgagtagctgggactccaggcatgtgccactgcattgtcctggaatgtctttttttttttttttttttttttttttaagtgtctcagttctcttagtttttgacagttccccggtattctcaaggtgatcatttaacacctaattaacaagtctattactggaattaattcaaatgagccaaacctagttttaattaaacctcaatctgctcagggtagtcttttttctcctacatcagtagctgcctgcaaggacccagttcctttcaaaacaaagaagtacaaaactctataaagcgttctgacattatttaaaaatgtatctattaaaatgtacctatctagttaatttggttccataatttggtcattctggcttaacattcaactattcaagcaatgttacaataaagtacttgaagaacccactgattttctggtattgccaatcatgcgtgcattcattcagtcattcaataaatttactgaaaggatcctagatgtcacacactaagctgggtgctatgcatgttattattaactacacctttggacagaaataaaatacatcaaagcacagctctggaaaatggaaaagcaaaattttagttgatttggtcaaacactttgccttgattcgtatgtagatactacagctaaatttccattagtggacatggattagtgatgtgtaaagtaaaagttagaatttcaaatgtctagtggaatttaacagaatttcctaggcctcattttttctactccctggcctgtgctcagtattcccactccaggtacaggcatcctggcagcacaattcccattcattattatctcacctgagatcctagtgaagttgcctttcaagatctgtcaacctagtcatatgtcctgttcttccttgggaaaaggatagaaactggaggggaaatgcngaaaaagttgggaggaaggggaaaggagngctcacaaagtcgtgtggaaactggatctcaccttcccttacangctgcagcttttctgaaggctctgtactctcaccaaagagcaacatttcttcacacaaaaagatgaaaacatttaacaataagcaaccacatatacatgtttaagccttactttcaataccaggtacttaatgtactctggaatccaacaataacaaagttttaatgataaatgtaatanattcactgacatggtttggatgtttgtccatctcaggatggaatgngatccccaatgacggaggtagggcctggtgggaggtgtgtggatcatggggaggatcctcgtgaatggcttgctgccatccttgggtaatgagtgagttctcgctctgagttctcccaagatctggttgtttaaaaaagcatggtacttctccttgagactgcatctc

SEQ ID NO: 271444 - DNA, 657 bp, Homo sapiens
gttaggatgttaagtgcttcaaatgaatacttaaacctaaattacaaacaagtggcaagatttgcaagctctcctttattctctgaaatgcgtacttcctcctccttatgtctgaggaaatcataccagatacgggccttagactgtccattccaaggaacaatgagaggtcttgcagttacaaatggaattctgtaaaataggataggtgaggaaaaagcactttttgatgtctactatttgccagtaccttaagtgctaaatatatacaaatgacagagaggtccctgcccttaagcagccaagagcctgtgagagtaagacagattgctaaaccactaataagctgatgttataattagtgagggaattatggtgatatagagattacagataaaatatttcttcctgggaagttttaagaaaaacttcacagtagaatgtgttgcagacaactggagagagggatcagggaggtgaggaggaggagtcagtaaaaaataaatacatgtactcgatctaaaatcctctccaataagctgaaatgcttttgcagataagactgacacacgctgacatatacacaaaaaagagataaaaatttatgctagtacttcataaaaggtcaaagtgaacataaccaagtggcaaaaatat

SEQ ID NO: 271445 - DNA, 470 bp, Homo sapiens
tcccagacctgcccggggctccctgggctgccactgcatgccgcctgttttgtggaagagcacctcgctgtcttttctgcttgcagacctgggagtgcaggaagcatgtcatcttcctctttcaggccccaaatctgtggatgttgctggaccataataaatgattgttgaggccgggtgcggtggctcacgcctgtaatcccagcactttgggaggccgaggtgggtggatcacctgaggttgggagtttgaggccagcctgaccaacatggtgaaactccgtctctactaaatacaaagttagccatgcgtggtggcgcatgcctgtaatcccagctacttgggaggctgaggaaggagaatcacttgaacccaggaggtggaggttgcggtgagccaagattgtgccattgcactccaacctgggcaacaagagtgaaactccgtctcaataaaaaatcataataaa

SEQ ID NO: 271446 - DNA, 432 bp, Homo sapiens
aaatgtacaaatatcttttattcctcaaaggaaaaagaagagttacacatgcctgtttctcaccaataagaggggtcagggcagagtgagtctgggagagagagttctaccaccacggttcccaaagcatcgtctaggggcctgttaggggagcccgaggtctaaactatttccacagtttcactaagatatgattttccttttccatcctcacattcgttagtgtgcagtgaagtgctccagaggccccagcatgctacattacagaagactgaactcaggagagatgaggaataatcccctccatcccaccagacaccaggagggtgtgccaaggtgtgagacatacagtccttactgtttttttgttttgttttgtgagacggagtttcactcttgtcccccaggctggagtgcaatggcgcgatctcg

SEQ ID NO: 271447 - DNA, 486 bp, Homo sapiens
atattcaatatacatctgtaagtgagcaactgacttacctctctctcataattatatttctattgtgaatttggaatactttaaaaaaagtaagggctttattaaatatgcaattaaaggattccaatcctgaaaatcattaatatctggacagaaaatgaagatgctccaaaaagaggcttatatttcatgaccaacagaagtgaagtttactaatgaatatgacatttggtataataccagtggagcttgtaactgagttgggatgtcagatagagaatatcagtgaacacaggtcacctttataatcaagaaatatgcttttaagatagaacaatcaagtagtttgaagttcccaaatgtatccttgaaatttgagctctgttctccaagtgcaactggtcatttccctgaccaagccaatacagagtaagggtctaacctcctgggaactggaatgtatcagctgtcggcaaaggatctgtg

SEQ ID NO: 271448 - DNA, 531 bp, Homo sapiens
aagctgggggagattgtgcctcccgcccctacagtaaggtttctgtgtggagacagtagaatataaaaataacacctccgctgtctgggatgttggcagccacttcaaaatcagacctctgtggcagcattttttccagaacacaaaagagctatcagcttcccagtttgcacaattcatcaagaaattatgcggggtcactggcacaaatgatgaggcatctcctggaagcttaacttcttatccatcccatctcttggacagatgatgccagttaattactttgaatgctcctccaccaagccaaggccagactcctgcaatcataggatggcaacaccacctctaaagcacagaacttcaggctttgcttcggaagtggcaccatggtctcttcattttccctttcttcaaggtcagaaaactgaagctgttaggagttttagtgttaagttccttccgaggatgttaattaggcttcaaactgttttgttctgagaaataaaaactaaactccagtcattcaagcta

SEQ ID NO: 271449 - DNA, 453 bp, Homo sapiens
atcactttccgatgagtcctcaatcagagtcagcttatggggaacccaatctaaaggcacagccaagttgttttccaaaatatttcttttactttacactcttgccctcaatgtttgtggtcccatttcctcactagtatttggtaccatcggtctaactttttgtcaagtgtgttgctttaattactttgtattgactaaatttatatgttaactatgcatattaactttttggagtgatcactaaaataatgtaaatagaatgtataacttcttaatgagtagaaaaaagtaatgaattaatacaaggaacttagaacgttttaattacaaataattgcctcccagggtaaatgttcttcttctcattactttagctctgttttttcatcttcaaattagacatttatgctattgtttgtttagatttagccatgtatttgccattttctt

SEQ ID NO: 271450 - DNA, 188 bp, Homo sapiens
tcagccggcccttcacagaacaaattctgcagccatttctagcccggtcgtgaatatctatctacggaaacaagaaacatctataataactaatatagagtgaaacacagaacgttaattattcttgaaaaaaagcccccctcctcctacctttggacacctcccagaaacaaggttcttaagacaaa

SEQ ID NO: 271451 - DNA, 449 bp, Homo sapiens
cccctgggctggcctttcttctgatctttggctgcagggcccactcttttggaacctcccacccctagaggtggttccagtgtggtggggaaaggtgtgcttctttactcatttttttaagagtcatagccagagtgcttcattctgcaaggacgtgcacatgcacatgcacacagagccttgagggcagggccaagagtgaatttggaattttccaacctgatacccattcccaaaagtaggagcttctctctagtcattttatcctctgagaaactgtcagttctcctcccacaaggctcccagacagccacgggtgaccagggtctccaatcactccttaagatgcctttgactggctgggcgcagtgactcatgactgtaatcctagcactttgggtggtcaaggtgggagggttgcttgcaacatggcaagaccccgtctctac

SEQ ID NO: 271452 - DNA, 264 bp, Homo sapiens
  misc_feature (91)..(91): n is a, c, g, or t
  misc_feature (112)..(112): n is a, c, g, or t
ctgacggcttgattgtttgctttttagagccctgtgggatattaaagagccataacaaattatctgaatataattatcaataccaggctgngcacagtggctcatgcctgtnatcccagccagcactactgatgttttaggccacgttgattctttattgtgggggctgtcctgtgccctataggatgttagcaacatccttggtctctctacctactagatggcagtagcaccccctctatgtgtgacaaccaaaaatatctc

SEQ ID NO: 271453 - DNA, 453 bp, Homo sapiens
caattccagtgttaggtatttcctcaggagaaatgaaaacacgttcacacaaataattgtacatgtatgtttctacacgctttattcataatagtcataaacaacctaaatattcatcaactggttagcagagaaaagagcaaaccactgatgacatgaacgaatttcagaagcactgtgctcagtgaaagaagccagacaaaaattacatcttacataaatttcatttatatgaaattctagtgaaggcaaaacatatagccaggggccaagaggggaggatggtctgaaagaggcaggaacttcttcctggggtgatgggaatattctgtgtcatgaacatcgtgattgtggttacaagactatacttttgtcaaaactcatcaaattgtacacctaaaatggatgcattaagcctcaatacagccaataaaagatacctacgttacagta

SEQ ID NO: 271454 - DNA, 854 bp, Homo sapiens
ctctaaccccaactttccctccttcgcactccccttcatatgagggggcaatggagtagccctagacatttttaggacagagctaagggtgcttttagtcagttacagggttcctagctactccagtggaagaatggcttccaggaaaatgtgccctacacactgtgtgattctcctcatgctgaggccaaaattgtaggaccagaggtgagattgtgatatgcacacatcctgtggcttcttcgcctgaagactgtggggagtgggtgagaagcaaagttagaattgaaggaacaaaagctagtctgtggaaaagactattctgatgctcagatatgggcagttgcattccaagaggtctgttctcattgattcctcatcaaaatggaaattccttcccataagaaatacatttgacaatgcaaatatatcattataagtacaacatacatttttcctttatgacaggagtcagacaaaaccaaaacggattaaaattcctctatttgtagggcctaaacttaacagtactacaaacagtgagtccttttgttgtgtgaaatcaaatgttttgtgcatcctgattattgctcttaaaaaaacaaatttcaattaaggaaagactgaattatctttcctctctctatacaaaaaaatggttttataaagttgttgccataggaggaggtgattgaagagaatgtagagaaaaaagcactgtgttggaagttaattaataaaaatgtcattattttcctgaatttgggaatgtttgttgtagatgtcagctttttaaaatgtttactttgttgtgattttttttatcgtgcaaaataaatatgttttttacttaa

SEQ ID NO: 271455 - DNA, 325 bp, Homo sapiens
ctccctctctccatcaccagagcacacagcaagaagccagacatctgtaagccaggaagacaggcctcctcagagaccccacaggacctagatctggacgacttccagcctccagaactatgtaaataatctgctcccaggagttcatttgattagagaatgtttctgaggaggtccaaggtcatgcattcgacatcagcaaatgctttgctctcttctgtgaccgaaaactggactaaaaactgtattcatctaactcacaaattcaaactattgatggtctatagcaagtggtatgagaaaataaataacgagctaatgtaat

SEQ ID NO: 271456 - DNA, 353 bp, Homo sapiens
acaaaacaaaaaaatcatttatgactctccacacctccatgaggaaggtatatttatatgcattttatgggtaaggaaattgaggttgagccagaatgaaagacttatccaaggtcactgaatcagttaatagcagagcaaagtccactccacagcaaatctcccagcccaggaagatgccaggggttctgacttgcagggtgttctcaggcacgtggcagagcatgttcagttcagcagctgcttggccccattcagcgcaaggtagagttaatctcagctgggaggagtagctcacacctgtaatcccagcactttagaaggccagagtgggcgaatcgcttgagcccagg

SEQ ID NO: 271457 - DNA, 465 bp, Homo sapiens
gaacaccacattccaggggaggaccgtttacacaatatctcctgcttgcttcatagattttgtggagagggcagtgcaggacatcatgagaatagcaagagtgaagaaggtacattaggagggagagatgtctccacaccgaatcccttccttgggtctgcaccagcacaaacaaaggcttttatctagttactgtacagtttaggtgtgctaaactgtataggagtttgagaccagcctgggtaacatggcaaaactctgtctctacaaaaaaatacaaaaattagctgggcatggtggtgcatgcctatagtctcagctagtcaagaggctgaagcttgagcccgggaggtcgaagctgcagtgagctgtgatcacaccactgcactccagcccgggtgacagagcaagaccttgtctcaaaaaaaaataataaaataaaataaaataaaaataaaaattaag

SEQ ID NO: 271458 - DNA, 584 bp, Homo sapiens
caagctgtcatcccgctttggcttctcaaagtgctaggattataggcgtgagccaccatgcccgaccagtttctgcttttattaaaattgttcacagttttatacattcatgttcattaaaaatgctatttagaaaagagtttgataaaataaatattatacaaaattcgaagaaaaaagaaaagagtttctgtttcagtcacaaattagggttattgtgatgtgtatttatgatgaccattgaacaaatgtgaagaatactgtgaattctatgactttatcaaaatcagccacatccaggagcttgcagttgttgaccaaatgaatgatgacatagagtagttcagatctatcatgtgctcttctatctaatcagtcaatatttccttggccctcaagccaacattcattttttatgtataaccttcttcatgattttgaaattttgatagggtaactgctaatgagttcacaaatgtagcactttaaaaggaaaataaatggagagtgaaaacaacttggctacgtataattgtgggttttaatttttctgtttttaaaataaaaaatggcattgatagttt

SEQ ID NO: 271459 - DNA, 511 bp, Homo sapiens
caagctgtcatcccgctttggcttctcaaagtgctaggattataggcgtgagccaccatgcccgaccagtttctgcttttattaaaattgttcacagttttatacattcatgttcattaaaaatgctatttagaaaagagtttgataaaataaatattatacaaaattcgaagaaaaaagaaaagagtttctgtttcagtcacaaattagggttattgtgatgtgtatttatgatgaccattgaacaaatgtgaagaatactgtgaattctatgactttatcaaaatcagccacatccaggagcttgcagttgttgaccaaatgaatgatgacatagagtagttcagatctatcatgtgctcttctatctaatcagtcaatatttccttggccctcaagccaacattcattttttatgtataaccttcttcatgattttgaaattttgatagggtaactgctaatgagttcacaaatgtagcactttaaaaggaaaataaatggagagtga

SEQ ID NO: 271460 - DNA, 520 bp, Homo sapiens
caagctgtcatcccgctttggcttctcaaagtgctaggattataggcgtgagccaccatgcccgaccagtttctgcttttattaaaattgttcacagttttatacattcatgttcattaaaaatgctatttagaaaagagtttgataaaataaatattatacaaaattcgaagaaaaaagaaaagagtttctgtttcagtcacaaattagggttattgtgatgtgtatttatcatccccaccttcctgcctcccatcatgctcttcatccctccctccccctttattaccgtttttttaacttgatgcattctctgtgagcagtggctctgtggaaaggagggagccgggagcctggtggtaagccttccccacagagatggctttcaggggccttatttaaagactgtgattatggagccacgcaaggctgcacctttgtgtgttgggagacggatgatgatgtccagttctgtgtaagggctgcgtatttaatttattaaagtcaaattggaggttaa

SEQ ID NO: 271461 - DNA, 322 bp, Homo sapiens
aaagctacctccatgaattaaaatttgcaaaaaggctaagagtcttatgttggagtccttgccctgatacctcagattgtgacagtatttgaagataagacctataaaagaggtgataaagttaaattgagacatttagggtaggtcctaaacttccctaatccagtctgactggtgtcttcacaagaggagggaatttgggcacacagagacacgagagactgaggcaggagaatcatatgaacccaggaggcggaggttgcaatgagccaagatcacaccatggccctccagcctgggtgacagggcgagattccatccc

SEQ ID NO: 271462 - DNA, 404 bp, Homo sapiens
acatatcactgagaaagctatacatatggcttttaatttgaaaggataactacagaattgtcagttacatgtaaaagatataaagttggacaaaactccttagatttttcatttttaatagctctagagaaatgactatttcaagaatcagactgaataatcaaagcaaaattgaatgggtaccacagttcttgaacatggtgggactaggaatgtaggagcaaagcaataacctttgtagttatttgaaaaattcttcttaaggaatggaaaaaaagtccagaagtaaactttgccaaagccaacttggctatttgtgatagggaacaggggtcagcaaaccatggtttgtagcccaaatctagccagttacttgttttattaaacaaagttttgtatcgtgc

SEQ ID NO: 271463 - DNA, 1508 bp, Homo sapiens
tgttataatgcaaagcctatcaaacttaaaattagcttaatcctgaaagatgtatattgcataatcaacctgtcacttttttcaaacacgatttgggagggtattgaggtcccatgtaaattttaaaataaaagacaaacaggaactaatcttttagtaaaaattattttgttttcatataggaaaacaatgccttctgtcatttacggaaaacacatgggcaatatggttggttgttcattgtgcccctctatcctataggaagaatgtgatcttttaattgtgcttggtgctttgtttctggagatatatatatatatattatatatatgtatatataccatatgtatatatacatatgtatgtgtgtatgtgtgtatatatatctctctaggttgtatgtaattcaatatgttggaatttaaagatgcattattatttggatttgatgtgaaattagattgtgaataatggagattgctctccattttttgctgttctagcatagccaaaaatataaagatatagatgtacatatacatatgtatttgattaaacactttaaattttaaatggccgcatcaaattttaaatggtagatgatatcaacaattgcagtgcactcaaaatgttataaaatctttgtagcacaaatcctgaagtatatgcaaactaaatagcatatttatataaaatacctagataacatgtctaggttgagatatttaatccctcatagagctatatttgactaataaaaaacgacagctaaaaataatttccctccctataagtacaaatatgatttttaaagcatcattgtaacttgtcatgaagctatttattattaattaaggatttaactctgtacccatctgctcttacaaaaggggaaaaagatttatctatgagaatagggaagtatagcactgttttatgtttttctctttagtattctgtcaccatttaaagcttcaatatatgccttccactcaggttcctgacacagcctacattctcttttctggttataatcacaatatggtagagctataaacaaggtaaaaaggtgttaacaattgaactgcaatcctacctattatctactttactatagcagtgaagtagtccagacttatttgaaggtggtactatttttatcttacaaaaatctactataatattaataactttccatgtaaattttcatgtgctggcatgcttacaagttaatagtgttatagaatgctcagctctcaatatgaggggttgtttgtggtgaattgcataacatatgtcatctatttgctgaaagaatatgctgtttagcaaactacctgctgagcaacataataagatttttgtacaaggtacaaattactaattattgtattttatttttctatgatttcctaagaggcattatcagggtcttacagatggagtaagcctgtttattaaaatatctattggcaaataaaagttacagctttggtggttgaatttgt

SEQ ID NO: 271464 - DNA, 487 bp, Homo sapiens
ccctcgtgatctcgaggacaggtctgcctgtgtgcccaaggactactctgccacccgagggtcattctcccaaagagcagaaacccgcagactcagtgattgcctggggtgtgtgtccctctgccactgctgtatgtctggtgcgtgtgtctcccattctctcttctctctctgtcactcactctctgtctgtttctctcactttctctctctctgtgtgtgtgtgtgtgcgcccgtgtgcgtgtgtgtttatgtgcccagtgcactacaaagcgatctcatgcatgtcagagtgtctttcgtgggctcctgtctgcgtctctgcctggatcatgtgggctgctgtcaatcatttctgcggcggttccactttggctttctgaagacctcaacaatgtgaaaagcgtcggtctcagagaaaatgaaatttcatcccgatactgagctacctcttttctagaatcaagatgaccacactccaaccaaa

SEQ ID NO: 271465 - DNA, 523 bp, Homo sapiens
ggaagacggccctaaattcttgaaatctggtgatgttgccatcattgatatggttcctggtaagcccatgtgtgttgagagcttctcagactatccacctctgggttgctttgctgcttgtgatatgagacagacagttgcactgggtgtcatcaaagcagcggacaagaaggcagctggagctggcaaggtcaccaagtatccccagaaagctcagaaggctaaatgaatattatccctaatacctgccaccctggtattaagcagtggtggaagaatggtcttagaactgtttgtttcagttggctatttaagtttagtagtaaaagactggttaatgataacaatgcatagtaaaactttcagaaggaaaggagaatgttttgtggaccactttggttttctcttttgcatgtggcagttttaatttattagtgtttaaaatcagtgctttttaatggaagcaacttgaccaaaaatttgtcacagaattttgagacccattaaaaaagtttaatgagaa

SEQ ID NO: 271466 - DNA, 381 bp, Homo sapiens
tgagacagagtctcactctgttgcccaggctggagtgcagtggcacaatctaggctcactgcaaccttcaccgcctaggttcacctcccaggtttaagtgattctccttcacctcccaggtttaagtgattctcctgcctcagcctcccaagtagctgggactacacacatgcaccacagcgtccagctaatttttgtatttttagtagagttagggcttcatcatgttgggctggtctagaactcctgaccacaagtgatccacccgccccagcctcccaaagtgttgggaatacaggcgtgaatcactgtaaccggctccttatcttgtctttaacaagtgtcattaaatgattttttttttctttagcaacatgagct

SEQ ID NO: 271467 - DNA, 539 bp, Homo sapiens
gatagggtttctgacagcatgacccacacccacttttccagacctcatctccacatgaagccagcttcttagtctacctttacagaccaggtgctgtctcctggccttgattcaatgatagattgtcatttttcatcctgtctactgtggtttgaatgtatgggtccctcctagattcatgatatggtttggctctgtgtccccacccaaatctcatgttgaattgtaatccccagtgttggaggtggggcctgctgggaggtgattggatcatgggggtggtttctaatggtttagcaccatcctgctagtgctttctcgtgatagagttctcacaatatctggttgtttaaaaagtgtgtatcaccgtccccttcactgtctctctcctgctggccatgtgaaatgtgcctgcttctcctttaccttctgtcatgattgtaagtttcctgaggcctccccagaagaagacgcctgtacagcctgcagaagcatgagctgattaaacctctttttttttttcaaataaaaaaaaaaaa

SEQ ID NO: 271468 - DNA, 208 bp, Homo sapiens
tggaggccaggccaggctcttgctctttccagatgtgtgctggtcactcagcctctctgagcttcagttttcccgtcctccaaagtgggttgtgcaaatcacacatgcgaggtcctggcccagccctggaacattgtccactcacagtaaatgagatctctcgtcactgtataacccttgcttgagtaaagttcttatccaaactggc

SEQ ID NO: 271469 - DNA, 341 bp, Homo sapiens
acaaaacaataacccttctggggtttcttgtggcggttgaaatagtcccacatgtggtcatcagaaaataagccattcctcataccaatataggatcagctccttgacctctgaggggcaggagtgcttcctggtttgtgtattagaatcccttcctgccttgtttcatggcagtgaaatgcctcttggtcctgtccaagtgtatctttcactgatttctgaatcatgttctagttgcttgaccctgccacatgggtccagtgttcatctgagcataactgtactaaatcctttttccatatcagtataataaaggagtgatgtgcaatagcaaaaaaaaa

SEQ ID NO: 271470 - DNA, 580 bp, Homo sapiens
gtgttcttgaaaatattaaacagaagtcatagagctacatattggccagtcaggaaactctcttcttcttaccttccatcccacctccagactgtttgcctaatcccgctttgtgatgtctgttgtgctggtataacgatatttgaactctctgatgaaaactttggccgcaattgacccttccctaaagttgaagagatttctccaaataaggaaatgaagggagttaagagggtaagtcatacagtttggatgtgtatccccgcccaaatctcatatggaaatgtaatccccagcattggcaatgctgcctggtggaaggattgtgggagtggatttgtcatgaatggtttagcaccatctgccttggtactgtcctcctgatagttctcatgagctctgatcttttaaaagtgtttggcacctccctgctctctctcttggtcttgctctggccatgttaggtgcctgcttcccctttgtcttctgccgtgattgtaagtttcccgaggcctccccagaagccaagcagatgccagcatcatgctttctgtacagcctgcagaaccatgagccagtt

SEQ ID NO: 271471 - DNA, 462 bp, Homo sapiens
aaatgatggaaattggatggttctaaacacagctatctacatcaccatgtacccagagcaggaaaagaaaaacagcaacagcaacaaaataaacatgcaacaaactagggtcagttacatagaagcattaactcttattttaattggataattttgttaaatttgcattagaagttcaattctaactctacctccatatgcttaagtttgagttccttcactgtagaaaagaggcttaaaagttatcagtaaagcagaggtcaactcgtataaatgttactggtaagtgaaaacaattctctaaggttttttttcaaccttttctacagatgggaaaagctttaagcaacttaaaacaggcatacctacagtaattatttataccattcacattaagagaaataaatacaaccaaatagttggacaacaagtgctgcctgttacttgctaaaagagaccatg

SEQ ID NO: 271472 - DNA, 454 bp, Homo sapiens
tcaataagagggtgctagaaaggacttataggaggatttgtgcccatgttcagtgatttcagtcagggtttagggaagccaggcttctctctggcttggatgctgtcagaggtgggggtatgtctatgacggactatcttaatgagtcttgcccagaaggagagaagattagttggaggctaatgctgtaattggtaaggaaacaacagtcactctcttatgggagaaagagggatgtttcatgccttttgtggtttggacagtgttcacctttgccagcattcagatgtgacgatggagtggttctgtttctgtcttgctccctcacggtcacagagtgaccttgtccgatgctgatgttctctgaaattgtttatattcaacagaataccaaggccagctcccagatgtgcagggatgtataaattaaacgcaatttaaatctaaaattcca

SEQ ID NO: 271473 - DNA, 551 bp, Homo sapiens
agccaggggattggacggtgtcatggaaatgtcaaagaaaaagtgacacctgagagaaaatttgaaagatgaaagcagatgcactaaagaggccaatcagtcatccagacaagaatttacctcatgagagtcaactgtgcgcatctcttcccaacattgtgattggttatgtcatgttgatagcttgaaattggacatagtatgtacatttacaccccagaaatctcaggtactacaaactaaaccttcccttctctcattccccagtgctgttaatacggaaactggtctaatatggaaaacaggtgaacatggagctgctttgtttgactcagggatgagagatacccaggtcctaattacttgtctttaactttccttagggagtactaatttgggagtcattgttctaaacaattaaagtgaagtaactgtcctgtttttctcttttacccttgtgaacgaggaagctcagggttaaagtctatgtctttacttatacatttctgtgttgtaggatcttttaataaagattttctccttttaaattt

SEQ ID NO: 271474 - DNA, 418 bp, Homo sapiens
acgactgtctcttgttaattgcagtccaccacgctagggcttcggggtaatgtggttggaatttacacgtaggcctgggcagaaacctgctaatgctggcgtctgatttgatctaattagaagtgagtgaatccgagcccagtgttctatatgaaccgaatgaatgagaactttgcaacccgttgtttggttgctgatttcaaggcattgactgtaggaattgtctcgtatgtgtgaagctactttgcgttcttcatcctatagattacaaaagttacagaactacactaagtctgtcccaaaagcaaagttgctccttctacaacctccagatattccacaaagcctgcagacacacggcctcaaagaatctggaattgagtatcgcatgtatttaataaataggtcgagttttaaa

SEQ ID NO: 271475 - DNA, 365 bp, Homo sapiens
aattcctcaagaacattggctggagaatagaccagagaattggtggattcggggaggagccaggaattaaatctcagctaatgaaccgtattcaatctgtaacaactgtgatgagaatgccattgataatagtaaactcaattgcaattgtgttacttttattatttggatgaatatcaggagaggaaatggagactcagaagagatgctagcagaagttattatttaggtcattattggaataaaggctgagatgggaggatcacttgagcctgggaggctcaggaagtaagtaagtaagactgcagtaagccaagatcgggccactgcactccagcctgtgtgacaaagtgagaccctatttc

SEQ ID NO: 271476 - DNA, 477 bp, Homo sapiens
tggggaaggcagcagctctggggtctgcaggggggcacctcatggttcccaactctcctagaagcaaaaagggattcaaagaggcccacttgataacctgtcaggctgcatagcagtgaggcttcctcctttacaccgatgtcggggaaaagaaaactacctggcaagttaggatacagcaggaacggtctccaagacagccattgaaaatgctcccaaatgctggagacctcagctcctgcacaaagacaaaaccacagaggaaagcactcagaaaggagcaggatgagggaatgcaaagaaaaggcaaatgagggaagcgttgaaagatacagccttgatacaatggccacaaagaagagctcttcacaatagaagcttgttatgtttgctttgccatcatccaccataaagcctggaatacaaccttcttcccttttcagtaaacatctactgagtaaatcacaagaaggtatc

SEQ ID NO: 271477 - DNA, 402 bp, Homo sapiens
ttttgtggggaaggtccattaaaacctttctagctcctgcacaaagacaaaaccacagaggaaagcactcagaaaggagcaggatgagggaatgcaaagaaaaggcaaatgagggaagcgttgaaagatacagaacctcttccggtggcagcagggagggaggggagacagttgaagttagaagatgctttgctgtattcaccaagtcttcaaaacaagagcactgaagtgctggggactgtttctccttgactttttagccttgatacaatggccacaaagaagagctcttcacaatagaagcttgttatgtttgctttgccatcatccaccataaagcctggaatacaaccttcttcccttttcagtaaacatctactgagtaaatcacaagaaggtatc

SEQ ID NO: 271478 - DNA, 234 bp, Homo sapiens
aaaaccaagcatagagtaaatatgatggaagattactatctgattcctacctccatatgaaattgtgtgaagttatgtaattaatgttttcaaagtgtgggaattctttcttttcattggttagctatatataattatataatcataatacatcattttgaaaaaaatatgatgtgggaaaattaacttcaaggaatatacattttatattgcttaaaaagttctgtagtcagc

SEQ ID NO: 271479 - DNA, 197 bp, Homo sapiens
agaaccaatctacgagcaaatagatttacacaccaagaaatccctgcttgtcttgtaatgagatgctgattttccttgctgctaacaaacacgttttcattaacatcttgctagctaattacagctaattatgaacattaaattcataagtgatcacttacaagcactccctcttcccacctcctcaaaaaaaaaaa

SEQ ID NO: 271480 - DNA, 471 bp, Homo sapiens
cttagatcaagggtcctcaaatttggctgccagctggaatctcttgcaaacattttaatacccagatgtccagtcccccacccagaccaatcacatctgagtctctgggggggggcgggggtggaactagggcatcggtatttttttaatgcttcccaagcaacgccaacgggcagacaagtttaagaagtggtgctctggaccttatcagcactcggctgccaccctggagtggctctgggcgacagtggctgctttccgcttcgaggacgcccggcttggggattcgggcatgctctgggaggcgagggctggggaggatgcgagcgtgccagcgacctggtgctctgccttgctctaggcccagctccgaggctgcgggtctctgggtcccccccacggctacaacacgtgctgccgccccgactcctccggttatctctgcagaccgcaagcggtgcccagcggccg

SEQ ID NO: 271481 - DNA, 498 bp, Homo sapiens
taacttccttataacttttggctctaccacttctatccctatatggaagctgaagtatgttattactgctgttacatgactatttttctacattgtggttctatttctgctaaattattcttacagtctttatcaatttaagttttttaaaaaactgcctttttagaactctgaaacagtatttaaaaattaaattaaaaaaattttaagttttgttcatcatatacaatacaattctgatatatgatgttagacaaattattagccaggtaatttctgttcacctagtatcaatgctataaagagcttcaagtgaactttctttagtgagatgagtttcaatgatcctaaagatggtaaatgaaccattatttgtgtgtctaaagtgtgtactcttaagaaattatccataaatcaaaaacaaaaatttaagcaattgttaaatataatgttaacaggaacattgagcaataaattgaaacttttaaatttaactca

SEQ ID NO: 271482 - DNA, 476 bp, Homo sapiens
ttcaaagcacttcttatcaccaacaggagtaagctctgcgataggagtgaagagtgtcactaagtgagaatcagctacggtggcagctcgtcctagaaatgtcacgtctcatcctgcctccgtgtgctggcctatccaagttcaggtttcaggcaggcagctggactcagcaggaagagtctctttttctgaaagctaaaatgactcttcagcttgagagcggctgtcctccttgttttctttgaaagaagatcatttcctgaaggccgagagatccaggctctccaaaagcctctctctgtgggtgagacccgccaaagaatgcaaggatgagaaacaaaaccaaatctcagaggaatgaaagaatccttttcacatggacattagttacattcattaatggctcacacatgagttcaggcccatgttttgatctgtaggattgttttcaattgagctctagaaacagaaaaaaa

SEQ ID NO: 271483 - DNA, 2485 bp, Homo sapiens
  misc_feature (868)..(868): n is a, c, g, or t
  misc_feature (1344)..(1344): n is a, c, g, or t
  misc_feature (1513)..(1513): n is a, c, g, or t
acttaagaggagctccataaatcatctaattccaccattcatgttaccaagaagcccaagaaaaggaggcagtttaccagaagacgtataggaagtgaataacccagtggtcttttatctttgtctgtactttctctttaggtgactgtcttcctttccttggctttagctacagatgaaattttatctctatcctagaactctttcctgagttccttacatatattgccaactgactacctgacatttccacttagatttgtagtagacatctcaaacccaacatatgtgaatcagaattattgctatcccactgccactctcattctgcttctttagtctttcgcttctaagtaaaagacacctgcttcccttaccaacccccttttgtgtggctctccccagatcactgggacccagctccactggctgaattttccaccctttttgctcctgtgatctggaatggtcttcaattggctagctcattcattcttttgatcttagcttaaatgttacttccaaaaaaggaatgcttattacctattttaaagtaggttccccctctctttattttcacatggtaccctgatttttccttcatagcatttaccataatttttatgtttgtccatttgtttaaaacatgcctctctcttccgctagaccgtaagcttcaagaatgcaggcaccatgccagttttgttcacgactataaagccaggacctacacatagtaggtactcagtaatttcttgttgaatgaaaaacaggttagtgccagggcctacacatagcaggtactctgtaatttgttgctgaatgaaaaacaggttagttgtagagctagagctcatgactccctcanctcctagagcactgtactttcattaacaagtgctattaaccttcccctctttgttctttgctgacatagtacatgaaaaggctctaggaggatgtcctggcttgaaaccttaacagtcctgcctgcctcatgagaaagacatagggttagtttctagcacatcatgaaccaatcaatactttggctattcaggggtcccttggtctagttcagagcaatattccttttgcttaaaaattttttctaaattctcaaccattgctagtgaaagtataaattagtaaaaccactttggaaaataactggtcattgtctggtaagattgcacatgtacctaatccatggtccaacagtttctctcctaccatagagaaattaagttttgctcatgtgtaccaagaaacatgtgcaagattatttataggggcattgttcataatatttgaagaagaaacttaattcaaatgtccactttncaattattatataggctgagtgcagtggctcatacctgtagtcctagcactttgggaggctgaggccagaagatcatgtgagcccaggagttacagactgcagtgagctatgattgcactgatgcactccagcatgggcaagagcaagaccttgtttctaaaaaatagntagtggtatattcatattctggaatagtgtaaaaaatgaaaaactgaagataaatatatgaagacaagtcctcaaaatacttctgaatgaaaaaaattgcaaacatgaatctcaaaaacatgctgagtgggccgggcatggtagctcatgccggtaatcccagcacttagggaggccgagttgggcagataacacttgaggtcaggagttcgagaccagaccagccaacatggtgaaacccaatctctactaaaaatacaagaaaaaaatcctaactactcgggacgctgaggtaggagaatcccttgaacccaggtggcagaggttgtagtaagctgagatcaaaccactgcactccagcctgggtgacagagcgagactctgtctcaccaaaaacaaaaaaaccatgctgagtgaagaaagccaaaatgccgttcacaagagaatatgtaccatgtgcttccaccccatttatatgaaattctagaacaggcagaactgtaaaagagtacatcatgttgcctgggctgggagaggggagatttccaggtgatgaaaatattctttactttgattggcgtggtggtgaagggggtatgttcatttgtcaaactcatcaatttatatacataaaatgaatgcatttattgtatgtaaattcaacctcaataaagtatatttgaaaaattttgctgggtgcggtggctaacgcctgtaatcccagcactttgggaggctgaggcaggtggatcacctgaggtcaggagttcaagaccagcctggccaacacggtgaaaccccgactgtactaaaaatgcaaaaaaaattagctgggcgtggcggtgtgtgcctgtaatcccagctactcaggaggctgaggcaggagaatcacttgagccccggcggaggttgcagtgagcagagatcacaccattgcactccagcctgggtgacagagtgagtctctgtatc

SEQ ID NO: 271484 - DNA, 501 bp, Homo sapiens
atggattgtcttggagatgaaggggcagtgtactattccatttagcttgttcagggaacttgagtcaaatcccttgagtgttcactccatcagatagtccatgaaatgctgatgaagatataacaattatccataaagttagagtgttcactaattaagaatactgaagaatgaagtatattaaatgggtcacgttgcaccttttttgggtttgttttgttttgttttgttttgtttgagacagagtctcactctgttgcccaggctggagtgcagtggggcaatctcggctcactgcaacttctgcatcctgtgttcaagcaattcttctgccacagcctcagctacttgggaggctgagacaggagaatcccttgaacctgggaggtggaggttgcagtgagtcgagatcatgccattgcactgcacctgggcaacaagagtgaaactccgtcttaaaaaatataagaaataaaaaaataaaaacctgaaaaaaaaaaa

SEQ ID NO: 271485 - DNA, 281 bp, Homo sapiens
tcacagtcgcttgataacagtatgttgctaacagcttgctgtcatattggaaacacccatactaaagatatgtagtataatatgttttctttctacttaatatgtaactcattagtatgtatatacctcatgacttaacatggaccaaaataactgtgttccctggtgaacaataatgcaaaatagacttcccaaaatgttgatgaaaatcaatgttgtcgaattccttgtttgttaataaataaaatagcttccgtaattaaacgtttaacaacagaatg

SEQ ID NO: 271486 - DNA, 421 bp, Homo sapiens
gtctagcaatttaccattttatttttctattttgtctagagtgtattgtatctgttgagtctatatgccagtatctataattttcatattttaaatttggaattgctttttcataatcacctgtttcaattctctttgtttggcaacccttttgctacttagaaaacctctatctccttctttaacatgttcaaatttaaaaatctttgtcagaccatttcataaaacatctggtgtgaattcgtgtttttatatgattgttttttctcattaaatttcttgctatgttttggattaaaaaaactggttttaatgttggacagactcattattttgacaactcttgcattcaaatcaaaactctgaaatttaatcttatttttgaatttactaattgatcagaaatagacacccccccccc

SEQ ID NO: 271487 - DNA, 408 bp, Homo sapiens
caaagagtgtacttatcttttcatgcatgcctttaaagagaccatattttttctctgataaagtcaattatcagtgtatgtgctgctctgttcacagttttgactaaatagtgcaacatctacgtagaaaacataccccaaacttgagttttcctgggttgtgcattgtacattgtcaaagcgtaaagaacatctgagttggaactcgtacccacttcaggatatgagaagatgcaggtcagtgatttgtttcgaggcggaagaagcttaaagaaagtaccttgcgctgtgtgttcctccattagcatttgttattatgaaagcattagactatctctggatgttttccacacacctgagagtgtgaaagaatgacaggtacctcattaaagatgcataatatctagt

SEQ ID NO: 271488 - DNA, 571 bp, Homo sapiens
agttaaaaggtagtagttttattacgatttgatggatcattccctaacttcaaaattttttcatgatgtcaacaactgtctctttaatatgacatatcattgagctttaggctttgctgataatctttgaggataccttgtgaacttcaaatatattttatagaatatttctttttttatgtgatggtgctagtacatatttgttgtgttgcttagtagacgtgttaagtgtttcagaatacacataatttatatttgtttggcttaattcaacagatacttgaatacctaccaagtataaggcactatgccagcactgcatagctttccttgaagaagagcaattactgcccttcaggaatatataatctagtaggagaaataaaatatttacatgagttttacgtgtaggaaactgaatgaaaaagtttgttctaatgagttttaagaagagagatgaaggtcttttctctcttggaccttcagacacccacttgggtctctagcaagtaaatttttcatttgtttcctcttataaagccttttaaaataaacttccacttctgctctg

SEQ ID NO: 271489 - DNA, 204 bp, Homo sapiens
ttcccccactttcctttggggtacagtgagtctaagtgatccagaatttagagccagaagcacttggatcctttcacttctagtcctgtgatttgtgataagttgctcaaatttcttaagactccggtttcctatttgtaaaatgctgacaatctgtctcacaaggttgtcgtacagattaaatgatataagttatgaaaagta

SEQ ID NO: 271490 - DNA, 917 bp, Homo sapiens
cagccctccagagtgcaactctctgaatttataaaaaggaagtattcatactaaataagcatatttggcagattgctacagacacaagcactcaaaccacggcatgaacacagccttgcttgtgtagttttccaaacggcattttcaattagcattacacttgcaaaaaatgtttgcattgtaccattaaccagagtaacgtaggagaatacagcactacacctaaccgaatcatctctttgattatctgttgaaatactgatttcctaaaacaaaaacaagcaagcatatgagaggatcgaaaatatctaacaactttttaaacgtagctatgtgccgttaccaacctgctggtccccatccgtcatccgctctttctgccactgaccaccttctcagcacttcctcatcaagttcctagttccctgaagagatctaactctctggaaaaggtcacataactgaatgccaaagccccaaatggttaatttttgacagctctcacttttgcaggataaaattatgcaaataacataaaaagaacagatgaaaaaagtaatttgcatgtcttgagggtgagaaaattctcattgccagagagaaagctgacgactgtcctctcacaatgatcctgagtgatatgttcagcacttttgtttttttccagtgggtctcacttgggacatatggcatttctttgatgtgtgtgtgcgtgtgtgtgtgggtgcgtgtgcttgcgtgtgtgtgtgagaaagagagagaggaagagcgagaagctatatttacattgtgatatttatatatatcttagaaaaccctcaaatttcagtaggcgaatgcactaagtataaataatagagaatccgtttgccttatacattcccaaatatatttttaaagtatctcattaaaataca

SEQ ID NO: 271491 - DNA, 781 bp, Homo sapiens
agaaggagttgcccacagagcccccctacacagcatacgtaggaaatctacctttcaatacggttcggggcgacatagatgctatctttaaggatctcagcataaggagtgtacggctagtcagagacaaagacacagataaatttaaaggattctgctatgtagaattcgatgaagtggattcccttaaggaagccttgacatacgatggtgcactgttgggcgatcggtcacttcgtgtggacattgcagaaggcagaaaacaagataaaggtggctttggattcagaaaaggtggaccagatgacagaggcttcagggatgacttcttagggggcgtttgggctgcggtgctgcgtcatttttcctttgctttctctttactttagacactggcccaactccaggagtttcctttcattccctcagtgcttctcttctgacctgcatgttgagttctgtattgctggggcttccaacaaaaaccagagtcactgacagagggaactgcagagaccttgttggtattcagctgtgatggatatagagaatcggaggcaccttgttttcacaactaggataaaaatatctgcagggtcctttccattcctatttagagggagtcctggctccatgaccccctcccgagtggactgtccaagcagataggctcacacgagaaacagtgaggctgaaagggggggccatggaagagcggtagggagtccacggagaagatgcagtgaatgcttgcatgcattcacacgtgtgtgtgtcccag

SEQ ID NO: 271492 - DNA, 382 bp, Homo sapiens
agaaggagttgcccacagagcccccctacacagcatacgtaggaaatctacctttcaatacggttcggggcgacatagatgctatctttaaggatctcagcataaggagtgtacggctagtcagagacaaagacacagataaatttaaaggattctgctatgtagaattcgatgaagtggattcccttaaggaagccttgacatacgatggtgcactgttgggcgatcggtcacttcgtgtggacattgcagaaggcagaaaacaagataaaggtggctttggattcagaaaaggtggaccagatgacagaggcttcagggatgacttcttagggggcaggggaggtagtcgcccaggcgaccggcgaacaggcccccccat

SEQ ID NO: 271493 - DNA, 476 bp, Homo sapiens
atcattgcgaagtaaagaagtcatctattgtcagttaatatataacgagagaatttagcctaaccagaggcccatggaagccaaaatctttctattcttacactgaaccttcttgctgagaaacaattgaggtcagctgggctcatgccataatcccagccctttgggaagctgagaccagatgattgcttgagcccaggaactcgagaccatcatggacaacttaacaagaccctgtctatacaaaaaaaattttaattagctgggtgtggtggcacatgcctatggtcccagctacttgggaggctgaggtgggaggatcactggagcccgaaagttcaagcccacagtgatccatgattgcaccactgccctccaggcctgggcaacagagtgagaccctgtctctaaaaaagaagaaatgattgaaatcatatttttcaggctggacttccaataaagtagcccttaaaagg

SEQ ID NO: 271494 - DNA, 538 bp, Homo sapiens
tctaacattattgtagggtttatttcctgtgttctctccgtagaatccttctactgtctgttgattgaaccagttgaagaaatatctcattttaaattacatttgagcttagaaaacaaattaatttgatgacaatacaatgtgtgcctcctaggtatattttcatgcgatttcttagagagataggcttaaatcatttcatttgtttcaagagtaatatttttatttgattttaatatcatcaaccactgctgcagcagcaatacccaaatcgttttcttaaacaaagaaaacagtgatgcagaaatgataggcttgtctcaatataatctggtttagagagcattcttaaagccaattctattctttgtactttgagaagataatgttgagaagtattacatccagattctctcctagactcgggatggtatttagggtcttcatatctaaatctttagaatgcattacaatttaaaggtagaattttagagtttgaaagaacctagaggttttctagtttcagaacctaggaaaa

SEQ ID NO: 271495 - DNA, 1424 bp, Homo sapiens
atgcgcagagcgcgcggggcgcggttgccgtggcagcgccggctccagggagggctgctggcgccgggccgggaccgcggggcctgaggcggagaccggagagcccgcggcccggccggaggcagctcgggacaggcttgagcggcggggcgcgctgcccggccggcggggatgcgggaccggctgccagacctgacggcgtgtaggaagaatgatgatggagacacagttgttgtggttgagaaagatcatttcatggatgatttcttccatcaggtggaggagattagaaacagtattgataaaataactcaatatgttgaagaagtaaagaaaaaccacagcatcattctttctgcaccaaacccggaaggaaaaataaaagaagagcttgaagatctgaacaaagaaatcaagaaaactgcgaataaaattcgagccaagttaaaggctattgaacaaagttttgatcaggatgagagtgggaaccggacttcagtggatcttcggatacgaagaacccagcattcggtgctgtctcggaagtttgtggaagccatggcggagtacaatgaggcacagactctgtttcgggagcggagcaaaggccgcatccagcgccagctggagataactgggagaaccaccacagacgacgagctagaagagatgctggagagcgggaagccatccatcttcacttccgacattatatcagattcacaaattactagacaagctctcaatgaaatcgagtcacgtcacaaggacatcatgaagctggagaccagcatccgagagttgcatgagatgttcatggacatggctatgtttgtggagactcagggtgaaatgatcaacaacatagaaagaaatgttatgaatgccacagactatgtagaacacgctaaagaagaaacaaaaaaagctatcaaatatcagagcaaggcaagaaggaaaaagtggataattattgctgtgtcagtggttctggttgtcataatcgctctaattattggcttgtcagttggcaaatgatggtgtggataacgtcagtgtgcatgcctctctgccagggtggggaaattgatgttcattatattgaagtttgtttattgattctcacacatcaaaccaccaagattcctgctgcaatgaaccaaatcagcatcctgtcatttcgtgaatgaatctcagacgctgtaacccggcatcgagtgctgaccttgtaatgtatgagttcacggaagaagcacaaccgaacgtcttgttcagtgacagcgccgtaagcacagtgggtgtgatgcgtgaccctgaatgacacactacagaatgtgagcagtgtgagacttctctcactggccttgaaataagaaaatattgaacattttaatattaaaaatatttcagtgttaaaaaatgtg

SEQ ID NO: 271496 - DNA, 1476 bp, Homo sapiens
atgcgcagagcgcgcggggcgcggttgccgtggcagcgccggctccagggagggctgctggcgccgggccgggaccgcggggcctgaggcggagaccggagagcccgcggcccggccggaggcagctcgggacaggcttgagcggcggggcgcgctgcccggccggcggggatgcgggaccggctgccagacctgacggcgtgtaggaagaatgatgatggagacacagttgttgtggttgagaaagatcatttcatggatgatttcttccatcaggtggaggagattagaaacagtattgataaaataactcaatatgttgaagaagtaaagaaaaaccacagcatcattctttctgcaccaaacccggaaggaaaaataaaagaagagcttgaagatctgaacaaagaaatcaagaaaactgcgaataaaattcgagccaagttaaaggctattgaacaaagttttgatcaggatgagagtgggaaccggacttcagtggatcttcggatacgaagaacccagcattcggtgctgtctcggaagtttgtggaagccatggcggagtacaatgaggcacagactctgtttcgggagcggagcaaaggccgcatccagcgccagctggagataactgggagaaccaccacagacgacgagctagaagagatgctggagagcgggaagccatccatcttcacttccgacattatatcagattcacaaattactagacaagctctcaatgaaatcgagtcacgtcacaaggacatcatgaagctggagaccagcatccgagagttgcatgagatgttcatggacatggctatgtttgtggagactcagggtgaaatgatcaacaacatagaaagaaatgttatgaatgccacagactatgtagaacacgctaaagaagaaacaaaaaaagctatcaaatatcagagcaaggcaagaaggaaaaagtggataattattgctgtgtcagtggttctggttgtcataatcgctctaattattggcttgtcagttggcaaatgatggtgtggataacgtcagtgtgcatgcctctctgccagggtgggaaattgatgttcattattatttgtgtaattgttttgcttgtgatccttggaattatcctagcaacaacattgtcatagcaaccatatcccaagagccatttatccttgagactcagaccacatctgcaaccaaatcagcatcctgtcatttcgtgaatgaatctcagacgctgtaacccggcatcgagtgctgaccttgtaatgtatgagttcacggaagaagcacaaccgaacgtcttgttcagtgacagcgccgtaagcacagtgggtgtgatgcgtgaccctgaatgacacactacagaatgtgagcagtgtgagacttctctcactggccttgaaataagaaaatattgaacattttaatattaaaaatatttcagtgttaaaaaatgtg

SEQ ID NO: 271497 - DNA, 1415 bp, Homo sapiens
atgcgcagagcgcgcggggcgcggttgccgtggcagcgccggctccagggagggctgctggcgccgggccgggaccgcggggcctgaggcggagaccggagagcccgcggcccggccggaggcagctcgggacaggcttgagcggcggggcgcgctgcccggccggcggggatgcgggaccggctgccagacctgacggcgtgtaggaagaatgatgatggagacacagttgttgtggttgagaaagatcatttcatggatgatttcttccatcaggtggaggagattagaaacagtattgataaaataactcaatatgttgaagaagtaaagaaaaaccacagcatcattctttctgcaccaaacccggaaggaaaaataaaagaagagcttgaagatctgaacaaagaaatcaagaaaactgcgaataaaattcgagccaagttaaaggctattgaacaaagttttgatcaggatgagagtgggaaccggacttcagtggatcttcggatacgaagaacccagcattcggtgctgtctcggaagtttgtggaagccatggcggagtacaatgaggcacagactctgtttcgggagcggagcaaaggccgcatccagcgccagctggagataactgggagaaccaccacagacgacgagctagaagagatgctggagagcgggaagccatccatcttcacttccgacattatatcagattcacaaattactagacaagctctcaatgaaatcgagtcacgtcacaaggacatcatgaagctggagaccagcatccgagagttgcatgagatgttcatggacatggctatgtttgtggagactcagggtgaaatgatcaacaacatagaaagaaatgttatgaatgccacagactatgtagaacacgctaaagaagaaacaaaaaaagctatcaaatatcagagcaaggcaagaaggaaaaagtggataattattgctgtgtcagtggttctggttgtcataatcgctctaattattggcttgtcagttggcaaatgatggtgtggataacgtcagtgtgcatgcctctctgccagggtgggcaacaacattgtcatagcaaccatatcccaagagccatttatccttgagactcagaccacatctgcaaccaaatcagcatcctgtcatttcgtgaatgaatctcagacgctgtaacccggcatcgagtgctgaccttgtaatgtatgagttcacggaagaagcacaaccgaacgtcttgttcagtgacagcgccgtaagcacagtgggtgtgatgcgtgaccctgaatgacacactacagaatgtgagcagtgtgagacttctctcactggccttgaaataagaaaatattgaacattttaatattaaaaatatttcagtgttaaaaaatgtg

SEQ ID NO: 271498 - DNA, 345 bp, Homo sapiens
ataaaatacttttattacggcaggtttcagatgtgtgcagaagcagagagaggcgaccacaagccgaccccccagctccacagttctccatgagctcccacccgcacccgctcccagaacgctgtaacccggcatcgagtgctgaccttgtaatgtatgagttcacggaagaagcacaaccgaacgtcttgttcagtgacagcgccgtaagcacagtgggtgtgatgcgtgaccctgaatgacacactacagaatgtgagcagtgtgagacttctctcactggccttgaaataagaaaatattgaacattttaatattaaaaatatttcagtgttaaaaaatgtg

SEQ ID NO: 271499 - DNA, 1092 bp, Homo sapiens
atgcgcagagcgcgcggggcgcggttgccgtggcagcgccggctccagggagggctgctggcgccgggccgggaccgcggggcctgaggcggagaccggagagcccgcggcccggccggaggcagctcgggacaggcttgagcggcggggcgcgctgcccggccggcggggatgcgggaccggctgccagacctgacggcgtgtaggaagaatgatgatggagacacagttgttgtggttgagaaagatcatttcatggatgatttcttccatcaggtggaggagattagaaacagtattgataaaataactcaatatgttgaagaagtaaagaaaaaccacagcatcattctttctgcaccaaacccggaaggaaaaataaaagaagagcttgaagatctgaacaaagaaatcaagaaaactgcgaataaaattcgagccaagttaaaggctattgaacaaagttttgatcaggatgagagtgggaaccggacttcagtggatcttcggatacgaagaacccagcattcggtgctgtctcggaagtttgtggaagccatggcggagtacaatgaggcacagactctgtttcgggagcggagcaaaggccgcatccagcgccagctggagataactgggagaaccaccacagacgacgagctagaagagatgctggagagcgggaagccatccatcttcacttccgacattatatcagattcacaaattactagacaagctctcaatgaaatcgagtcacgtcacaaggacatcatgaagctggagaccagcatccgagagttgcatgagatgttcatggacatggctatgtttgtggagactcagggtgaaatgatcaacaacatagaaagaaatgttatgaatgccacagactatgtagaacacgctaaagaagaaacaaaaaaagctatcaaatatcagagcaaggcaagaagggtgagtttggcttcgaagaattaagctgcgtttttctcttcatttggtttcaagttgtaatacattgatgtaagcctgcctaaaaggtattccaagaaataattaattaataaatgttttattttaaaatggaaa

SEQ ID NO: 271500 - DNA, 1226 bp, Homo sapiens
atgcgcagagcgcgcggggcgcggttgccgtggcagcgccggctccagggagggctgctggcgccgggccgggaccgcggggcctgaggcggagaccggagagcccgcggcccggccggaggcagctcgggacaggcttgagcggcggggcgcgctgcccggccggcggggatgcgggaccggctgccagacctgacggcgtgtaggaagaatgatgatggagacacagttgttgtggttgagaaagatcatttcatggatgatttcttccatcaggtggaggagattagaaacagtattgataaaataactcaatatgttgaagaagtaaagaaaaaccacagcatcattctttctgcaccaaacccggaaggaaaaataaaagaagagcttgaagatctgaacaaagaaatcaagaaaactgcgaataaaattcgagccaagttaaagggtttcagatgtgtgcagaagcagagagaggcgaccacaagccgaccccccagctccacagttctccatgagctcccacccgcacccgctcccagactattctgaagcccatcccaggcatctgagatttcatcactattgaacaaagttttgatcaggatgagagtgggaaccggacttcagtggatcttcggatacgaagaacccagcattcggtgctgtctcggaagtttgtggaagccatggcggagtacaatgaggcacagactctgtttcgggagcggagcaaaggccgcatccagcgccagctggagataactgggagaaccaccacagacgacgagctagaagagatgctggagagcgggaagccatccatcttcacttccgacattatatcagattcacaaattactagacaagctctcaatgaaatcgagtcacgtcacaaggacatcatgaagctggagaccagcatccgagagttgcatgagatgttcatggacatggctatgtttgtggagactcagggtgaaatgatcaacaacatagaaagaaatgttatgaatgccacagactatgtagaacacgctaaagaagaaacaaaaaaagctatcaaatatcagagcaaggcaagaagggtgagtttggcttcgaagaattaagctgcgtttttctcttcatttggtttcaagttgtaatacattgatgtaagcctgcctaaaaggtattccaagaaataattaattaataaatgttttattttaaaatggaaa

SEQ ID NO: 271501 - DNA, 812 bp, Homo sapiens
cacagcttcctctgcggaacttcatcgcgggttccccaggactgcccaggcctccccaggactgcacaggcctcccctgggccggcggagccgctctcaccttccacacttcgccgccctcctgcgctcaggcagcattctggacacgggatgtacaagcttctcctgtacctgcagtttctcacgataatcagctcacaatagtccttatgccaaagaggcatgtgtggaggtgccatattctggtctcctacaacattcagtaatggtcaagatggttgatgcaggaaacagatggaggggcagaagttgatactcatctcattagatccaaagaagccaaatggtggccatcacctgtgacatgaagagggtatattttatggaactggacagctttcagaatcacaagcaacctcttcaaaatgtgatctactgaaacgtgcttgaaagagagaataggagtgaggcgggcaaaggaagcagaagccattgtgaactgccctagagaaaccttgggcatctttttgttgggcaaagtggtagaggctgaaacggggaatagcatgtaacattttatttgactgaaataaacagctgtttgttttttttttctttcatatgtaagatagacaaaaggtgtttgacagataaggattggggcaatgttggtatgagttcagctttttagtttgttctttaaaagtggccatcaagatgtgggtgtaaggtatttcacagtgatttgcattcattctcattgctgtcaccatcaaggcccagttactcaatatccaagtttgtttttgttg

SEQ ID NO: 271502 - DNA, 515 bp, Homo sapiens
caattttattccaaaagcatatcattttgtttttattcccactgacaagcacatacgtctttaaaaaaaaaaaagtgactattggtcaaagttacatttttcccacacatttttcaacttttgggattgtatattccaggctggatatgggcactaaccaggcgcttcctgatggatgggcttggctgttttctccatggtttcttggctcaaatttttgccaacttacatatttttgcttagttttgacatcttctttccatcaaaccagatgtttctgtttctttgcaatgtcagtttttccccatcaaaagcatgaaatttgaccaattatttactgatagttattgaaagatgaagttattgaaagatggcaagttacaagtttcaaaatccatctctggttcattcgtttgaaataattgactatatgatatggtagatatcaattatatgataaacctttcaggggttttttaaatgttaaaaataaagtgataatgctggccttagca

SEQ ID NO: 271503 - DNA, 513 bp, Homo sapiens
cttaagtttatagctcatattgtatagtttaaaaattaaattaaatacaagcaaaacttacaaaatcagtaaaattcaaatttatgacgttaatttaatgtaaaagatttttttcctgaaatgaagatgctgattgcaagatgaatttacagctaactactactgtataggttcttttgagtttggcatgcccatactgccatgtgctttgtgataacttagttctcctaccacttttctctatttgaacttcttcaaaatatcccttcaggcaatactgtctagtatcatttgaccttcacttggtgtaatcagttatttattgttaatcttgcctctgttttcattagttgtgtctgccacttgataccaatttaacagtttggggctctgaattgtcacagcattctgtatttaattataaggtgatggtcagccatgtgatctatattatgtttatgttaattattttttaggttatcatctagagggaaccacaaaattaaaaaaaaa

SEQ ID NO: 271504 - DNA, 453 bp, Homo sapiens
caaggatatgtgtttgtgccactacattctagcctgggcaacagagcaagactgtctctaaaataaaattaaaaaaaaaattaaagcttgagttcttgcatttctaaatacataaatttaaaatatgcgaaatacacttatttttaaaaatgggggtcagcgcggtggctcatgcctgtaatcccagcactttgggaggctgaggtggatggatcacctgaggtcaggagtttgagaccatcctggtcaacatggtgaaagcctgtttctaataaaactacaacaattagctgggtgtggtggcacacacctgtagtcctacgtactcgggaggctgaggcaggagaattgcttgaacctgggaagcagaggttgcagtgagcctccctcactccaggttgagattgtgctactgcacttcagcctgggtgacagaacaagactttgtctgga

SEQ ID NO: 271505 - DNA, 993 bp, Homo sapiens
tgggtgaggcttgcttcatggagagttcatcctcctgcacttctgggctgcagctaccagctcttccagcacctgcttgagaagccatatcccactcccagaagcgtgcgatctcatccaagcccaggtgcagcaacagcgccacagacgcctgaccaccagctgctcagcatcaactggaggaacctcctggtcctgcccaggaatctgtcagccacgggggcagctgaggcagagcaaatggccaagggttcagggtcaagtaaggctgagagaacctgcggttgaacttacgacctgaccaatgagcggtccttctctgttgtctgagctcattatgctccattgcaccccagagccttggctcacgtgacaccttattgcttcttcctcagatagtaaaatgggtccccaacacctcacttgccctctttccacaacgtctttcctgaggtttttgttctgattttcttctttggctagcagccaaggttgtctgtttttgaagtaggaatcacagatacattatccctaaattttccatgtacctttatttttgatggaaagattagcctagaataacattcttgagtcacatttattttcctctaatgtgtgtatatattgttctacttgaaatctggtattgagtgttcccctattttggttttactttctcaaaccttctctcatcatttggctgaatttagcccctaattagtcttatttcatgtttgtaaaagagatttttggttttctattccttgagattttcatttttgtgagtgtctgtttttttttattcttggatgagtataacatgctcaattcacattttctttttctcagaatattgcataaccatgtttcacagatttatacagctgcagagtatcctgagaccatgtgattttttttcatttttagttttttttttcctcctcaatacctaaataattatttctgtattcttggaatttaaaaacttacctg

SEQ ID NO: 271506 - DNA, 372 bp, Homo sapiens
tgagcaaaatattctcctttctctccctgtaaggggaatttgaaaatcggatttactggttaaattaacagaatgtgcattctcagttcagccccacccctgggactagtcacttacttaaaaatacatattaaaaatacagtgaatcatctccactatgtaaaaacaacaaaacgtgcatgcacctagccatggggcaaaacccataacaaaaacccccaccctggtcattggcctgtggcagggccttatggggtctcaatttccttctttgtgttcatgtatttcccacctatttcacagtgaactgattccttttaaggtaaagagaaaagataacattttaaaataaaagaataaggtatcaatatc

SEQ ID NO: 271507 - DNA, 432 bp, Homo sapiens
ggccatttagttacgtaagatgtacttctgtgaggaaaccgttccgatgctgtttttcaaacttcattcttgagatttcctggaaagtcactggagaatgtggtgtgcagaagattaggatgagtttcaccagttatagtgagctcttatggtataccagatggtggctttagcaaatcacctatttcttttagatctgctacctcctttgcaaagtgggtatcatgaccagttccttatatgctaggtcttgacagggaggtcttgctactgaatgacttcccagttaggtgtggtggctcaggcctgtagtcccagctacacaggaggctgaggtgcgaggacggtttgagccgaggagtttgaggctgcaatgagccctgattgtgtcactgcactccagcctgggtgacagagcaagacctcgtctca

SEQ ID NO: 271508 - DNA, 580 bp, Homo sapiens
cctgacctcgtgatccgcctgcctcagcctcccaaagtgctgggattacaggcatgagccaccaggccctaggtttctatactttgaaaagcagaacaacgtttcctcttcagcagtgatgcaaataggaagaaaatgttgaattagtttcatatccgggtattttcttgattttattttgtgtttattaatgaagaaacatatttggaaaatagaaataagttctatacaaaattaaacatcttgttttaggcagtcattttaaaactacactccaaatatctgactacaattcagcaggtctgtcatgatatttggagtgtcattagagtatctttctgttttttttttttttttgtaacttaaaacacaagagaggagatgagacatggatttaaacttcattgtttgttaaaaaaaacagaacagaccaggtgtggtggctcatgcctgtgatgccagcattttgggaggctgaggcaggaggattgcttgcgcccgggagtttgagaccagcctgggaagcatagtgagatcctgtctataaaaataaataaataaatgaaaccaaacaaaaaat

SEQ ID NO: 271509 - DNA, 420 bp, Homo sapiens
tgaaatctctctttcccatttctaggtttgtcaaggaggacagaaactcagagcaccctgcacttggggatcggcactaggagctgctctctggatggggagatgggagctagcagctcacaatggggtcacaagatgcatggtgaatatttgatgttttagaacaaaaatgtatttacaaatctcatttgatgcagacatctgaaaatactcagaagttacaagaattcataaaatacccaccaaagctaatagaaaacatggaaccttccaggacaagaagtaaattaaaagaacaacccagaggagtaatcaaagtgagaagccagtgccgcctccaggtactggatgatcacagggacctcaggctttggggattattcaactaccttcttggaataaacaacaaaaaaagtaaaa

SEQ ID NO: 271510 - DNA, 370 bp, Homo sapiens
tgaaatctctctttcccatttctaggtttgtcaaggaggacagaaactcagagcaccctgcacttggggatcggcactaggagctgctctctggatggggagatgggagctagcagctcacaatggggtcacaaggacccttgtgattatattaagctcaccctagtaatccaggataacctccctgctttaaagttaagtgactataacctttattctatctgcaatgttatttcccattgctgcatgacctaatatatctgcagtctggggattaggatgtggacaccgttggaaaagcattagtctgtttatcaccgatcttattcactatttttattaaatattattctggccatcttctaattta

SEQ ID NO: 271511 - DNA, 282 bp, Homo sapiens
ttcatttctcaactcgtcttcagataaagcaaaggacggcataagacagacaatagagggaaggagtttaagttgttattggtgcatacaacacaatgaagaatcaaagccatgcctccactgatcactctatcagagtgtggttagaagctgcatgcctacttcagatcactacaagagttcctgttgtcctatcaactgctgatgattttaacattaagtttttccaattgtagtcccgcatgacaaataccgcatgactggcatccaaagtttcctgtt

SEQ ID NO: 271512 - DNA, 762 bp, Homo sapiens
acttcagttgtcttttctagcgacttagtttaggggaagggaattttccccaccatatcagacttctccaggcaggccttcatctcatgaagacttttttctcttttatttggacgttctgatatccggattccttttggtcctgtcaacacagatgtgtgtgtgtctgtacaaaagatccccatattgatattaaatctccttctaacccgtgcctttgttttaaattgctgcccagacttggaggcaatgtaatctgaagaacgtagtttccttttttagtcccatctgctccatgtgcaaatgtttaaatacatttccaggtttcttttaaaagcacatatcctttgacacaatgcacaacattttatagccctgaaccattgatgccttgtaaaagcgagtctttgcaaggttatgtttatcatttcctaatgtgctgctcgttctctgtaactttgcagctaacactgaccttcctccccctgtttcctctttaattgttttatatctaactctatgcttgaagatgtgctgagagctgccatgggtttctctgtaacactatggatattgctgctaaacgaatgtctcctgttgaggcacagagcatggtaaatgcaacttatggcctcatgtcccttttgggtaaatcctatctggggcaaataagagaaagaaaaatagcaaaaaaaacccatgggccttgggcaccccctagttctcagggtgggtgctgtaccaaggctttcaacaacaaaa

SEQ ID NO: 271513 - DNA, 467 bp, Homo sapiens
tatataattttatgatttttaactacagtgatgggcattcacaaatctttcataaatcaaacatattagtattaggttttacttagtagttatatacgaaagatcgggccgggcacggtggctcatgcttgtactcccaatgtgccgggattacgggcatgagcctccatgtccggccaatcatttgtttttttaaagtggcagccataggtcctgtccgtctggatatattttgaacttttgtatgttaaatataacactaaaaaactttattatgttttaggtaatctaagattggtgtatacaaacaaactttacagattactgtagggttcaggaaatgatgtatataatatgacatttatatctctagtttcttatgtataaatcttcctttagaaaagattggctttttaaaaaatgtctccacaaatttaggcttattttataaaatgtcacaacagtaa

SEQ ID NO: 271514 - DNA, 390 bp, Homo sapiens
tacaacaaaattcaaatatctcctgtttataaaacatactttaaacataaggatagaaaagtttagaaggtcataaaaggatagactaatattttttagaagaatgctaatttatgcaaatattaatcaaatatattttcaggcaaaaagcagctataaagttgataaaaggaagagtttaataaacttcctaatggaagatgcaacaattcaaaatatgtatgtatctaactttatagtcttaaaatatatacagcataagttggcagaatacaaggataaatgaacaaatctatcaacttatacctctcaagaactggcagatcaggcagacaaaaagaagtgaggatatagaaagctaaaatgcatgattaacaagctgtaagacag

SEQ ID NO: 271515 - DNA, 602 bp, Homo sapiens
agagtaatggtctaatttcaccattaacctgtgttaatggttaataacttttttcaggatcttagccggaaatagatgattcactaaagtggggtgactgaacagcatttaatgaagggaatatttaccaaaaaagtaggattaaagaaagccaataggtacggtaaaccaccttgggaagctgcaacacacccaaagggttagaggaggtagtagtcaccgaacgtgacaagttgacctgtagctgaacatttttccatgtctgtataatactactataaagcatgattttaaatagataaccattatataaatacactgtaatttaaccaatctatattattggacatttagatgttttcagtttttcacaatgtacagtcgtgattttgatatggtttccatcctagttttaggatgtcttttaaaaatctgaattaaagcaaaaatactgataaaattttgttagtttaaatattactcataagtttaataaacttgtttccatagatacaacctatgttttatgtacaacatatctctaacctagtcttggaaatcctgtaatttggtggttcctagacagatttcacagaccagta

SEQ ID NO: 271516 - DNA, 404 bp, Homo sapiens
gtccagttgagatgcctggagagaaagggtaaatgaggcagtgagaaggttcttgcttaatttctctggctaaaacttttcagtactggattaaatagaagtggcatccttgtcttgttcctgattttaggggaaaagcttttagtctttcaccatcaagtgtgatgtaagctgtgagattttcatatatacccctttattatgttgaggatattgccttctattcctatttcattgagtattttttaatcaaaaagttatcttgaattttgttaaatgctttttctgcatcagttgggatgatcattgtttttctccttcattctagtaatgtggcatattaccttaattgatttttgttaaaccatccttgcactttgggaataaattccacttgtcatctg

SEQ ID NO: 271517 - DNA, 324 bp, Homo sapiens
gaaaaagatgccagcagccactttcacacttacagaaaacaaacactagactgtttttcagtgtgtgtgctgtggccagattccaaatccaaacaatatcatttaaaaatgctattacaggcctgtaatcctagcacttcgggaggctgaggcaggtggatcacctgaggtcaggaattcgagaccagcctggccaacacggtgaaaccccgcctctagtaaaaatacaaaattagccgagcatggtggcgcacacctgtaattcctaattccagctgctcaggaggctgaggcaggacaattgcttgaacctggaaggtggag

SEQ ID NO: 271518 - DNA, 374 bp, Homo sapiens
caagaacaaaaggacctataaaatacttaccttctcaatgtttgctgtcccctccatgtgggtgtctgggctggccattgggaagccctgggacatttttcctttggtgtgaggatggagggggtcatcaccacagttgaactgactcacttttgaacagcacttcgcactgtacaaaatattctgcattctctcatttgaccctcacagcgatcctgttttcattttaatgataagaactttaagggtcaaaggaattttaggacagactcaagccatttagatggtggaaaacaaagctaaaacacagttcaggttttctgttcccaagggcaatgccatttccatattgtcaggttggaggggagccaaga

SEQ ID NO: 271519 - DNA, 711 bp, Homo sapiens
ctctgaaagggaaggggaactagattcacagtgcttacctaagcaattggcacaatgttactcaaggtgtcatggagaagaataaatatagtgaaagataaaacattttatttcactaatcttaatttattagatgataattctgtaccccaagtttcagtaagaaaacagaatttccttcctcgtgttataaaagcaaaagcaattcatgatattttctctctcgaagcccttcctccctgacagtctttgtctaccacccactaataaattgtacttaaatgttccaacatatgtttctacttcattaacaatttttctctaaattttgttcctttgttccttcacccatcatgtaccatctgtaccatactgatttgtacgtgcattacttagtaaaactaatgcttaagtagtctatctactcaaaagtgtaaggcactggccaggtgcagtggcttacacctgtaatcccagcactttgggaggccaaagcaggcagatcacctgcggtctggagttcaagaccagcctggccaacatggtgaaaccttgtctctactaaaaatacaaaaattagctgggtgtggtggcgcacgcctgtagtcccagctactcgggaggctgaggcaggagaatggcttgaactcaggaggcggaggttgcagccaagatcatgccactgcactctagcctggtcaactctgtccc

SEQ ID NO: 271520 - DNA, 426 bp, Homo sapiens
tatttaagcacccgccgtctacaccgcatcatggttcctccaggcactgcaggaagaaatggccccatgccgggggaaagaaacaccaaaaggacagccgcgagggctgaagacgaccccgaatgacgggatgactgcctgcaacgggtggtcaggagaggagctcccaccctcaccccgcgggtcgtgacactcccagggaagggagggccccgaggggtgcaccaggcccggccttcctggagtccgccacagaccgactggcggcgttaagaggtccgcatcccaggaccgcccgagcgctcctctgccccaaggaggcgaccccgactccggatcccgggaaaacggcgagcgcgggtaccgaacctcggtaagggccggagcgggctgtcaccggcccccgcatccctcccctgcggccgc

SEQ ID NO: 271521 - DNA, 403 bp, Homo sapiens
tcaaaggtggatatgggtggggacacagccaaaccatatcagagcacttagcagaatagcaggcatgcacacaaatattcaatgcaagttatttattaccatggactgattcacagttataagttacaaacaaggacaatgaaaagtgaagagaacacttaatttcattccctatgtatatacttgacgtgaacaatgcaaaacacacagacagaaggcaacttaggtttgaaagggatgtgtgtaaagttttacttaagaaagtatgtaaagactagtaaaaagatgtattgggcccggctgaggcaggagaatggcgtgaatccgggaggcggagcttgcagcgagccgagatagcaccactacactccagagctgggcagcacagtgagaccccatctca

SEQ ID NO: 271522 - DNA, 406 bp, Homo sapiens
caataagattaacactcggttgatttagatgttatgctggtcctcaggcattcatctttagatatttttggggtggaagtggggtagggctgacttagtaaaaataacctcttagcccaaaggctttattcagacttacaccgatttgaggggtgggtttgtggaatgcaaggttaggttcttacctaatatttgatgactaatttagaattttaaatgtaattttaaattttagtgactggtttcaaatctattttaacttctagattgttcaaagaggtctcagtacatggctacaatcaaagtattagactagctatttctcagctcagtgctcagaaaaattattactgttgatacctttttctttgtttcctgttaaataaatcacctctttaaagacaga

SEQ ID NO: 271523 - DNA, 328 bp, Homo sapiens
agctaggagggggtgtccctcactgtctcccacccaccccacacagtcgtgtgcccctgccccacagccccacacgtcgagccataccccctcagctgccactgccaccaggccggtgctgagctgggggtcagtgactcagctaatcccttaggcaggtgccctgcacccccaacgccaccctgtcaccccctcagcagtaaaggcctgaggctcgaggccccagaggagctttggacctgttgggtatcttgaggtgtgggattaacgcactgagattgggcagagataagggtttcaggggacaaaaagaaacatttgtttgaaa

SEQ ID NO: 271524 - DNA, 1059 bp, Homo sapiens
gcggaagtagccgaagcggctggagcgggcggcaaggcgaggcgaaagctgcacagggccctacgcggccgcctcagcatgtcggacttcgacgagttcgagcggcagctcaacgagaataaacaagcctctagccctgcccctctcagggacgaccctggggtcaggcccctcagccctcgagggggaccaggagccagcctcctctgtcttctctggctccccagctcctcctgagcatcctcagagcgggacaaggagaaccggcatcggaagcgcagccacagccgctctcggagccgggaccgcaaacgccggagccggagccgcgaccggcgcaaccgggaccagcggagcgcctcccgggacaggcgacgacgcagcaaacctttgaccagaggcgctaaagaggagcacggtggactgattcgttccccccgccacgagaagaagaagaaggtccgtaaatactgggacgtgccacccccaggctttgagcacatcaccccaatgcagtacaaggccatgcaagctgcgggtcagattccagccactgctcttctccccaccatgaccctgacggtctggctgtgaccccaacgccggtgcccgtggtcgggagccagatgaccagacaagcccggcgcctctacgtgggcaacatcccctttggcatcactgagtgaaatattgtggggctgagatccctcgtagcaacaaaaagtttgctaccatcgtcgaaggcaaaggcatgatggatttcttcaacgcccagatgcgcctgggggggctgacccagcccctggaaccagtgttggctgtgcagattaaccaggacaagaattttgcctttttggaggtcccgtcagggacgagactacccaggtatggctttgatggatcatcttccaggcagtcactaaagatcgaaggctcacgattacagcgctcctggtgtagagaaacctcgctatttgccggggtggggtgcgggggcccgcattgcccacgtctcgggggtccccaccgcgagccagccaaagggacctgggcccgggc

SEQ ID NO: 271525 - DNA, 572 bp, Homo sapiens
gcggaagtagccgaagcggctggagcgggcggcaaggcgaggcgaaagctgcacagggccctacgcggccgcctcagcatgtcggacttcgacgagttcgagcggcagctcaacgagaataaacaagagcgggacaaggagaaccggcatcggaagcgcagccacagccgctctcggagccgggaccgcaaacgccggagccggagccgcgaccggcgcaaccgggaccagcggagcgcctcccgggacaggcgacgacgcagcaaacctttgaccagaggcgctaaagaggagcacggtggactgatgtgagcttctcttcctgccccttcctccctgatgtccactcccttcaccttcctcacgcccgtgcaccctgtcccgcccatttccagccctggcccaagcactgggaagagtccacttaccttgaaaccagcacccctttcccaggccctgccccagaccctctccttccctggagagagtggagcttacctggttgcggggagggtgaaagggtgcctgggagggggctcgcaggcccactgttggtcagactgaggttgccc

SEQ ID NO: 271526 - DNA, 875 bp, Homo sapiens
gcggaagtagccgaagcggctggagcgggcggcaaggcgaggcgaaagctgcacagggccctacgcggccgcctcagcatgtcggacttcgacgagttcgagcggcagctcaacgagaataaacaagagcgggacaaggagaaccggcatcggaagcgcagccacagccgctctcggagccgggaccgcaaacgccggagccggagccgcgaccggcgcaaccgggaccagcggagcgcctcccgggacaggcgacgacgcagcaaacctttgaccagaggcgctaaagaggagcacggtggactgattcgttccccccgccacgagaagaagaagaaggtccgtaaatactgggacgtgccacccccaggctttgagcacatcaccccaatgcagtacaaggccatgcaagctgcgggtcagattccagccactgctcttctccccaccatgaccctgacggtctggctgtgaccccaacgccggtgcccgtggtcgggagccagatgaccagacaagcccggcgcctctacgtgggcaacatcccctttggcatcactgagaggcatgatggatttcttcaacgcccagatgcgcctgggggggctgacccagcccctggaaccagtgttggctgtgcagattaaccaggacaagaattttgcctttttggaggtcccgtcagggacgagactacccaggtatggctttgatggatcatcttccaggcagtcactaaagatcgaaggctcacgattacagcgctcctggtgtagagaaacctcgctatttgccggggtggggtgcgggggcccgcattgcccacgtctcgggggtccccaccgcgagccagccaaagggacctgggcccgggc

SEQ ID NO: 271527 - DNA, 676 bp, Homo sapiens
  misc_feature (3)..(3): n is a, c, g, or t
  misc_feature (7)..(7): n is a, c, g, or t
  misc_feature (26)..(26): n is a, c, g, or t
  misc_feature (30)..(30): n is a, c, g, or t
  misc_feature (44)..(44): n is a, c, g, or t
  misc_feature (93)..(93): n is a, c, g, or t
ccntttncatcaaccgattgccagcnggancggcattttttaangtgacttgccccggagaaagcttttccccagatttaaaaggattttccnttgcagttggaagggaggtcctggccagtgaagccatccttaatgttcctgataagtctgactggaggcagtgtcagatcagcaaggaagacgaggagaccctggctcgccgcttccggaaagactttgagccctatgactttactctggatgactaaaacaaagggaagaactttttatgaactccacaggaagtagtaaagcttttttttttttttaattaaaagaattttttttgagacaaagtctcgctctgtcacccaagcaggattgcagtggcataactgtggctcactgtagcctcaacctcctgggctctagagttcctcccacctcagctactcaggaggctgaggcaggagaattgcttgagcctgggaggtggaggttgcagtgagccaagatcgctccattgcactccagcctgggtgacagtgaaactccatctcaaaaataaaagaataaaagtatgtctgtcatccagctcctatgtctgttatccagctccaagtacagcttgtgtatatcaacattttcaaaaacctttaaactaccaaatgaaatccagatgtttttccatggt

SEQ ID NO: 271528 - DNA, 557 bp, Homo sapiens
  misc_feature (3)..(3): n is a, c, g, or t
  misc_feature (7)..(7): n is a, c, g, or t
  misc_feature (26)..(26): n is a, c, g, or t
  misc_feature (30)..(30): n is a, c, g, or t
  misc_feature (44)..(44): n is a, c, g, or t
  misc_feature (93)..(93): n is a, c, g, or t
ccntttncatcaaccgattgccagcnggancggcattttttaangtgacttgccccggagaaagcttttccccagatttaaaaggattttccnttgcagttggaagggaggtcctggccagtgaagccatccttaatgttcctgataagtctgactggaggcagtgtcagatcagcaaggaagacgaggagaccctggctcgccgcttccggaaagactttgagccctatgactttactctggatgactaaaacaaagggaagaactttttatgaactccacaggaagtagtaaagcttttttttttttttaattaaaagaattttttttgagacaaagtctcgctctgtcacccaagcaggattgcatgagccaagatcgctccattgcactccagcctgggtgacagtgaaactccatctcaaaaataaaagaataaaagtatgtctgtcatccagctcctatgtctgttatccagctccaagtacagcttgtgtatatcaacattttcaaaaacctttaaactaccaaatgaaatccagatgtttttccatggt

SEQ ID NO: 271529 - DNA, 798 bp, Homo sapiens
tgcatagggcccaaccgagaggagatcaaggtctctccaccaacacccgtgaaccctgtccaaagcttttctacacacttgaaaagtaatcacagtaaaacgttagcaacaatatgatttccatcctggattactgatattgcagaaagaagatagttatacaagggtggcactgaacacacaagaaacaaatgattcacggtagcattagaggcaccagcaaaggacacacttttagagaaaggaatctgctcccctgtggctctccaaatcacactccttaggcaccacatctacagggaagacccaggtagagactgtgaggatctcaatggcctggtgggccacaagatcacttctgcttccggctggaatgctccttctccacagagtccggaaactgacatatgcagccacccacccagaaggacatgtccaagaaggaatggaaagaaaaatgatggcccagatgttctgtagcttgcagtgactgccaattcaccacagaccccagtacctgggagggcaaggcagcatcaggctcttgcttcctggtttcaggcagccagggccctgatggtgggtggcaactctgacagaatgcagactggccaggggagaaacctttagaagggcactggctgacgggacttgggggttgaacacacagcgctgatttatcacttccttactcataaaaatgtgattcgaactgctaaaaaaaaaaataggacgagcggcggcacaacaagacccacaaacggaccacagcacgaggagagaccaacaacaacaggg

SEQ ID NO: 271530 - DNA, 272 bp, Homo sapiens
tgcccttaaagcatcagatttagaaaagtgtatgttgggcgaagggagttttctatttagatattctaagtagaagagtcatagacagaacaaaaacagaactcagcagtaattttgtccaaccactggctccgccactgatttcctactggccctcaggcaagttcctccccatctctcagtctatgaagtgaacagttggactaactgattattaaggactctgtcaactctgatattctgaaagtgaataaaagaaattaacttatcca

SEQ ID NO: 271531 - DNA, 302 bp, Homo sapiens
tgcttaaaaaaaaaaaaacttctctgtccctcaaggtccaattcaaccactgacctttcccaagggatcttccctgacaaacaaggtctacaggaatctatcttcctctcctgtgtctttcgcctggcccttgtcacacagtgcaagttctcttcactttctagactgaaggaacatgaggacttgggcctcagtgtcccatctgtcaaatgaggattataatcctctgcctcctttctgctgaatgaggtgttttaaagttcccgtaacatgcttaataaatcacagcatatgtatacatt

SEQ ID NO: 271532 - DNA, 1134 bp, Homo sapiens
tggacagagtcttgctctgtcgcccaggctggagtgcagtggcatgatcttggctcactgaaatctctgcctcctgggttcaagtgattctccagcctcagcctcccgagtagctgggattacaggtgtgcgtcaccacacccgactaattttcatatttttagtagagacagggtttcaccaggttggccaggctggtctcacactcctgacctcatgatcctctttgcattattcttttagtaattactctagggcagtatttctcaaagtgcggtccccaaaccatctgcatcagtatcacctaataacttattagaaatgtaaattctttttgtttgttttggttaatttttatgcttttttgaggcaggttcttgttctgtcacccaggctgtagtgaagtgacacaagcacagctcactataaccttgaattcctgggctcaagtgatcctcccacctcagcctcccaaacagctaggactataggtgtgcatcaccacacccagctgatttttattttttatagagacagggtcttgctatgttgcccaggttggtcttgagctcctggcctcaagcaatcctcctgctctggcctcccaaagtgctgggattacagacatgaaccatagtacctcgcctagaaatgtaaatttgggagcttgatcacaagcctactggatcagaaactctggcaagggctgcatgtggtggctcacgcctgtaatctcagcactttgggaggccaaggtgggaggactgcctgacctcaggagttcaaaaccagcctgagcaacatggtgagaccctgtaccttaaaaaacaaaaaacaaacaaacaaaaaaaacacctctgggagtggggaccagtaatatgtgttttaacaagctgtccaggtcactgtgatgcacactaaagttgtgagccagtgcctctagggattatatttttaaaattataacaagctagttcaaattaatacttattcccagtaaaatataagatccttgtcctagcacagctccattccctcccccttctttatgttcctgttatcacatatattccacctatgttataaacttaatgatagtcataaattctgcttcacatacctccatcttttaaa

SEQ ID NO: 271533 - DNA, 813 bp, Homo sapiens
tggacagagtcttgctctgtcgcccaggctggagtgcagtggcatgatcttggctcactgaaatctctgcctcctgggttcaagtgattctccagcctcagcctcccgagtagctgggattacaggtgtgcgtcaccacacccgactaattttcatatttttagtagagacagggtttcaccaggttggccaggctggtctcacactcctgacctcatgatcctctttgcattattcttttagtaattactctagggcagtatttctcaaagtgcggtccccaaaccatctgcatcagtatcacctaataacttattagaaatgtaaattctttttgtttgttttggttaatttttatgcttttttgaggcaggttcttgttctgtcacccaggctgtagtgaagtgacacaagcacagctcactataaccttgaattcctgggctcaagtgatcctcccacctcagcctcccaaacagctaggactataggtgtgcatcaccacacccagctgatttttattttttatagagacagggtcttgctatgttgcccaggttggtcttgagctcctggcctcaagcaatcctcctgctctggcctcccaaagtgctgggattacagacatgtgccacgatgcctggctaatttttgtctttttagtagagaccaggctggtcttgaactcctcgtctctgcctgccttggcttcccaaagtgctgggattacagtgtgagccatctgtggccagccaaattgtgcttgttttcttattgagttttgagtgtgattctgcccgggatcctctagac

SEQ ID NO: 271534 - DNA, 453 bp, Homo sapiens
tgtcttatttgggattcctcacagcatgggctttaaggctgagaatatcactttaaaaaagcagaagtacaaggcatttttgtgatctaacctcaaaaatcacatgtctggatttctgtcattctccatcgacagagttgtcacagatcctgagcatacactcaggatcaagggaaatagacatggttaaaggcagattatcgttggaaaatagaatctgtcacaagactctgggcttttattttggattctgaaatggctgaaacatggaaatcagacatcacaaggactgaagcccagtttcaaatcagctgagtctcataatgcattaagatgccatgttccttctacaatattcttctcacagcaaagaaaatttctctctggaagaaaatattatcatccataactttctgtatgctctgcagttaatacacagtgtatgacattaaa

SEQ ID NO: 271535 - DNA, 473 bp, Homo sapiens
cattacttgatagttggttgtcctgggcaggaaaggttgcaagccaggttgttagggcctttgctatgtctcttccccaggctgttaggggaagtactgcagtgggccagttgctggaataaagtgaccgcacaggactatacctaaagccagatggttttagtaacagtgaattgaattaaatcaattggaaaagattggtagctgctgtccttatcctgcaggtctgctttaaagaagagtctggcagggagccagggacctgttcctaggaaaggcaggcaagatgctgctggagaggaacaatatgcgttcctctctgagaccatttcctttgaaacatgttctggggcaggagcttgattggctgccaaggcacatgtgagttgggaagcaccatgtcagacatgcaaaccagggagcccctgggccgtgtttattatacgtgttctgactggcccttgttgtttaaa

SEQ ID NO: 271536 - DNA, 264 bp, Homo sapiens
cacgaggagacaattccacgattcatcaaagccagaggaaagtactttggaatacattgccaattgaagtcccaaacacttccaaccatggggacttttaaatctaaactcagagctctgctgtttcatgtggcaatttcttcttttccacccaccctcgacaaactgtcttgttccagcaatggactttttttgaagaagcctttcttattccttatcagagcatcattctgacagtttctgctctttcatttggttggttgg

SEQ ID NO: 271537 - DNA, 198 bp, Homo sapiens
cattaggagatatacctaatgttaaataacgagttaatgggtgcagcacaccaacatggcacatgtatacatatgtaactaaactgcacattgtgcacatgtaccctaaaacttaaagtataataaaaaaaaatcatacctagatatatcacaataaaacttgacctcagagtttctagctctcaagaccaattcctc

SEQ ID NO: 271538 - DNA, 565 bp, Homo sapiens
tccttaggactgtaatccatagacaatttacactaccaatcaggacctcttcaacaccaaataaaacaaattctcaaccatttattggtatgtaacttatctgaacatactttcaaattgttcttattcattgccactaataaaaggtagaatttgttatattcttaccttatattttggctatgaaataagaggtgccctgcttcatcaagctcctgtgtaggtggatgtcattggaagtcttatggcacaatggtcagaaaagtcagtttagtccattgaatcttcaagttgcagatgaaaacaaatacaccttagtgagcttgagaatttagttgctcaatggccaaagagctagtaaacattggagctgggatgcagctttggggctttctgacttagaaggccataccttaactcactgtctagataggtgactgttaggggaaagctaaactctttcctctttaaaacctgtaaaataatttctcaactatttattggcatctactttatctcaatgtattttcagttacagccatccctcactattggttttaggacc

SEQ ID NO: 271539 - DNA, 467 bp, Homo sapiens
agactctgtctcaaaaaaaaaaaaaggagaaaatctgaggaagctcagaatattttagcttattgaatagtagttctaacatacagataagaaatgtcatttactgtgtactgtgtactggctaccaggttaactcagagcacgtttacaatgagggaacaagggcattgggaagagcatcattttaacagctgctaaatgatggagagaatgctcatgggagcatttcctctagaaacatatccattaagattcctgcaaacatacacacaagttttatatagagcattctttgggaatgctcttaacttcagtagagttgacctattagaattaagtcatatgatgtagtcttttagctgagagatgggaattttttaaacatggatgataaatgattcctataagcttataattcatgttcttgcaaaaagaaaaaggatttccattttattttctgcatgaac

SEQ ID NO: 271540 - DNA, 566 bp, Homo sapiens
ccttacctattgagtgtagagtttttctacattcttagccgccttcttttattcttttaatacttctgttaaccttattctcttataactatttatttcttttggtgaccattacctggatttcccataagcaactcacaatcaatatattcaaaatctaattaattatcttcttttccaaactaattctgtcttttatttttttctgttaattatattgctaccctgtggttattcaagcaagaatattgaatatatgctcattgtttttaaaagaggtaagaaagaatatagctttattctgctcccagaggtaactactgttaatagtctgatacatatctgtccaggtccaggtttttctgtctctgtgccttgttagaccccgcttccctcccttctcttttgaattttaatgttatcataccatactttgtgttctaatgtgttacttcactttagactatgtcttggaagtctttacatgttaatatgtctatagattctgtggtgtatatgggtgaacgtgtgcatacatttatttaggaatgtaagaatattatcaa

SEQ ID NO: 271541 - DNA, 394 bp, Homo sapiens
ttcttcaaaaatcagatttccaggtatttcatagcttgaacaaatatttgatgagacccctcccctgaaattttataccctagaacttaataaacatgcctggaaattttatgtagatgaaggattggggtttctagaggtcatggcataagtcattctttcctacctggcctttgtacaataccagatacaaaatgaagagtaaagatagaggccagaacgtacctactaatgataaaagtccaagtggaggtctgagtttgagagccaaatgacctgctgattgaattgcagaaccaggccaactttttcaagcactcttcaggtaatataaataagacagtgccatagagcagggatctttatggtttttgttgcaattgtagctactctg

SEQ ID NO: 271542 - DNA, 606 bp, Homo sapiens
ttcttcaaaaatcagatttccaggtatttcatagcttgaacaaatatttgatgagacccctcccctgaaattttataccctagaacttaataaacatgcctggaaattttatgtagatgaaggattggggtttctagaggtcatggcataagtcattctttcctacctggcctttgtacaataccagatacaaaatgaagagtaaagatagaggccagaacgtacctactaatgataaaagtccaagtggaggtctgagtttgagagccaaatgacctgctgattgaattgcagaaccaggccaactttttcaagcactcttcagtctaggttagaagaggcaaaaattgaagacctacatttgtactgttcaacaaagtagccatgggccaaagtggctgttgagcacttgaaaggtaaaaattggctcatgaagacttttatttaaggagtattgccaaagatagtttcttgaagcatgtacatttatttttactgaaaactgcctttttctggtttaaagctgctctttgaaaattcataaaatgtttatatttttatggtactgtacatttgtgtgtatcatttataaaaattcagaagaat

SEQ ID NO: 271543 - DNA, 449 bp, Homo sapiens
attgttttgaaatttaaatgaggtagtacatgcagcacaatcccgggcatgtaataaacattcagtaagttattattagtattagtattattagacttaagctccttgatgacatgatagcatatcatcattttatcatcctcaccatctcttgcacagggtgtggcactagcgagagcttaacatgcatttgataaatgaaaaaaagaaaggataaacgaaggaaggaccaaacaagtctcatatttttcagagaaaagggggacccaggttaagcaaggggacttggggtgctgtacaggcaggtcaggtgtattttggcccagaagggctgctggtgcacccgtgccaccttcgccctccacacccccagcaccccaccttgcaggcctgcagctgggaggcagcctgcaggcaggacatcttggctggaccttggacttgatacc

SEQ ID NO: 271544 - DNA, 524 bp, Homo sapiens
tctctgcattcctacaaacacttatccgtccttttgattatagccattctagtgtgtatctcatgattttaatttgcattttataatgactgacgatgctagatatcttttaatgtgcttattaggaatttataacgcttctttgatgtaatatatatttgtatctttttgaattaatctcttttttcaaattgagacagggtctcactgtgttacccaggctggtcttgaaccccttgggctcaggcagtcctcccacgttggcttcccgaagtgctgggattacagttatgagtcactgtgcctggccatctgtatcatttatccattttaaaatcaagttgtctttttattgttgagttgttatatattctggatacaagtacttaatgagaaatatgatttgcaaatattttctccatatttgtggcttttcttttttttcttaatggtataagaaaattttgaagtataaaagttcttaattttaataaattccaatttatgttttttctgttagcaat

SEQ ID NO: 271545 - DNA, 476 bp, Homo sapiens
gatgtactttatctatcagtggcatcatgagacctgacgacagtcactgaagtcactgtatactttttttcacctcttcctgcctcttcccttacccatctcccctgccccggtaactaacagattccttccagtcaaggagctgattattatatttttccctttacttttttggggcactgctaaagatgtatctgaagcagggcatggaggtatgcacctatagtcccagctactcgggaggccaaggcgggaggatcctaggaattcaagactagcctgggcaacatagcaagatccccatctatgcaaaaaattttaaaaaattagccgagcctggtggcatacacctgtagtcctggctactcgggaggctgaggcgggaggatggctggagcccaggagtttgaggctgcagtgagctatggttgaatcactgcactccagcctgggcaacagagagagaccctgtctgt

SEQ ID NO: 271546 - DNA, 668 bp, Homo sapiens
tcctccaaacagggaaaaacatcataggaaagcttttcataaactcacaactgctgggacatggagagttgaggcacatgagacagctttggggaaaacatgcggaaataggaaacgctgtgttatcttaacaactcagtttgtcagccaggtttgtcttgttccgcacccgcagtccttgaggtatttcaagcatttggtcattctacccttgatggccttcaggaagtgcacagatgccagccgttgtatcacaaatgctaagggacctcactccaaggccaccacttggaaggttaaaatgaggatattttctatcagtcatagcaggaagagaaagtggaaaaactcgacgtttgtgataaaggacagggacctccttttgtgcatgggaaattgaatccttgggtagcttgttggttacagtgtaactctagacttctgatggaccacctcatttgtggttgtcatactgacgatcagttttactaagtggcatactccagttttttatttaatgcagtctgctggggagtactttcttagttatctattgtgttctcagaactttgttcctctaagatttgtaggacatggcaaataaaagataccaccctttgaggaatttggttaggaaggaagacgtgagtttaggagacacatgtaga

SEQ ID NO: 271547 - DNA, 595 bp, Homo sapiens
atatgctttatctggttctaccctctcaacaactctatgaggtagataagacagacattcttatcccaaattccagaaaggagttactgattgcactctgagcccatggcaagataagcccccagtcccctgtgttcccaagtctaatgctcatgcctctggataagtatttaccaggtgatcctctgctcagatccagaatgctgggctgggctcacgtactcacgctgcaaattggagaacctcaggagaatctggccagcctaagaaagacgactcaggtgctgacatttgagttccctggtgaaacatctgggcccctcccctgcccccagttcacttaccactggaggactgggagaacacttttcgctctcactggcccactggtcagtgagtgcccacctctctctctctctcacacactcacacagacacacacgcatatgacttccaatcaactctctaatgctcctctggatagctaagcatcaccagacatttgaagaaaccctccaacatgaaaaacagagaccatgataaacaggaaataaaggaactcaatggaaacagacacaatataagaagtagaagg

SEQ ID NO: 271548 - DNA, 280 bp, Homo sapiens
aagccagattcaaaggccagtgtgctgtatgatgccattggcgtgacattctggagcaaaactatagggacccaaaacacatcagtggtggcagaggctgccagtaggacgaggggtcgactcaagggagcacagaggaatttgggagtgatcagctgttgcacaccttgacggtgctgctaggcacatgggcgtatgaattcaccaaagttcatagagaatgaaaaagggtgactctcactgcatgtgaattgtaccttaataaacctgatgttcaaga

SEQ ID NO: 271549 - DNA, 366 bp, Homo sapiens
aatgtaagcacagacaattctctctccaccctcaaccctttacacaatttctgagaacagcgattttcaacgaaggggaggaacagaaatgaagttgacaagagaagccatctaaaattaaaactctccatatggaattgctttttcttttcctccagagagtgtactcactctaagtcagctctgtctttgaacattttcttacaggatagtcattggaggctctgataactcctagcttctattattgtccagcttgtatcttttaaatgtcaaaactatgttcttccaaatgacaaatttttatttttaaaatatttttactaactttacttgtatgttgaacagataatagtacaaaattca

SEQ ID NO: 271550 - DNA, 356 bp, Homo sapiens
caataactcttgcagataacattactattgtagaacctaagattggccttttgagatgtcttttcaggtttgtgcatttctgacaaccgggtggccccacctggacccaccagtcagtcctgtggcccctacccaggaactgactcagcacaagaggacagcttcgatttcttatgatttcatctccaactcaaccagttagcatgttccctaccctaccccactgcccagcaaactatatttgaaaaacccctaacctaggagccttcagggagattgatttgagtaataactccgtctcttacactgtgtggccagacttgtgtcaattaaactttctttattgcaatgccatg

SEQ ID NO: 271551 - DNA, 396 bp, Homo sapiens
gctggtatctccaagaatgggcagacctgagattgtgccactgcactccagcctgagaaacagagcatcagcaacatcagcaacaatgaactaattgggactaatgaatgctattctcccctaaagcaacattggcctagagaactgtaatcctaatactatagtagctacctaaagctctcaagtttctggaatgtgcagaggaagtcagaaactgcctaggtataaacaaatggtgtaggggttaactcagtgcatccaaattcccagtttttatacctattctaggtaaacagaaaggaaacttaaagcctccttcctacttctatgaaataatgccaagaaatcatgtaggaaactgcaatgaaccaactattaaaccatattctacaagaa

SEQ ID NO: 271552 - DNA, 423 bp, Homo sapiens
atgttttggatctagacagaggggcattacacaacattgtcaatgtagtaaatgccactaaatttgcacctgaaaatggttaattttttgttgtgtgaatttcatctcaatttttaaaaaagattatatcgttcagtcttttattttgaagatgtgggaacaagtagtgggaggatggtatccaaagcccactcagggtgcaggcaggtccctaacacaccgatcaccctgcccagacttcaacctaatcattcccgcttcgctacatggcctgtgctgtcgtaaggcagtgagctcagggctgaatgtacccagcagagaaaattcatatcctcaaaaactctctccccagaagttttgtgattttgtttgttcatgtattttttcccacaataaggaaataaaaatgtatctagacttaca

SEQ ID NO: 271553 - DNA, 621 bp, Homo sapiens
tcatttctattttctgttttaaaatttttttcctctaaagtccatgtacaattttcataataagaaaagctaatgcatcctatttttaaactaacattgttagaattagggagaagatggttcatttataggaaaggatatcatgtttgcaagaaaatttgtaatggcatgaggaaacataataaagggagaaatctacgaaagtattaataatgcattgacaaaagtatagaagggaatacagaaacatattagtctttcttctggttctgtaatatgataaaaacatttataaagctgggcatgctggtatacacctatagtctcaactacttgggagagtgaggcaggaggatttcttgtgcccaggagtttgagtctagcctgggcaatgcaatgagaccttatctctaaaatataaaacaataaaaatataaaatttaaaaaatttttctgcttttcaatttttctggaaagaaatatatcttaattaaaggaaaagaatttaaaagcaggctgatactcgagcattttgaggtcatatttgatgtgaaatgacattcaaaatttcagggagttaatttttttctagcagcacattgaatgatgctaaaaggaaac

SEQ ID NO: 271554 - DNA, 380 bp, Homo sapiens
tcagttacaagaagcttgactataacctagaattatctgagtgatttttatgattattttgagtaattactgctatacttagaagttacctacagttggggattgtgaaatcaaatatattcataatttttattgtctgctttatttgcaaatggcattaagtttcagtccacaaagataaatacacaaaagatggaaaataatataaagtaaaatagatgagaaaggtataataaggataaaggcataatatgcaatcaggaatatgactaatacatatatgcttgccatttaagtcttctaatttcatgcaaatttggcttgaagttataacttgtttttaaacataaacctttttttgaagcataacaaaaacaaaa

SEQ ID NO: 271555 - DNA, 790 bp, Homo sapiens
tgttcaatgagagtcctgggccaaaggcctgaccctggagcccctttcagcactgactgtccatgaactaggccctacaccagactacaaccaaccttccctcctggggacccttcccttgaccccatttcataaggagggtggattgggagatcctgatggggcaggaattacaagcttgaatctccacttcggaaaacacattcctgttcaaatcaagtctgaaggttttcggtttaaaggcacactcaggagcactgccgggctccccctaaagcagcaggccccactttccaagctgagtcaactggttcaacaccgagaacctgatttatgtacagcatgggcctccaaccctgcccccacccgtgcggggggaggggacaggcttcctggaacaccatttgaataaagaaaaatccttccggtgagaataagtcagtttcctgcgctcatactgctaaaggaccaagcaaggctgtgacaatcacctctatttttaatcttttctaaatgctgttttctgtggccacaagaacagtcatttccaggcgtggggctccactttcacacttcgcttcaaggtgtctggtttttcttagctctgaactactagttttctccgctgcttcctgcaccagaagggtactggggggagccaagactcacttgttgagcgtggctgagaccaccaaggtgtccaggggaaccacagggtccccctttctcagcattaagcgggagggttagactgactgggggaagagagacacaatctcagaccccaggg

SEQ ID NO: 271556 - DNA, 313 bp, Homo sapiens
agtataaacttatcaatatgtattccaacatgaacacaacagaaaccaaactaaagatttaggttgtgttaaaatatgaccagtactgtgggctaaggagcctgttttccagtttttccagagaaactctttgacaaaaatatttgtcaccaatattgccatgagggactcaataggtctcaaacattttggtcttaggatcttgttacaatcttaatttattgatgatctcaaagagcttttgtttatgtgggttatagttatcaatatctgatacatttaatattgataactataacccacataaacagtc

SEQ ID NO: 271557 - DNA, 214 bp, Homo sapiens
ggtgatcagttttttaatgtgcacatttagtaacaccattctgagttctattaatgacctgcagtgagcagtgacaagcaggaatatgacattcagtactgctgaggacctgccaggcagcggctaacacgctcgctttcatctgcagctcgggagacactctatttgcatcctaaataggttacactacagcacccccttctgccgactgagc

SEQ ID NO: 271558 - DNA, 558 bp, Homo sapiens
tgtgtccatggtccctctgttcctgggctccctggagtccattgggaatccgagtcctcgccttcccatcatctgcctctggaatgacccttgggtttgtctttcgctctctctccgttctgccaccttcccggtgctttaatcaggcatcagtcttgtagctgtagccaggacccaccaagccactccattctcttctcagctcccggagtgtgatggttaatattgactgtcagcttgatgaaattgaaggatgcaaagtattgttcctggtgtgactgtgagggtgttgccaaaggagattcacatttgagtcagtgggctgggagaggcagacccaccctcaatctgggtgggcaccatctaatcagctgccagcatggctggaataaaagcaggcagaagaacatggaaagactagactggcttagtcttttggcctccatctttctcccgtggcttccgtgctcctcagcttgcagatgacctgctgtgggacctcatcttgtgatcgtgtgagtcaattctccttaataaactcccctttatacataaatc

SEQ ID NO: 271559 - DNA, 466 bp, Homo sapiens
gatatttaaaaccccaccatgaatcagaaattcttactagaaggaagaattaaaaggaccgactagactcagaaaagaaatggaggaaaaaggcaaaattaccttagaaatgaagacaattacaagatgcccaacagaatagattcaaaggaaaatttaataacagtcataaagacaggagaaatactaagaaaattaaaatgggaaaaagcaaagtaaaaaaggttagcgatagtggtaaaaatggaaggcaggtcagaaaaaatattcatttggtaccccagaagaaaaccaaacaacgaaacagaactaatatttaaaactgtaatccaagaaagcattccagaaacaaaaagagagctgaatctacacattgaaagagactaccaggcaccttagaatattaacacagaacaaacaacttcaagacataacctagtaaaactattagatttcaaagaaaaaa

SEQ ID NO: 271560 - DNA, 182 bp, Homo sapiens
cctaggtgtggagggggaaaacttctttaaaagtacaaaaacacaaaccatgtgggaaaagctggcagatgagagtctgcaaaatataatacctatgatatataaagagcacctacaaatcaacaagcaaaaatacacttaataggaaaatgggcaaaggatagaaatatacaattcataga

SEQ ID NO: 271561 - DNA, 338 bp, Homo sapiens
cgcccgcctcggcctcccaaagtgctgggattacaggcgtgagccaccgcgcccgggctaaataattttaaatctgatttcgagcaagttccgtaagtattttgttgctaatcagacatgaaatgtgtaaatatgtaaatttcgtactgcacttctttttatatttgattcactaagaaactcacaggttgttatagtctcagagtttcatttttattatttaccttaccaaagagctcgttttagtatgacctttacaatgaccttaaacacaagatcaaatgaaaaggaatgtccctgctatagcttaaagtttgaaaaaatatactgatcacacc

SEQ ID NO: 271562 - DNA, 398 bp, Homo sapiens
aatagacagatactggaccgggcttatgcgtgatagtcttttgattgatgttcatgcagtcaggtttctcttgagtaatcctttctttcagttctttctttattacttccttcctttctttttttttttttttgcattttattcaaaacacctacataatttttgttttaaagtttttttgttacacctgatgttcagaagccaaacaacagttagagttgatggggctggggaaggagggtttgcagatttcattcttaagaaagaagagaaggccaggagcggtggcttacacctgtaatcccagcactttgggaggccaaaatgggaggattgcttgcatccaggagttcgagaccaccctgggcaacaaagcgagacccatatctctacagaaa

SEQ ID NO: 271563 - DNA, 496 bp, Homo sapiens
ccaaagagaccccctcaaaatgatggcttccagagcacatgaataaaaatgattgcaatgagtttaaaatacttaacattattttacaaatcattaaatgctgtacaagtcataacccagtggactcacaaattaaacagggctgactgataataaaacaacaaattaagcaacacaggggagtatctgactgttgttcagaaattaaccaactctaacatgtaggagtaattaaaataattccaaaataatggagcttattaatgttggaaactggaagagacagtccaatcgtatttatttaaaatgcttatactttgtacttaaattgtgtattttttcatgtctattgtttcttgtgagcatcattacaacctctttttttacatgttgacatgagtttatttcgtggttttgatcacaaacaaaacatgttcatcatgagttactcaaagaggtataaggagagatataaaattaaaagcaaagttcacag

SEQ ID NO: 271564 - DNA, 562 bp, Homo sapiens
gccaaaaattatgcagataggagcgaaggagctgaaaggacttttaaaggccacggattccaacctctaccatacagaggccttaagtgtttcggtgaggtgcccaaggattcacagggaaggggcaaaatcagaaccccgctctcctgactctgcccactccccggtggctagggtgggcctgtctccttccttacccagctccctccctctcctcggcgcctgtggcactgattagaacagcaccccacaaagacacccatttaaaaaacaaacaaaacccaagtgtattaatagctatagtacttcatatagaatgtactcttaagacttaatatttattgctctaagtggacaccactgattgccaataaagactcatttttccccctaaaaaaaaaaaaaaaaaaaacaaaaaaacaaaaaaaaaaaaaacaaaaagaaacacacagacaacagaaaaaacagaaaaaaaggaacaacaacaagagaggagccagaaaggaacgaggtgagagaccactgatggcaggaacgcacacgaaaaacacatggagcatag

SEQ ID NO: 271565 - DNA, 391 bp, Homo sapiens
actgttgccctggccaacaacttaactgcaacctcaagagatacctaccctgagtcagaaccacccagtcaaactacccctggcatcttaactcagagtaactgccccgttgactggaggatggccatttgacaacacattatttcctgaggaaacttttgacttctggtgacttgggccccaggctggctgaatttgccaagacccggctttgcccttgcatgtgtgaaaaatggcctcaagtatgaccccatggcaagatggaaagaaactgtgctcttgaatagcttagagattcagagccccccaaccagcttgaaacgcccacctcaaaacaatgacatgagaagaaacaaacctctaatttaagccactgtctttttaagagcat

SEQ ID NO: 271566 - DNA, 168 bp, Homo sapiens
gacgcagctggaaacccaatcaggacatcggagaagaaagcagagtgaggtggggtcagaagggggcacgtgggacattcccaggagttggaactgaagaggggtgaaagggagggatgtgggcaaagtcaagctctggaagcagaggctcagggggtaccctgtgtt

SEQ ID NO: 271567 - DNA, 361 bp, Homo sapiens
ttactgattcatatctgcaggattaagaaatgttcaggatttgaatttttaatgaccttccaagcagtcatgtttctactctctagaagttagccagttgaggagaagggacagtcaagatactttcaaaacagtgtggtaaggagtgtgagctaagatggagcaccgaggagggagtcgggcatttaggccgtgctgtcgggcgtggagcctggaagggatcggggaatactttctgcatgtgtcttgaagaatgagtaacattcagactaacagggtggaatgaggggaatcaaaggagaggaggccagtaactacaaggaggtgcttatttatttatttattgagagagagggtctca

SEQ ID NO: 271568 - DNA, 517 bp, Homo sapiens
aatgaaggtgtaaatataatttgaactgaagagaagaaagttgtgttttccctatgaagtacagaataaggctaagctaagaaggctgtcttaaggaaattgtcaaagatttagaaaaacatctgtcaggaataaagaagtaactaaaccataaagagagttgcccagcaatttgaagccttaagtgaaattggtaacagtatgtatttatgattgccaagtaagaaaactcatctggccaggcgcggtggctcaagcctgtaatccctgcactttaggaaaccaaagtgggaggatcacttgaggccaggagtttgagacccacctgggcaacatagtgagagcctgtcttgcaaaaaattaaaaattagctgggcatggtggtgtacacctgtagtcccagctgcttggaacactaaggcaggaggatctcttgagcccaggaatttgaggtcacagtgagtcatgttggcaccactgcactccagcctgggcaatagtgcaagatcctatctct

SEQ ID NO: 271569 - DNA, 503 bp, Homo sapiens
actttgttttctttttgaggcagggtcttgctctgttgccttggctgtagttttgaactttgatgtgaggaaattctcctgcgtggctgctcctgcactgcatggctctgagcatctgctctatgtctatttctgtcctccattctctccttgagacccacccacactgacatggttcattttcattgctgcgtgatctcctgtctccattctctccctgagacccacccacactgacatggtccattttcattgctgcatggtctctcgttgtctgaggggagcatgggaaatgtcttcatcttcccgtggatgagtgtttggccaggttggggccctgaggactgcgttttgctgggaacattcttgggcatttcttttgtccacaagtgcaggttgcttctggtcagtagctttcaagttttaaaatttcatcccaggtaaaaaatgtaattttcctcataacccacaacacacatcctttcatatacaagcataacaaa

SEQ ID NO: 271570 - DNA, 243 bp, Homo sapiens
tacattcatatttatagcagcactggtcaccataaccaaaaggtggaaacaaccaaatgtctatcagtggacgaactgataagcaaaatgggctagatacatacaatgaaacattactaaccaataaaaggaaatgaaattctgatgcatgctacaacatggatgaaccttgcaaacattatgctaaatgaattaagttcacatattgtatggctctaattatataaaatatacagaacaagt

SEQ ID NO: 271571 - DNA, 486 bp, Homo sapiens
atattcctcttttttttttaatcatttcacttgtttccctttccctttttttccttttatacttaattttacaataaagtgtcatcgcccactagaatgtattaagtccatctataaagaagagaaagaaataaggtatgtaaatatcacaaccctacaaatcctgtgtgcttatggacatttcttttcctattctctcagagtaaatggttcttcatttggttaaagttttaatgcatcatttatttatctaccatatgatagtctagaaatcaaagggtatcacatgaaatagataattcaaaatttctgaaacattccttatatgttaaaattttatgtatgtatatctgtacccaatttctatgtgtcctgagtgtgtccaattatattcaagtactaaatgtccgcagaagtccttttcatagttctttcaaatgaaaagaatattgagacttgtgaatgggctttcaacaataatcattg

SEQ ID NO: 271572 - DNA, 363 bp, Homo sapiens
gtgtggaacccaggagctgatggtctcatctgggcccagctgcctctttgcagactttatggccttcacctgggtttgcaggaggcagatagtttctgggtctggataagcaatgggtcctggaacaaaactctagagaccgggggctattcatgacaggctccatttcttattgaacattcagttcaccatcaggtcttgtctagtctacccccagagcatccatttctccatcaccttggccaccactaccatcccctggctcctggctggtacctccatggtcccacctttgggactttgagtatgcaatgtttttgaaagactcagtccctacccattatgggtagaattagctccttc

SEQ ID NO: 271573 - DNA, 386 bp, Homo sapiens
ccaattttggccaatgacaaggaagttctgtttgtgggtatccgggagagaaatgtccagattcctaagaaagagacacaggatgaagtggtcatttcttatgcctgctattacgtctgaatgagacacttgggattgctacagccatttgcagcccttgtgaggacaaagtcatcagcaagaatgaaggatcagacagatggaaagaacttggggccttgggtacaatatttagcccttggatcaacttcccccaaagccattcctacttgacttcttgttaggtgaaaaaagatgtatctttatggttaagttgagttagagttctctcatgtatattgggagttgtcctcacttataaatactcatgctattttctttgtatg

SEQ ID NO: 271574 - DNA, 412 bp, Homo sapiens
gtgtccgtcaacagatgagtagataaatacaagtggtatatgtatacattatagaatattattcagccataaaaaggaatgacgttctgatacatactacaacatggatggaccttgaaaatactaacttaagtgaaacaagccacacacaaaaggacaaacattgatagtgatctaccagtatgaaatgtctagaataactaatagtggcataaagtagattaggggttactgggcctagaggaagaagggtttagaaagttaccatttaatggatacagcatttgtgtttgaggccacggaaaagatttggaaacaaatagtgatagtgatggtggttgcacaacagtgtgaatataattaatgctactcaatcacctagctaaaaatggttcaaatggcagtttgtcac

SEQ ID NO: 271575 - DNA, 421 bp, Homo sapiens
ctggcctgtgtaagcggatgggctcggcctcaaggacagggtgctcggctgaaaaaaaagctagcggcgatcaccggtgccagggctctccagaaacggagcccatctaaccaatgcccagcacactcgctctgctccacacacgagaccacctccgacccgcactaagttggccaactgcactctggaggcggcggcagccagcgagggagaagggaaaggctgtcccgggaccccgaggaggactgccccgcccccgggaaccgggtgcggcgtaaaacaaccccggctccgggccgacccttcctggccccttggaggcccaggcggggcggcggggggcgacgcggcaggggtctccgcgcccaggctcccgcggagcggccacacgtggaggttcccactttggggtcgcggccgc

SEQ ID NO: 271576 - DNA, 467 bp, Homo sapiens
cagagcaagactgtgtctcaaaaaaaaaaaaaaaagagtgctccaaatctcctttggttacccgggactttaaaaaatttaatgtgatagttaggccgggtgtggttgctcacgcctgtaatcctagcacttttggaagctgaggcgggtggatcatttgaggtcaggagttggagaccagcctggccaacatggcgaaaccccgtctctactaaaaatacaaaaattagccaggcgtggtggtgggcgcctgtaatcccagctcctcgggaaattgaggcactagaattgcttgaacccaggaggtggaggttgcagtgagccgagattgcgccactgcactccagcctaggcaacagagcgaggttccatctcaaaaaaaaaaattgtaataataataataacaatgtaatatttactttttcatcctttatataaggctgagtgcttcacccctgagatgaagc

SEQ ID NO: 271577 - DNA, 378 bp, Homo sapiens
cacaccctaagaacacggagggccaccggagcttctcattcagctacatgggagccaagaccttgccaggtggaatcagtcacacattttatttacaggatagcccaaatttatgtgctgattttcattcctgcccttcctgatttggggagtgctgcattcgggcaccctcggagccgttcgaaatgtcaagacggtggcttctgcctcagccagttggaatcggcctgtgtcaattcttcagggagtacatcttttatccactctggaaaattccaaatagtgccctagcattgtctcatgtgagtgaggttctctgagatcatacatcaaggggaagtgtcttatttaagattaaaaaccggaactaaactaaaa

SEQ ID NO: 271578 - DNA, 447 bp, Homo sapiens
tcttagatctcaagtaggcactatagcatctcatcaggaggaataggccaccagaattttttattcccacccctcagtttcatattgcagagaataagcttcagatgaatgaacccaagagatcaagggctctgttcttacatctatcccacactcatataatggaggtcctatccaacaaatagcagatcatcatttctgtactataatgtaaaattatgttagtttctataaaaaagtatactagaatctcaaaagtgtatctgaattgaaagaataaataatcagaaatgcagagacatattgatacagattatggaatccaaaagacaatgaggggaaaaaactaaagaagaataatcagagctttagagaaatttaggacaccattaattaagtgtgtcagtgtatgtacaatgagagtaccagaagagaaagaaaagagca

SEQ ID NO: 271579 - DNA, 465 bp, Homo sapiens
aaaacaaactatattgtgattacagactgtaatggccttcctggaggaagaaaatcagatggaacttataaagaaagataggctaataaatcaatgctttcccaaattgtgtaccacagcatgtgaatttcacaagatcctctgagagaaaagggttccttggctaaaaacgtttgggaaacaccggcgggtgtggtggctcatgcctgtaatcccagcactttgggaggccgaggtgggcggatcacgaagtcaggagatcgagaccatcctggctaatacagtgaaaccccgtctctattaaaaatacaaaaaattagccgggcgtggtggcgggcgcctgtagtcccagctactcggaaggctgaggtaggagaatggcgtgaacctgggaggcagagcttgcagtgagccgagattgcaccacggcactccagcctgggcgacagagaaagactccgtctc

SEQ ID NO: 271580 - DNA, 351 bp, Homo sapiens
ttgtagtagaattctcattctatcttatttttcataatgaatgctttcttttctgtatgatactccctggaccagggctcatttaaaaatgataaattattttaaagtaatgatatttaatcatttttatttaatgaaggaatttggattctttaaatgctgctgtgaattttaattttgcccagattttagggataatgttaatgtaaatatttttgatttaggaaattccattattcttatatatgttcagttggttagtttggggctttattgaagttaagccatctttaaattacctgttctgtggggaaccagtgctgttgaataagcagcatgtctatacttcgt

SEQ ID NO: 271581 - DNA, 1233 bp, Homo sapiens
tttcagtacctaggataatgcttggcttgaattaggcgctttaagacatatatgatgaacacatatgattctatctttaatatctccttatttgtaggtacaagcctacttatttgagaaaccctagtggttgtttaaataaacagactgggagtcctgtgatttgtcttttctcatttttaaggataataaaactcatgaatgagtaagagtatattaattgccattgattcaaatagaaatgtatactcaatttccattatgttttcttttctatctcggggctacttaatacttttgtttttattcaatgatattacctttagagtgccatttttatttccattagtttaatgagtggcctttctatagccctgacattaaaatgttctgtaaatctccaaccacttgagacctcacttctttaagatgatttgcattacatagtaaatatggacatactggcataggtaaaaaagctcttatactggcctaacctgaattttctgagtttttctctctaatgggttgtcggtgactgggattgtgaatacttgtatgtaattaatctcttcgggggtgtcttgccttaagaaaagacagtatttgagatagattcactctgagttgattatccatttctactaaaaggatttataataggagtctcttatatagcaagctgttctataatggagcatttaaggcaatatttcacttttgcacacattttcagggtcactttgattgaagtgaggtgcattattttgtatagcaatattatgcttatgacatatatttgttctgcagccttaaatcataagaagcactttcaaaactttataccctgaagtttgattagaaaattctttgttgccttctagaatttgcttaatgacttcattaataactatgcaacaatatgcagggaacatgaaaaaaagtacatttttcttctgaaaattgcatataattattacaaaataacttttaatctttcatagtcatcttttctgttttagcctctaaaatagtgtttaaaaattgattccccttttcttcatggatttatattcttgcttttttttaaaagaatgaccttaacttacttatatgtaagatttgtcttataataaagttataatagaatttttacaaatgctcatttctttgtctatccctaagacattgtaactaataaatatactttcctcaagtcatgaacagattgca

SEQ ID NO: 271582 - DNA, 429 bp, Homo sapiens
  misc_feature (387)..(387): n is a, c, g, or t
  misc_feature (411)..(411): n is a, c, g, or t
atagcacaacagtagattgtcttggtcctggaatggagccttaattgatgctgtaggacaatttggactacttctccagtatctagcttccacctaggcctcttggaacacccgctctgggagaaccaagcttcatgcaagaagcccagccactctgagactgtcatgctgtgaagaagcaccagctagccacttggagagggtgcattaagaaagagaaaaccctaatgatcagtgaggatgagatttttttcatatatttgttggccacataactgtcttcttttgagaagtgtcatatccttcttttgagaggtgtcatattctttgcccactttttgatggggtggagttttttcttgcttggtaagtccctggagtctgganatagaccttttcgatggtagatgntttctccatctggggtgc

SEQ ID NO: 271583 - DNA, 444 bp, Homo sapiens
taccttttttccccctgataccaggctggctgcacatgcagagttctgccccatccaaacatgtctgaaacatcagttggcacacctcccaagagctctattgcatgagggaatgaggtgccttctgggagagaactcattctgagagactgcgaagcagcagccaccagcttgaaagggaacaactaagagaaactgtgctgcagagaaaacctatatatagatatacaacaagaaaataaactataagattaatacatgcatgtttaatactggaaaaaaatcacagccctccaaagtttctccatatttcaagtcgacagttatttttctctcaaaactttgaggatttaattctactgtttctggtattcattgttactgataactcgtttatatttggtaaaataaaaataagctgcttttcccttgctgcttgcaaaa

SEQ ID NO: 271584 - DNA, 1878 bp, Homo sapiens
  misc_feature (1090)..(1090): n is a, c, g, or t
gtccctagagacagcctggaaagattgggtgccagctgcagagaggagagcaaggcgaccaaacgcaggctgtggctgcctgcagcccatcctgcccccagcacctagagtcatctttagaaatgcaagcctgatcgtggaatccaccttcctaacacccttcagtgccctcctcttcgttacacccttactatacaaacgatagtccatggaccagcagcatcaacataaccagggagcttgttagaaatgtagaatctggtccatcccaaacctgacgaagcagaagctgcattttgccaagatcccagggaatttgtgtgcccgttatggtttgcgaagtgcttcccaagagaacatacggcaagccagagggatctttgcagatcttgctcctttcattctctggcctcatcttgtcgctctcctccatccgtgcccacatccccactgtactggaccgcttgcagctccttgaatgcagcatagtcttgttttcttttttgcagtgattctacatctttcccatcttctccacctggatgcctccatccatcctttcagacttcccttctctagcaaacctttcttgctaattcccatgtctaacacaacacttccccatactgcatggccattatcctttctgcatcagactgtgagcaccttgaaggcagtggcagtgactcattcattgtggcatctgcagattccagtggactgccaggcatgcaatagaaaatcaaaaaagatttactgctaaataatcctcaactccagtggcagctccatgtgccatttctcttccgctctggcctcggctcttcctgtgcctacctggggcttggctttcacctaggtgtctgcatggaagggagagcgacctggaggaccatcgccaatccatcaatagcctcccggttgagatgacttcagctctgatttggaagagctatgatattgtttataggagtgaattaatatgtgtaaaggttacaaagtaaacagttaaattaaattaattgtgctggagcaggtcaaacaggcttctgagagatgaacatacacatctctattaactccacattcngtgagtgtgggtaacttgaaattggctgggtcaccatttacatcatagaaattggcaaatagtacaaattagggctccctcacccctactcgggcatagagctggtacactagcacacctctggttatacatgcatgcgtgtgccaccagaacaaaacacctaacagcaggcacgttgcctctgttgcccaccattacagctcccgcacggagcagacagactcatggcaggaattgaatgcatgtttgtcgagtggaagcatgaacaaatccacaaaatgcccaagatgaggcaaagaaggacattggctcaaatgttaaacataagttaggagctgagataatgcccagaggaaaaatgttctgtaattctaagtaaaacccatctctaaggcaggatgctgcttatgagggctccacagacagatgggggaggcctgggtcctgcccttggaaagagtctgacagctcgacttctggaaacagccatctgcacaggtcaacatcttcttagctgacagggagcagatttgcagaccacatcacatttgaaattccagaagaaacttcttggagtctgctcttgtgcaaatgagcctagaaagcccgttaactttgggtggaggcttccactgtttggctatcccaagtgggcccaaagctaaggaaaacccaccagccctttgcttcctgcttcctctatttgtttgccccaggaaatcagaggtgatgacatgatttggcttgggcacgacaggaataaacgatatttaagagacgtcaaaaac

SEQ ID NO: 271585 - DNA, 420 bp, Homo sapiens
ctcattgaggagaagctggacatcagctcatgagtgctgcatgaaacacttgcagtgattttggtaaaaagaactcacatttttatgtaccctctcttccaaaaaagaaaaaaaaccctgaagtttaaaaagtctttattcggctggacatggtggctcacacctgtaatcccagcactttgggagggcgcggtgggtggatcacgaggtcaggagatcgagaccatcctggccaatgtggtgaaactctgtctctactaaaaatacaaaaattacctgggcgtggtggcgcaggcctgtaatcccagctactcaggaggttgaggcaggagaatcgcttgaaccagggagtcggaggttgcagtgagccgagatcgcgccacagcactccagcctagtgacagagcaagacaccgtctc

SEQ ID NO: 271586 - DNA, 253 bp, Homo sapiens
cccacctatctacaggtctcagctaagcctcaggctgcagtgccaattctcaacacttgtgtgttggcccagggagctcttcttcctgagtaattccttattcagaaaagcctggatgagcaaatgttcccctgaacctgtatcaccctgctatgtccaatgctgcagtaatgaaaaggtgtcatgaactagcaatcagaaaaaaatagcaaaaattataataaattcccacaattaattagcaacagctgct

SEQ ID NO: 271587 - DNA, 407 bp, Homo sapiens
agagccatgatccaaaagcaaaaggtccaccaatggatgagtgttaaaccgaatgtgttctatccatacagtggaatatgattccaacatcaaaagcaaagaagtgctgatccatgccacaatgtggatgaaccttgaaaacatggtgctgagggaaagaagccagacacaaaaggccagagtgtaggattccattgatacaaaacatctagaacaggcaaatccatagagacaggaagcagattggcggctgccacaggtgggagtgtttccatttgaggagatgaaaatgttctggaattatagtggtgatggttacacaaccttgtgaatggactgaatgccactaagttttacgccaactttaaaatggtaaattttacgttatgcaaattttaccacacaca

SEQ ID NO: 271588 - DNA, 452 bp, Homo sapiens
aagaaaaaataattttaagagaaaaaggtagtgttgtagtcacttttatatgtgaataagtctgtagaaagacttctaatggtgaaactgaggcttaaagtatgtacatttgaagtttttatggatattagtacatttctctttaaactattgcaacaatttagtttcattgttagtatatgatagtacctgttggtttttttttccctcatcctcactaatactgggtgttatcaaactttaaaatttttgcccatctcataagtgaacaccacaaataatttttctagaaataactcaaagagcctttcttggtttctgaccaaatgcctttattttcagtgtattttcttgagcatcttctcaaaacattttacctttagatttttctgattattttaattctatgaattttcacctctgaatcaacaatctccattatacagagatac

SEQ ID NO: 271589 - DNA, 509 bp, Homo sapiens
agagaaactcaaatgtgtttgccaaattaaagcactaaggaataagcacatttcctcttaatgatcactttcaaaataaatctactattcatttaggaatactaatagctttgacccttcacttgctcacgattatggttgcctaaggttaaaaataaggtaaggtaatgaatgtaaattcatctctgtctggctctttgttattggtgatagtgaaaagtttcatggcaaaagaagatacaaatcaatgaaaaaaatggagtggggagataccttctgtctgtgctgcgtgtgttccccatgatcataaatggagaagtggaggcaatattaacgaaatgtgcacttacaaagcctgtgctcagcaacttttgataatatttaagtccattagggcctacccatacagtcatagatccgaagaggtcgattaaactttgaagagcttgtttagctttgttgcctccaggaagtccgtaggaaaaagtatcagaaaagcataaaacaaa

SEQ ID NO: 271590 - DNA, 1610 bp, Homo sapiens
agcggaggaggcaggaacagcaggcctggccagcccaaaggactctctatccaggatgtaaatgagcacactgctggcccatgcgcctcggggctgtagagggcagcctcagaggcactgggcattcctggcaccatggatgacgctgctgtcctcaagcgacgaggctacctcctggggataaatttaggagagggctcctatgcaaaagtaaaatctgcttactctgagcgcctgaagttcaatgtggcgatcaagatcatcgaccgcaagaaggcccccgcagacttcttggagaaattccttccccgggaaattgagattctggccatgttaaaccactgctccatcattaagacctacgagatctttgagacatcacatggcaaggtctacatcgtcatggagctcgcggtccagggcgacctcctcgagttaatcaaaacccggggagccctgcatgaggacgaagctcgcaagaagttccaccagctttccttggccatcaagtactgccacgacctggacgtcgtccaccgggacctcaagtgtgacaaccttctccttgacaaggacttcaacatcaagctgtccgacttcagcttctccaagcgctgcctgcgggatgacagtggtcgaatggcattaagcaagaccttctgtgggtcaccagcgtatgcggccccagaggtgctgcagggcattccctaccagcccaaggtgtacgacatctggagcctaggcgtgatcctctacatcatggtctgcggctccatgccctacgacgactccaacatcaagaagatgctgcgtatccagaaggagcaccgcgtcaacttcccacgctccaagcacctgacaggcgagtgcaaggacctcatctaccacatgctgcagcccgacgtcaaccggcggctccacatcgacgagatcctcagccactgctggatgcagcccaaggcacggggatctccctctgtggccatcaacaaggagggggagagttcccggggaactgaacccttgtggacccccgaacctggctctgacaagaagtctgccaccaagctggagcctgagggagaggcacagccccaggcacagcctgagacaaaacccgaggggacagcaatgcaaatgtccaggcagtcggagatcctgggtttccccagcaagccgtcgactatggagacagaggaagggcccccccaacagcctccagagacgcgggcccagtgagcttcttgcggcccagggaatgagatggagctcacggcttaaagcccaagctctgaagaagtcaagggtggagccagagaaggaaggcagtcccagatgagcctctattttcatcagcttcttctctctccccttgaacttggtaacccacatggttctcccgtggcccctaggtggatgaggccaaagtcaaatccaaggctgagacagtcgtgcgactcctactcccccagagcgtgacccggagcaggtgctggacacagagcctgtctcagcagagggtccccactggccgcaacggctcagtgacagcaagagcaggaagagcagcaggaaggcaccgctgtccaccttgggcaccatttatcctc

SEQ ID NO: 271591 - DNA, 447 bp, Homo sapiens
caggggaccaggctgggttgggggttgggtggggctggacggggacgaggcgcggagaggcggcgggaaagagcttcggctgggccacgggctcgcgggcactctcggcggcagcctcgggggctccgactccagctctgggcaagatccataaacttttaaagaagcctcaaaacatacttttaaagcattaagctttaaagtgctagaaatcttgtgccccatatgtgcttctttcagtattatcctagatcctcaggagtagcatggcaactggagaaaatgggaggaaagacaagaagaaatagaagctgatttaacatcaagtttattcagttttgatttttcttatctctactggctttctcctgttcaaaccttgcagcgataatatttggaaaagagcacttggaaattatattcctgtttttaactctttatatttaa

SEQ ID NO: 271592 - DNA, 485 bp, Homo sapiens
agcggaggaggcaggaacagcaggcctggccagcccaaaggactctctatccaggatgtaaatgagcacactgctggcccatgcgcctcggggctgtagagggcagcctcagaggcactgggcattcctggcaccatggatgacgctgctgtcctcgggggctccgactccagctctgggcaagatccataaacttttaaagaagcctcaaaacatacttttaaagcattaagctttaaagtgctagaaatcttgtgccccatatgtgcttctttcagtattatcctagatcctcaggagtagcatggcaactggagaaaatgggaggaaagacaagaagaaatagaagctgatttaacatcaagtttattcagttttgatttttcttatctctactggctttctcctgttcaaaccttgcagcgataatatttggaaaagagcacttggaaattatattcctgtttttaactctttatatttaa

SEQ ID NO: 271593 - DNA, 441 bp, Homo sapiens
attagataattgagatatttaataaatgaaaataatctttttgcctataaattttctaaatgcctataggatttttttctgaagctattcttcatactgaattagtcccttgtaaatattaaggttatcagcgacagttataaaaagttattaagctgggcatgttggctcacacctgtaatcacagcactttgggaggctgaggtgggagaattgcttgagcacaggaattcgattgtagcctgggcaagatggcaagacccctgtctttacaaaacattaaaaaatcagcatggcatcatggtgtgtgtctttagtcccagctacttcagaggctgaggccacagtatcccttgagtccagtaattcgaagtggcagtgagctatgatcctgccactgcacttcagcctaggtgacaaaatgagaccctgtctctaaaa

SEQ ID NO: 271594 - DNA, 209 bp, Homo sapiens
ctggaggccctgtgtggggatgctggggtagggatcccaggaaatgagttgaggggtaggtgaggtggggagggttgtaatggctagagcaggggtgttcaatcttttggcttccctgagccacattggaagaagaataattgtcttgggccacacataaaatacagtaacactaatgacagctgatgagcaaataagcaaattgcaaa

SEQ ID NO: 271595 - DNA, 946 bp, Homo sapiens
aagtgactttccaaaggtcagacccataacaacaggccagagctctactacattttgtctttattagaaggttttggctattttttttttctatcagcaatttgtacctcaaaagacctcataccatacctgtaatatttaagaagataaattttttgccgcactcttagtttttttgcccgactccagttgcaggtagctactctggaaagtctatataaaatactccttttcttcttagccaaatacttctccttttggatcacaaatgcattgataattttcgtcttagtccccttaatggtagtaggtgtgcctctctcccatgaacggatatcgctttatcagtgttaaagtctaaatgttaacagaaaaaatgaggaagattttattgccactactgtgaggtttgggttacctacctaacaagtgtagctgaacttccttagtatcatagtaagtgtgagaggaaaattatttctgattttaatttggaaagttgtgtgactttttgaggtctggtttttcaccccggacttaaatggactttcactgtgtcaagcacaagactgaccccagagacacacataggtgcacctcgtagaagcttttaatagtccttatatttacttaagaataggactaactatggaactatgcaagatgagctgcgaaatgacaggtgacctgccagccggcccgagtctgattttttttttttctccctcaatgggaggtgtccattctcccttcggttgtgagaatcagttggttcatttatgggaaggttgcagggggcatctttgaatcacagccttcagatgccagaagggcagagagaatcccacatgggctggtggatcatgtgtgtgcatttctctcccttctaacctgaggaactaagcatgaaagaatgtgagcatcagagagagctgcagtcagcgct

SEQ ID NO: 271596 - DNA, 372 bp, Homo sapiens
ctcagagtctcttccctgtggaaggccctgtgtgacctggtaacggttgggctccctgcaggcagcccctgccctccgtctgcagctgcgcccgtgtgccctcctctctggcccacctggcaccgccgcttcaaactctcccctgctttatcccaggacctgctacccccacagggcacacagctatctcctatgagataggtttgtttgttaagtcaggtttataacgattaatgtatagatggtgagattcgccctctttggggtataatttagtgagttttgacaaaggcaaccactgcaaaccagtgtagaatattctgatcaccccagagttgcaccaggccccgtgttggggttgccagatttagc

SEQ ID NO: 271597 - DNA, 463 bp, Homo sapiens
tcttactgattttgccataaccacacttatggattagttcatttactgacttcagaattgggtacccccatgcagtgtatggctctacaatcctcagcatgttaactgaagccttgttgagcttcacaaaggttctgttgaagatttgacgaagggaagaagctgcaacacctttcagacctttgggctcacaccattgatacctctgatcctgatgacaaacgccaatttgggttctgcaggtacatagaagttgccagcttttcttgccatcctcgccatttgaatttcagttctgtacatctgcctatattccttgtgatagtgcttcgctttttcatagataagcttcttccttgcctttcaaagcatcttttggacaaacttctttctcaggtgcttgatcttcagctctgcgaaattccttcgctttttcttaagcatttctggcacagcaggaacc

SEQ ID NO: 271598 - DNA, 1244 bp, Homo sapiens
tgtttaaaattggtcagtgactaatattaagcctctaagaacaaaattcattaggtttatttagcctgtttttgcattactgctacaaaatccaatagtttaaatagctaactgaatacttttgatgttaaagagcaaaatttcatgaagattttagatcaagagagctaccactgagaaaaaacaatgcagatttgtggtaaagtcccatgaatttgttgaactgccaaggcttctgatcatcactgctgaagaacttctaatggtgacttccatctcagctttctcattgccaactattaagaatgtatggattatccagatgttgcaacacagttgtgtttttggcttcaccactccctctgggctgtgattctgtttttttttcttttattgttgatgttctttgtttttaatatgagaaagatttgtgtattatacttcagttttagtttccttaatcacagactagacaaaagaaaattggcttggtttcctattaggaaaccacttagaagccattatcagaatcgtagaccatcactgtgaactatatccaggtgttgtcatgaaagtatgacatcctagagtggaaagcaacctgggtttccgagactgttttactcttttatctggaatgttgttttagctgctatggctccaacagggtgaacatagcattttatttaatctaaatatctttctgctttttttttctaagttgcaaaaagtcaatgaccacatttcatctctagcctctcgtgaggtttaaattacacaaggaagaaatatttacaatgtcaaatgctgaagattgtttggagtcagaagtgattgttcagaatctgtcttaatgacaagtcagaaattagacaaagagatgaaatgctaagcccccaatgtgttctgaaaagttaaataaccatcttacatcagttggtacgtttttgtaagagtccaggatgtaaaagtgataaataaattaatgaaaagcacttttaaaaatcaacaaaagacatggcaggaaatggaagaaaagagaagcaagggatgcattctaatagatattaagaacaagccaaagtgcagtatttgctctagggttttactgttcattgtgtcaagactcacagattttagatattttttttaattgggaaagtaaatgaggcaggtagataagtagaaaaagttgtgtgaaactcatcagtactgaaaataaatagttgtacttctcaaaaaaa

SEQ ID NO: 271599 - DNA, 403 bp, Homo sapiens
agtgttggatgtttaatttttaacatctcagagtatagtttggaaagctctttaaagtagtttgttaaatgtatgaaatatttcaaacatataaacaaatagccccattatcttccacccatatttaacaggcaattttaatatatttccacatttgcttcattttttttttaattaagtacagccttaagcaaccactggccacttcccattatcaccgtcattggtaacctgctgtccaggagttgatagagtttatcaatcccgtgaatatatgtgaacagatacctaatgcatgtgtataggtatatgttatttttattctttttacaaacagtagaaaaattagatccttgtatgtgtctgtttcttaaggacacatgagaagagtttctcaattcac

SEQ ID NO: 271600 - DNA, 542 bp, Homo sapiens
cctccagaccctattctcctgcctcagtggtagtgtagatcaggcgaggaagtagaaattctaatagacagtggtgggacagggaagtgtccatatggaaaaaaatggacctttatatcatacgtaaataaatttcaagtagattaaaggtctaaacataaaaggcaaaattaagcaatgcatatagaagtgtaaaactataaacatttgcaaggaagtgattgtcacacgtttggagagtggttacttccgggaagaggaagaggtttgttgcaggtaggggatggagtggggaaagggactctgtccatattctaactcttggactgggttgtagctatctgggtactttttaatttgctttaaattattttttaaattgtatataaatatggtggccttttgtgtattctatacagtccacactaaaaatggttaagaaaaaaagcatgacgtatttaaagataaccaccaccgtaagtcaaatcactgagtaacttaaagctcacaagtaatatttaagagtacccagaaacttgttc

SEQ ID NO: 271601 - DNA, 415 bp, Homo sapiens
tccttccatcaaatattacttctcaagtagacccgtctgcttgtgacatggtagttcctggaagaactgcaaatgttctcccagtccaggttattttgaaacccagtgttaattatctatgggaaaaaaaatatccttttaagtgtggtggcccatgcttttaatctctgcactttcggaggccaaggtgggcatatcactggaagctaggagtttgagaccagcctggccaacaaggcaaaaccccatctctactaaaaacacaaaaattagctaggtatggtggtgtacatctgtaatcccaactactcagaaggctgtggcaggagaattgcttgaacccggaaggcagaggtagcagtgagccttgcgccgccgcactccagcctggataacagagcaagactctgactca

SEQ ID NO: 271602 - DNA, 365 bp, Homo sapiens
aagcataaatatacaggtacttcagaaagaataacttaatggagaaaaaatgggaggaactttgagattatataagaaatgctggctgggcgtggtgactcatgcctgtaatcccagcactttgggaggccgaggcaggaggatcatgaggcaaagagatcgagaccatcctggccaacatggtgaaaccccatctctactaaaaatacaaaaaaatttagctaggtgtggtggcacgcgcccatagtcccagctactcgggaggctgaggcaggagaatcgcttgaacctgggaggcagaggttgcaatgagctgagattgtgccactgcactccatcctggcgactgagcgagactccatctc

SEQ ID NO: 271603 - DNA, 750 bp, Homo sapiens
tagaggccaaggcgggcggatcacgagatcaggagatagagaccatcctggctaacacggtgaaaccccgtctctactaaaaatacaaaaaaaaaaaaattagctgggcatggctggcgggcgcctgtagtcccagctactcaggaggctgaggcaggagaatggcgtgaacccgggaggcggagcttgcagtgagccgagaacacgccactgcactccagcatgggcgacagagcgagactccgcctcaataaataaataaataaataaataaataaataaataaataaataaaatgtctgaggtctagactttggaaaagatctttttccttccgataccagaaccaaggacttttatttaaaagagaagcagcaggaattcctctttgtaaatgttaaatgaagggagtttgcttgtccaaactccaaactaaatgtgtcaataggaggtaaagtgaaacacttatcgacaagttgctcagggctccaaccctcagccctcactattgccctgccccagcccaacctctgccaggtttaagctgaagcctgcagaggtcagaagacaagcaggttcttcctcttgtcacagcttcctcccctaccagcattactccaggctaacaagccttgggagtatatcgttccttgtggctaaggggttactgacatcctctggacctttctccagtagctccccatcatgaaagctttgttgaaaaaccttccttatccccaccccccacaa

SEQ ID NO: 271604 - DNA, 347 bp, Homo sapiens
attttcagctgtataggacagttgtgtaggacagtgttctatataggacaatatctgaagatacattcctccatccattcttgtctagactgtaagttccatgggttgttacaacccagccctcagcacattgctagatacagcaacaaacattttcatgaattaatgacaagtgtctacaattccaactctttatcctgttgccctttcctaactccattgtctttataaatatcattctgtttacatattcacagattctaaacctatagtcatatattaaaaactgggatttttaatatatgactataggtttagaagtcgacgcggccgcgaatttagtagta

SEQ ID NO: 271605 - DNA, 224 bp, Homo sapiens
tagcagagagtggcattgtttagtattttttgcaaatctcttaatagtacgatctggattctcattttctgtttctacattcaaccggtttgtgatatgctgttttagttgaaatatatgaagaaaaactcagcctcctacattcaatatttgaagagagttaaggtatgtaacagctttttcagatattatcaatactgtatttttctttaatgtcaaacccc

SEQ ID NO: 271606 - DNA, 425 bp, Homo sapiens
ggcaacctgcagaatcttctttcccacctcccctttcatgattgccagtctctaccttcaaaaaaaaaccatacttcttgcccatcccaaaagttagtatggagcatggccacagggtgtgaaaacctccagagatataaataggacaatccaacatattggtgttggtgctgagaaaattagtgatactctgataatggggtagcatatctttttgccagtcaagtggtttctaatttattgctttcagtaacattgaaggaggacataattgccagctaatcattaaaaataactttgatcatagaatacttttttatatgtaacttggaaagggttcaaagaaatgggtggcattgctataaaaaaattccattctcgtctatttaaatttgtgaatgaggttcctcaatgcttatatctat

SEQ ID NO: 271607 - DNA, 245 bp, Homo sapiens
gtgagctgccacctggccccatatccacctaatttaaaaaaatttttttgcagagatgtgatcttgatatattgcccagcctggtctcaagctcctggcctcaagtgattctcctgtgtaggtttcccaaagcatgtggctaacattttttaatcctatacaatgttagcactggcctcatctagtcctaagaagtttgctcctaatcatgtattcattagaattgaggaggagaatatttccca

SEQ ID NO: 271608 - DNA, 710 bp, Homo sapiens
gtcagtggatgggtgcctataatttctaagggaaatagaatataatccaagaattttatagccagctaaattattgcccaatcaaaataggcaaaagacatgatcacatgttgaagaacttaaagaacacagtatttctgagctcttttaaaaaaagtcttcataataaaatttagtcagccaagaaattaaaaaataagcaactcgtgaattgaatgaccatgacaaaaggctaattatgagaggtgaatccatttaaaaataggactattattgcagaacagaaagagaaggtggtcaaccttaacaacataaaacaacctagaaataactagtttccagaggtaaagggagggactgtaggaagtagaagtgctgatgccctttattaagtcaattaatcaggtctaaaattgaaatgtggttttaaatatataacttcttgtttattttcctccctaactacctgaggatcaaccaccatgatgaacgacacagtaactatctggaccaggaagttcatgaccaatcgaccactccaggggaaacacatggtcaccaatgtccttcaccccggaaaggcaacaaaatgtacaagaccacaataggtgtcatcttcatattaatcgttggactcagaacccatgttggtggtggttaaacaatgagctttggcatgctatctgtttctttgaattatgcaaagaaaa

SEQ ID NO: 271609 - DNA, 681 bp, Homo sapiens
ctgtgggcacaggctgtgtgtgctttttttcttcacatctgtggtgtcaacatgtttgaaagagaaatagctctgtggcttcaagtgtttctcaaaatgtatcacagggtacctctagccggctatcacagtaagacagtttgtgtctataatggtgcatacctcaaacctactcattgaaaatcttggatggtttcccttccacattagtacagcacaagttgggtcctcatggacaaagggggctctcagtttagtagctattcctttttggcagattacactgcagtgtggctgagggttcagttgcagtaaatggcaaagggtagggagcagcatgacatgtagttcttggaaataatcccctccaaagctgtatcaaagacatgcagtttcagagtaaataggctgcccttatggctttgggtgaaatgtgagaatgcagcaaagaccttgagaatgctcagaaggagtggaaaccttttttatccgcttttacaaaagtcactgcctgaggggaattcaccaactctagaaacaaatcgcagctgttcattgctgaatgagactgtagtcctttgaaattaactataggcctctgtatttctagacactaatgttctcctctgtctgcagccttgacgttgtggcctaatgttcttgatcatattatatgtttta

SEQ ID NO: 271610 - DNA, 363 bp, Homo sapiens
ttgcctgggatgaggaataatttataatggtaactgttgctggttaaaatttggctcctacccacattcatgcaaactcagtgttctagattaaaagagatttaagagacttgccaggcaaatgcatggcatccttagatgtatcctgatttgaataaaacagctataaataataatatttttgggattattgaaaaatttgactatagattagttttcaggtgatattggagaattaatgttattattgttaggtatgttagcacggtcatgcagcaatgtgtctttctttttaagagatgcatacaaaaatatttgggtgtgaaatgttcttgtgctataatttgctttaaaattcttcag

SEQ ID NO: 271611 - DNA, 447 bp, Homo sapiens
gcaactttattaaaatacacaaaagtagaccacactatttttaaaatggaaagaagctactacctagtaaaaataaataaatagtggtttgtctgtaatcaaatacttaatagcataacaacagggataaaattcaaaacctgttacattaaggggaaaaaaattgtgtataaatttgaaaacaataccatgtagtattaatgcataagttgtaaaattataaagctacgcatggtaatttaaccacctttttaattgttggtgggggtagggaaaattctgtttttagtctgtaacatatttcttttaagcaaaaaacaaacatggcaaaatatgacattcactaaacctaagtaataggttcataagtttgttataatggtgtctttacttttctgtatgtttgaaatagtttaagtaaaaacagaccaacttaaaaaaaaaagc

SEQ ID NO: 271612 - DNA, 296 bp, Homo sapiens
tgtggagcattttggattggccctttaacacctggtatgggcttgtttttatcctctctaccaaacttttgttcaccacaaaagcaatgaccagaattccagcagctatttttttttcttaccttgaaaattacatccattagatggaaatgccagggcagaaagtaagaagatggtggatctcttatgttttgagaaatgatgccctacaagacttggaatgctactggtggacttctcttacttgaacaagaaagaaacattgaataaacagtggtcttgtttaatccactgta

SEQ ID NO: 271613 - DNA, 336 bp, Homo sapiens
actctcctgcaatacagcaatggcttgtgttttggcataaaattccatcaggcagaggaggtatcaaatcattcaacctgccactagctccagagcagtgtcaaattcactaatgtacagagcagtgtcacctcgacagagaatgcctgccaacagagccagcatgaatgatcccggctaggagctgagaactccatgctaagtgccagacagaatgtggaaagagaagatgccagtacttcccatgaagcttagagtccacgtaaagacaatgcatgtgcaaggagaattccacagtagtgttatcattaagtaaaaataaaagtcaaaggcagg

SEQ ID NO: 271614 - DNA, 157 bp, Homo sapiens
ctggtcttgaactcctgacctcaagtgatccgcctgcctcggcctcccaaagtgctgggattacaggcgtgagccaccgcgcccggctgaagagcagaatttctttccttctttagtttcctcatccgtaaaatggaaaaagggctcctgtccttga

SEQ ID NO: 271615 - DNA, 625 bp, Homo sapiens
  misc_feature (48)..(48): n is a, c, g, or t
cgcgctgactctggctcaggactctggagatctcagagtggacaagcnagcacacacgctatttttattgagggggtcttgctatgttgccagggctggtcttgaactcttgggctcaagccatcttcctcctgccttggcctcccaaggtgcctggccagctacagtgatccttaaaactatatcgagaagatgctactcttgcttaaaatgctccaattgctgtgtactgcacttagataaaatataaactatgtggcccataaagccttacaccttctggtgcctgcctctctcttcagccttccctccttcctcttccccgacagctccaactgcagtggctcttgaaagatggctaagctcattcctctcaaggtcaatgcacctgtatacagtgcatttctctagcattctgtccttcttaaagacacatggtctttgtttttatttctacactgtcttttctatgctgtaatctaacaggcagggacatttcttaggtatcatccacagaggcctgcccttagtaggtactgtcaacgtaaattaagattgcatcagtataaactttagaactaagaataaaagccaaatttgtcatttactcctacaggtatgaatt

SEQ ID NO: 271616 - DNA, 778 bp, Homo sapiens
gggaagaggaatgtcagagagtgggcaaaatacaacaggaaaggtccaaattcaccctctgagggcccggggcacgggggcagcctgctctcctcctggggccctgttccctgtggggactggaagagaggctttgagtctagggcctggggcagccaggactgacgggggtgcagtcctagaagggtcggcagtcacggtggcccaccatggcatctccgtatccttgctgcatgctgcacccactccagctgccagagcacggaggcagagacgtgggagccgatgaaggtcgcacgccagcctcccacctgtgagacaaagggccctgtcactggaagccacgtccagcctggccccgcaggagccagggctctgcgcctaacggaggactgatgggaaagggaaggctggcagcagtgaggttttttgaccttggcaatgttcccgtcagactgcagaagaattgactattcccgttcaggtagatgatgaccggccccataaacagccaccaagggtcaccctctccctccccagccctgaaggccaagaaatgggactgggctccttggatttatgaccttctggctcctgcagagagaggaggactggggcttgacaaggacacggggctaaggactgtccttggatctcagtaggacagctgaccttccctccacccaatgactgctccagtctgatcgttcctggccacctgataatctctttgtgcaaacaccaggaagccctggttagaggtgtggacaccaggtgt

SEQ ID NO: 271617 - DNA, 727 bp, Homo sapiens
gggaagaggaatgtcagagagtgggcaaaatacaacaggaaaggtccaaattcaccctctgagggcccggggcacgggggcagcctgctctcctcctggggccctgttccctgtggggactggaagagaggctttgagtctagggcctggggcagccaggactgacgggggtgcagtcctagaagggtcggcagtcacggtggcccaccatggcatctccgtatccttgctgcatgctgcacccactccagctgccagagcacggaggcagagacgtgggagccgatgaaggtcgcacgccagcctcccacctgtgagacaaagggccctgtcactggaagccacgtccagcctggccccgcaggagccagggctctgcgcctaacggaggactgatgggaaagggaaggctggcagcagtgaggggccaatcatctgaatcacgttcctgtattcaggatttgcccctccaaaacagttttgatgggagacaccagccacctactattatgcagccatgcaccacataacgacgtttcaggcaacaatgactgcacataccacagtggtcccgtaaaattacaatggagctgaaaaattcctattgcctagtgacgtcacagccattgtaaggtcagagtgcaacacatcactcatgtgtttgtgttgatgctgctgtaaacaaacctaccgcactgccagtcatataaaagtatagcccatacaa

SEQ ID NO: 271618 - DNA, 436 bp, Homo sapiens
tatgctaagtgaagcaagccagacacagaaagacaaacaccacataatctcacttatatgtgagatctaaaagagttgaactcagaattagagtagaatggttaccagggactgtggcttggagggagtgggaaatggggagaagttgaccaaagggtacaaagttccagttagacaagaggaataagtttttaagacctattttgcagcatgctcaccatagttgataataatgtatgtgcatttcaaaactgctaaaagcataagattttagtctacacattgggtacagtgtacactgttcgggtaatgggggcaccaaaatctcagaaatcaccactaatgaacttatccacgtaaccaaacatcacctgttccccaaaaaagtattcaaaaaaataatagattttaaatgttcctgctatgaaaaaaacaa

SEQ ID NO: 271619 - DNA, 630 bp, Homo sapiens
ccactgcactccagcctggtgacagaacaaggctctgtcttaaaataaaaaaataagtgtaaagatcagaaataaaaattaaccaatttcgcatgtataattttaaaaaatgcatcagaacttttaggcactttgtctgggatgaggagtgttttattcttcgagtctgttatttcactgcagcaggcagaatgctgcctctccaaacaggctggggatacgcagagtcccgcacaacccaaattctcttgtatgctgattattaacgaaagggaagcaaagaggggcagacacagaaatagagggccatatatgctacttaaaaaaaataaataaactcttggcccggcattttacaggtggttcacacctgtaatcccagcacttcaggagccaaggtgggtgaatcacatgaggcaaggagttcaagaccagcctggtcaacatagtgaaacccccatctctactaaaaataaaaaaattagctggtcatggtggtgcgcacctgtaatcccagctacttaaggctgaggcacgagaattgcttgaacctgagagttggaggttgcagtaagccaagatcccaccacagcactccagcctaggtgacagtgatactctatcttaaca

SEQ ID NO: 271620 - DNA, 275 bp, Homo sapiens
cacccatttccatggctcccaggaccccctctacgagagcagccccatatcccttcagcccactctgttcacagctaacccagtctttcaaaaatggaggtgcctgtcctaaatcctcatctcctcctgcacggtcccctgtgcccctgatgggtgaccctgagccctccttcccttcatcccaatccacatgaggtctggtcacttctgacgcccatgtccacacccactgccacgatcccaacatttgccaccacctactccccagctcctgc

SEQ ID NO: 271621 - DNA, 899 bp, Homo sapiens
tggaaaccttgttttttctcttttttattgtggtaaaatatatataacaaattttctactttaatcattttaagtatataattcagtggcaataattacattcataatgttgtgcaaccatcaccactatttccaaatgtatttgtcaccccaaacaaaagctctgtagccattaagtaatagctaccttcatcttctggtaacctctaatctattttctgtctgtatgaattttactactctagaaatttcatgtaagtggaatcatacaatgtttatccttttgtgtctgtcttactttacttagcataatgttttcaaggctcatccaagttgctgcatgtatcagaacttcattccttgctatagctgaataatattgttttgtatggatataccacattttgtttattaattaatctgttgggcagttgggtcatttccacccttttttggtttaatgtgagtaatgctgctatgaacactggcatggaagtttctgttagaggccctgttttcagtttttttggggtgtacacctaagagtggaatttttaggtcccgtggtaattctgtttggaattctgtttttgaggaaccaccaaacttcttggaagcccttgtggattagagcacgatttgtggtattttctgaacaatgccaatgtgcaggcatagttcagtcaacaagaagagcaaagggagctcacgcttagcatagcagcacctgtgtgccgagcacctgagcagctctgtggtgaggcagaggtctgaagttcattgtttaactctagctttattttctgtgatacttaccaatggtttattgaaacaagttatgtttcactgatatgtttgtgacaaaaagattacaaatcaggctatttaagaaagaagag

SEQ ID NO: 271622 - DNA, 945 bp, Homo sapiens
tcatgagcatctgtagctcttgcctgagcctctgagcctgccagggcagagcagaagcaaatgcatgaaggcccctcccccaggggctgctcttagccagtgactgatgaaaatgggtgtgtaaacagcttagccacatgaccccacacaggtgggacaaccatgggtttccacattctgtactgcctcccagaggtccccaccaggtttaagctcaattgcccacactggtaactggtaacttccttgatagcactcatttcttttttcattcttttggtgtttttttagatggagttttgctcttgtcgcccaagcactgcactgcagcctgggtaacagagcaagactctgtctaaataaataaataaataaagaaataaaatcatgcagacctcatccccaggaggcagtctgaaatggctcaggaaaaaaaaaacagcaggtgaaatttgtgcagggggatctcacctgaacaaggatcagaaagacaaggggttgtccccaaacctacccaccctcctagtggcagctggaccctggaccccctcaccaccaccagcctaccccatgctatccatcaccggccagctcatgtcctaaacatctctgcatccctcctctctctccatccacgctgctgcctcactggtcctggccaccacggctctctcagctaggctgcagtcacttccaggctggattccccacccctgcccttgacctcctcctgtcctctactccacaaggcagccagaagaatctgccaatgtatccagtcttctcttgggctagagccttctggtggcttccaatctgcacccatccaagccctttgtgtcaggcaccatctcatcttcataaatcctgtttctattgcctggaggactcccccagccctaacttcccctgttcctaaatgacatttcaccacccttcagatct

SEQ ID NO: 271623 - DNA, 968 bp, Homo sapiens
tcatgagcatctgtagctcttgcctgagcctctgagcctgccagggcagagcagaagcaaatgcatgaaggcccctcccccaggggctgctcttagccagtgactgatgaaaatgggtgtgtaaacagcttagccacatgaccccacacaggtgggacaaccatgggtttccacattctgtactgcctcccagaggtccccaccaggtttaagctcaattgcccacactggtaactggtaacttccttgatagcactcatttcttttttcattcttttggtgtttttttagatggagttttgctcttgtcgcccaaggttgcagtgagccgagatcacaccactgcactgcagcctgggtaacagagcaagactctgtctaaataaataaataaataaagaaataaaatcatgcagacctcatccccaggaggcagtctgaaatggctcaggaaaaaaaaaacagcaggtgaaatttgtgcagggggatctcacctgaacaaggatcagaaagacaaggggttgtccccaaacctacccaccctcctagtggcagctggaccctggaccccctcaccaccaccagcctaccccatgctatccatcaccggccagctcatgtcctaaacatctctgcatccctcctctctctccatccacgctgctgcctcactggtcctggccaccacggctctctcagctaggctgcagtcacttccaggctggattccccacccctgcccttgacctcctcctgtcctctactccacaaggcagccagaagaatctgccaatgtatccagtcttctcttgggctagagccttctggtggcttccaatctgcacccatccaagccctttgtgtcaggcaccatctcatcttcataaatcctgtttctattgcctggaggactcccccagccctaacttcccctgttcctaaatgacatttcaccacccttcagatct

SEQ ID NO: 271624 - DNA, 507 bp, Homo sapiens
tctttaaagtatcagaccccatttagttgaaatgagttttgtctgaagtttccaagtatgacctatgctttttcttagctaatttttagcaggagatgatgagggctaaaaattgagacattagggcatttagttacatctctcaatttgtgactggtttataaaaaatactaagatgtgtctgctaactcacacctgatttatctactccttttatgtatatataattttttttgagttgtgtaccaaaagttggaacatttcaagtattttttctttctgtcactgagtgatttcatgtagaacatttactgttttgtgtattttgaataaatggcaaaaatcttattaaacattagctgttaataattagaaaaatacagtaagtcttcaaatatttataattgatatttgtctttgtttttatatgtatttatattgatgttatatgctcatctttttctttgattaaagataatcgcttgcttgaatctattacctgaaaaa

SEQ ID NO: 271625 - DNA, 371 bp, Homo sapiens
ccaaaccttcgtggttctttcgatccacgcgtgagccaccgaccctccgggcttgtagctttgtgtcgggctgtgagctgcggcaaagaccccatagttaaccgggaagtcctgatttccttaactacgcagctgaaatttcccctaacagaaatttcgtgctggcccctcacttttcttttagtgttgtattgagattttgggtgtatttgagacgtggaacgtcttttgctgaatcccagtaggtccttagatccctttaaccagacactagaagaatcatttttaccccagaactcgactaaaatgtttaagtttttgtttactccaggtttattaaaagtgaccgaaacttttaacaacaaatggaa

SEQ ID NO: 271626 - DNA, 551 bp, Homo sapiens
tctgactttaaagactacataattaactactatgtctgaagggtttaagctgtggcttacaaataaaaatattaaactaccaagttatgattagtaagacaaaccatttctaaaatcccttctaaatatatctggctatttttcaaaagtcaaatccacacgacaaagagtgaggaggctgggcacagtgactcacacctgtaatcccaaaactttcggaagtagatagaggtgagatgactgcttgagcccagttgtttgagaccagcctgcggaatatagggagaccctgtctccacaaaaaaataaaaaaattagttgggtgtggtggcatatgcctgtggtcccagctacaaaggaggctgaggtgggaggattacttgagcctgggagggtgaggatgcagtgacccatgattttgtcaatgcgccccagcctgggtgacaaagcaaaagcctatcttttctctccctcccccaacaaaacccaaagagtgaagaaaatgtgatgctttacaccttaaaagaaattaccaaaaaaaaaaaaaagag

SEQ ID NO: 271627 - DNA, 265 bp, Homo sapiens
ttaagaggcagacactgggtaccgctggctttatatcaagggcctccccttctctttcaccccagacacaggaagctccagtgcagagaggaagtgctaagtcagcacattctaatctcctccccacctactgaacagaaaatcagagctggggctgggcacagtggctcatgcctgtaatcccaggccaaggcaggagaattgcttgaggccagaagttcgagaccagcctggcctaacatagcgagacccccatctctattta

SEQ ID NO: 271628 - DNA, 512 bp, Homo sapiens
tgcataggaatctcttgtgtggctgtaccatggttttgcttttactgttaaccaatttcctattaatggacatttaggtgttgaccagttttttgccactataaacaactcttctactttgacatatattgtgaagttgaccaaacatctctttagaatcaattccctgggctaggatttacaagtcagagagtattccatggccctgcatcagggaacttgggtttatccttcatgttctcaccaactcttgtattagctttttttcatcttttccaatctaattggcaacaagtaatatctcattctacatatattttctttgtttactagtgagattcaggagtctttcacatggatagtaaccataattttttttcctcttatgaatggcctttatactattaaagcaaaatgttttatactattagatagccttactaaaggaacgtgcttattttgtggtttacaaaaccccaaaaaaccccaaagcaaaacaacaacataccaaa

SEQ ID NO: 271629 - DNA, 445 bp, Homo sapiens
tcactgacacataaactttaacaatatattatttttatttaatataagacaataatgatgtacatattgatctgccactagtgtttgtcccttcataaaatggatatgggatctttccacaacagcacatatatacatctatctctcttttgataccactttctataattctgaagtacgcatgcaccataattaattaaactctttcttcctagtaaacacattatttaccatttggtgtatgataaaccgaataaaatcaatatctttgaatatgaattattgagcaaacatgaatgttttcttataagaaatgtattaacatggacattgggttaaaatgaaaaggttgtaaatagtttaacattttataaatattttttaatttcattacaaaaaatgctgtaccaattcacattctaataaaaatcacagattatttaaa

SEQ ID NO: 271630 - DNA, 452 bp, Homo sapiens
tgatgatctgcccacctcggcctcccaaagtgctgggattacaggcgtgagccaccgcgcccgtcccacaagcaatatttttttaaaagtgcttggcaacctcttcacagattactttccactggcaccatcttcaagtaagggactataagtaaggaaaaatagatgagggcaaataacctaaggatataaacttcattctttttgcatcagggtgttgttgaaggctcctgagcaaagagataataaccacagttgggctttaggaggaacatctgccgtggggcagagaatagggaggaagggactgaaagcagaggccaatcaggctgtgactgcagtggtcagggcagctggtggctcatgaaggctgaagcaggtgaatgctgtggggagagagaaagggactgtgtcacaaaggcctagtgctggctctttgtggagatgaagga

SEQ ID NO: 271631 - DNA, 501 bp, Homo sapiens
acactcgatgaactataaatagaaggaaactacctcaacatagtaaagaccatctatgaaactcccatagtttacatcacataaaatctgaacaaccagagacattttctgtaatatcaggaacaaaccaaggatgcatactttcacatcttcaattccaaatattattggaagacctaggcagagcatttagcctagaaaaagaaataaacagaataaaaactagaaataaaagtataaaattatctctgttttcagatgacataatgtcatatgtagaacgccattaaaagacccagaaaataattctgaaagaatgattaagtgaatttggtaatgtttcaggatacaaaatcaccacttaagaacatctcatggctaggcatggtggctgacgcctataatcccaacactagggaggctgaggtgggagaattgcttggggtcaacagttcaagaacagcatgagcaacaaagcaagaacctgtctctaccaaaaat

SEQ ID NO: 271632 - DNA, 623 bp, Homo sapiens
ctggaattagggttcaggtaccatccatctgttacgtgctttgaagatgccactccatctgtgggattcaatttacataaactgaagactattcttctgagttgaagtgaggagaggcatcaatcacactggaaaattatttgatctcctggaagcaaaaagtccaccatgaagttgttcttgccatggacttctagaggagctgactgtcctttgggaagctacaaatacagccttaaaatctgttagcagggaagagaggctttttctgagtgatcaggaatgaagaagcagagatcatgcaaggtgtttccatccaaaagtaggcatctcatgtcatctgctctggccagtatttaaccttgagaaaagaagaagtgtagagatgatgtacttgcctgagggatggattaaaaagtctttggtcttctctgaacggtactactgaatttatcctcatcaccgtcatcattgtcattgtcatcatcatcatgaaaacagaccatgtacaaatccaagcctgccatagaagttgttaccctacatagagtccatgcctgtttgtccagagtttgggaaaagtcagagcacaacctagaataaatgcgataatgtatcacatg

SEQ ID NO: 271633 - DNA, 323 bp, Homo sapiens
gcagcctctcggcatatcactcacaccttctaggctgtcctgttgagacttgtgcctgctcctgcagagcgctggggcctctgaatgttatttctcctgcctgacaaatccagactttcccaaattcaaaagcacacctcaaaagagagattactttatcgatgccctggcaagtacattttccacccccaccatcctgccaagtcccccatattctgctatggatttggcttttcacagacttatttatttagtccatttagaaaaactgtacctttggagataaaaggtagtgtaaagagaggaaataacagtgggaatac

SEQ ID NO: 271634 - DNA, 410 bp, Homo sapiens
ggtgcagcaggagacactgggagtaaagcctggcctttggctctgccaaagaccacccaggggactggagaaaagagtggttggtggctggagctacaggcctgttgcgtgacaagggtgccctggacaggctggcagaaagtcaagccagagacctaaaagagaaggtcctggggaaagcaaagttaccttgattgcctttgacaacactcaagtacttcattggcccttctgctgcagaacttgaacacgtggttcttcaaatacagtactttcctcccaactcccaccactccactttcctactatgactatttcactcctctatcaactcagctgaatcatcatttccttgggtcagctttccttgtcccccctgactagcaataaatgtcctcctcaatcaaatg

SEQ ID NO: 271635 - DNA, 307 bp, Homo sapiens
ccgtacactcacgaataatattatcccacaaccgccacaagaactcacagccaccctcacaagcgaaaaagcgataccacagttaccttgattgcctttgacaacactcaagtacttcattggcccttctgctgcagaacttgaacacgtggttcttcaaatacagtactttcctcccaactcccaccactccactttcctactatgactatttcactcctctatcaactcagctgaatcatcatttccttgggtcagctttccttgtcccccctgactagcaataaatgtcctcctcaatcaaatg

SEQ ID NO: 271636 - DNA, 518 bp, Homo sapiens
tattaaatcaaattagaatttttctccttatatatttttatgtgtatttttcaattactgagattcctgttaagatcccctactgtgaaaatagatttgtttttcagttcttgcaattctgtcaattttgtgttatatattgtaaggctatattattacaactgttgttacgcattgctagtagatgaagaattattatatgatccatgctgtggtctaaatatatgtgtcctctccaaattcatacattgaaacttaacccctaagatgatggtaataggtggtagggtctttgggaggtgattaggtcatgcagagatctcatgaatggggttagtgccctcataaaagagacactaaagagctagttacccccttcaccatgtaaggacatagtgagaaggtaccatctctgaaacagaaagcaagttctcaccagacactgaatctgtgggtgctttgatcttagactttccagcctccaactgtgaaaaataaatttctgttgtttataagtt

SEQ ID NO: 271637 - DNA, 559 bp, Homo sapiens
accggaatcatcaactaaagtctacactgctatatcggctatctattgctgtgtaacaaattattccaaaactcagtggcttaaaacaacacatttattatctcacagtttctgtgggttaggaattcgaagatgggccccctgcttcagggtctcccatgggttgctatctaggtgtaagctaggtctcatctcaagactcaactggggcaggatccacttccaagtgcacccacatgattattggcaggattcgtttcccatgaactgttgtcagaagccgctttcagatccttgccacgtgggcctctccgaagggcagctcacaacacaacagcttgatttatcagagcaagcaggcaatgaggcagaacagggacctctcttagggacatgcagcactcccaccctcaaacatagaaataaagaaaaatcttaagttcctttaagaaaaattccaggcacttagctagcccttaaaaaataaataaggccgggcacgggggctcatgcctgtaatcctagcactttgggaagccgaggcagttggatcacttga

SEQ ID NO: 271638 - DNA, 292 bp, Homo sapiens
aggtgaaagtgtgaagagaacaagaaaagctgatgcatgccccagtaggagagcattcctcctgcctgactaccttctaattggcatatcagctttttcctgccttcagactgatattgaaacatcggctcttcctgcctctccagcctgccagacttcagactggaactacgccattggctctcctgggtctccaagttgctgcctcaccctgcacaccttgagacttgtcacctccacaatcttgtgagccaattatttgtaataaatctctctcaggtaaagaacaaaa

SEQ ID NO: 271639 - DNA, 564 bp, Homo sapiens
acaacacaaaaaccttttaaggcctgtctaggtaatacagccctaatcttagagttagggaacatagaaaagttaaactccttggtagactaaaatcaaattcgctgtgaaaaactaaaatactggactgattccagagttttaccatcacttacaagaatagaagaaatttggccaggcacggtggctcatgccttatactaccatatgtggaatgaatccagtagccataccaagttattgaccagttatcttaagcagacattcttctgatcacatccaaaattgatgtctacatcagctaactttcctacaagattatcaaattttacacagtatttttctgtatttaatgactgccatggtctgcaaaattatgtgattagacaatgaatgacgcttaaagaatgatgacctattttctaaagtacactcaaaatattaaactttagagacaaagcaaaatctatcataaagttggcttctgttgatagaaacagagaggtaggttaataatcactgtcctaagataagcaagaatgcttagaaataaaagttgagacc

SEQ ID NO: 271640 - DNA, 412 bp, Homo sapiens
aacccagttcaacagcagagtttgggatttctgaaagaccactgtgatagcactgtaaacagctgggagagaggaaatgaagtcagggtgacaagtcagggggcaaatgcaagtgacagagccagagaaaaggatgacagagaggagaggatggagtcaaggtaaagctcagaagcacagcagccaggacgttgtgacctcccaagatgaaacttgtttctaaaagaaaattaccaaggacttaattaaattaactagccaggttactattttcacattctagaaacactgccctgcttaattaacttatattctaattcatttacatacatgcattttaaaaagctagcaaaacatgaccaaacagactagcactcttgaccaataaacaatctctttaaagagccaaaca

SEQ ID NO: 271641 - DNA, 428 bp, Homo sapiens
ttttttttttcaaagacgaggtctcactgtgtggcccaggctggaatgcagtggctattctccggtctgatcatggctcactacagtctcagactaatctcctgcactcaagagatccttccatgaagttggaactataggacacatccgtagaagtatttggcatcacgctgctgctcttcactgatgagaagtgactcaccaggatgacagaggttctgagtagggcatctgccaaccaatggggcaagatggctcagaatggaccctcaagatgtacaagccctgcagagccagcagagtggccggtgccatctggccaatgtctggaattgaagcacaaaggatgttctccagaaatgaaagcttattttaaggtcacttcttgggagaaatagattacaattatagaagtctttatataaaaa

SEQ ID NO: 271642 - DNA, 603 bp, Homo sapiens
gagatgatattttggtttcctacctgctttattcattcttaattggttgagaccctgggcaagaaagacagatgctagcaaagaactcagtataaatatttaaattaaaattatggaaaaataaagacaataagaaatgaggtgagggaaatggaaagataaaaacaagtaaggaacattttatacagtagaatttttaaaaatgccataaagtcatgggttgagagggaggaaaaatgggagaagagtcaggggaagaggtcttggaaaagaactgataaatagtaacttcagctatcacattatttgctcaaggacacatccgtagaagtatttggcatcacgctgctgctcttcactgatgagaagtgactcaccaggatgacagaggttctgagtagggcatctgccaaccaatggggcaagatggctcagaatggaccctcaagatgtacaagccctgcagagccagcagagtggccggtgccatctggccaatgtctggaattgaagcacaaaggatgttctccagaaatgaaagcttattttaaggtcacttcttgggagaaatagattacaattatagaagtctttatataaaaa

SEQ ID NO: 271643 - DNA, 323 bp, Homo sapiens
tacattcaattggccgctgttacactcacagctttggtggagttagtcctcagatctgagctgcgtcttccccatggggctgcagccctcagaaggcctcttgctgcccagggccacagcgtgacttctgtgggcacttcgccctcatgagtcctacccctggagaaaaatattaaaatttatactttatgactacattggcataaaaacaaatgtaattccggctggattcatgattgtatactcatttgtattctattcattttttcttctgatttttgaaagacaactaaaataaaaacatttttgagggcccctagaaa

SEQ ID NO: 271644 - DNA, 290 bp, Homo sapiens
attaatggggacaaatatactgtctgataggagaaataacacacagtgtttaatagctcagtagggtgactgtagttgacagcaatctattttatatttcaaaatagctggaagaagataatttgaatgtttttaccatacagaaaagacaaatattaaggtggtggatatctgaattacactgatgcaatctttacaaattatatgaatgtatttatcacatgtatcccagaaatacgtgcctctattatctgtcaataataaaacataattttatttgaaaaagaaaa

SEQ ID NO: 271645 - DNA, 301 bp, Homo sapiens
tggacttagaaaatgagggatgaggacgaggtgattgacggcaccagttttcaggcttgggcttttaggtggtgccatttattgggatagaatcttgcttcggtcaagttgagtttaggctgcctgtgagacattgaggtggagatatacagtaggcagatgtatgggtctggagtctaggagagaagtctggaggaacatagagatttgtgggcccaccatctactgtggtagttaaagccttgggtataactcagattgcttagtgagaatgtttagttgagaggaacagatggtccag

SEQ ID NO: 271646 - DNA, 869 bp, Homo sapiens
cgtttgtttcctcaaatccggtcatgggatttttctcttcctcagagaggcagcgggatccattacttccagttcaccgctttcccagcaccatttcaaatgcgctttggtaaggagaacaaagacaatgagacctcttggtatgcctgcgtctccaggttggggtgtctgtgaaaaaatctcggggttctgtggactctccagtcagtttctgtggagtcagagttaggggtaaccctcgccctggatctttgcaattaatttagaaacttggagagatttttttgcttttggattttctttttttcccctggggccaccattctgggagtttattgccttcaattaagtctctctgcttgttgtaggtgaattacttttgctcatttttaccgtaatttactcttcagaccctggggaaacaatcggctccaggcagccattttcatcacagcatcattcacaagagaaataacatcatcatgtgcctgataaagtacaataatatcatctcttgtatccattttgtgaactatccacaacatttttaatccttttatgtaacttactgtgactcaagctaccacctatgggaatgtaagctcactgggggctcgctggggacctcctcttatttgccactttttcccagcagtatgtacagtgcctggaatgtgtgggcagttcacaagttggtcgaattaataatagacaagtattcgggttacattactaattatttttaaatcatatggagtatgaaatttgagaagagaagtaagtggtctggtgatttggcttacacatttcaccactcacctttactaagatggaaaattaaatgctatctgtaggtccacagtcagaaa

SEQ ID NO: 271647 - DNA, 472 bp, Homo sapiens
tgatcctggtccccaaaaccagagtgaatcaaaagagcttcctcccctgaggcaaagtggatttgtaagcagttctgaaacatcacttactcagaagagggaacgatgtattttgatgagcgcaaattgggaagagctggaggcctactgcttgggacagtttttttttttttttttttttttaaatatgagtggtagcttattctgtaattgcggcaactttgaaaattgtattttactggaaatctgccagccatcaccacccgattttgattgtatccttcctcccatcctttaatctgttcactgctttgtctgggggagctggggtcgttggctcagacgttggcgtttgttctttgatggatgaacgaacactccagttttctttcccgtggaggttgtttcagccacaaaccacttcattttgctgtttcaatttcaaaataaaatgaaacatattgaaaaaaaa

SEQ ID NO: 271648 - DNA, 349 bp, Homo sapiens
tagctgggcatggtggtgtgtgcctgtaatctcagctatgcaggaggctgaggcaggagaattgctttaatctgggaggcagaggttgcagtgagctgagattgggccactgcactccagcccgagggacagagcaagactttgtctttaaaaaaaaaaaaaagaatgctaaaagaaaatgtctaaaaagctagatctctgtatttaactaaacaataactatgagtacagttgaaatatagaccagtccagacaggctgggtgctgtggctctcacctgtaatcctagcactttgggaggccaagggaggattgcttgagtccaggattttgagacaagcctgggcaa

SEQ ID NO: 271649 - DNA, 409 bp, Homo sapiens
cagtccaggaactcttcaacacctccaggacagcagattccacataggccaatggaacaggatagaaagcccagaaataatgtcacacacctacaaccatgtgatcttcagcaaagtctacaaaaaacaaacatttggaaaaagactcatcattcaataaatggtgctgggataactggctgggccatatgcagaagattgaaactggacaccttccttttaccatctacataaatcacctaaatatggtttaaatatttaaatatatatcccaaaactattaaaactcttgaaggtaacctaggaaataccatgcccaacataggaacgggcaaatatttcatgacaaaaggccaaaagcaattgtaacaaaaatgtaaattaataaatcagacctaattaaactaaa

SEQ ID NO: 271650 - DNA, 411 bp, Homo sapiens
cagtccaagtagatgtttgagtgacattcagtctcttaagaaatatttacatcacagatctcaaaatgaaggcaagtcaggcagctctcaagacagaattgcagctatgtgagaaggggaaagaaataaatagttaaaattttaactatacatattctgttttcagcctgtgaatgtagtagtttctaaaagcaatgaagatttccctgaatatcacttttgtgcctcaagctagttcttattcctctgttaatgtcattggttgctcacccctccagaggtattttcatataagagtcagagtttcaggaaaaaggtcttatttgtttaaaccaaatctgtttttctccaagtgacatatagtttttaagaatatgcacacaatccctcatcaatctctgaaccaccaaa

SEQ ID NO: 271651 - DNA, 490 bp, Homo sapiens
gtgggaatttagaaagagaggaccatttaggtcttcccagggactcccacaatcttcctcattctcaagtttagggatttagagaccacagaactcctgtctccaaacatgcctaacagctaccaactacttgatgaatcttggatgaaggccagttatatttgacacctatggtttgtatccctgcaaggattaaatccaggtcaaccaaaatcagaagtgtccattcctcaagttacagaagactgtgctaagcaaataaaaagaaaacctatttttccagaccagagtaatccaagctagcttggagctcatatttaagagccaataatatcctgttctgtaatagtcatttgctgtgttgttcaaaaatattccattctactgtagaagacaggaaaacaaagggatacatgaaattcctatgatgtgttaaacaacaaagcgacccttaagacagaaaagctaagtacagcatgtgagtgtgaac

SEQ ID NO: 271652 - DNA, 495 bp, Homo sapiens
aaagaaggaaaaaataacaaagagaagagcagaaatcaaagaaaaagctggctctttgaaaatatcagtaaaaatgacaaaattatctcaagactggcaacaataaagacagtttatttttatttgtttttttattgtatttgttttatttgtctttatcattttatgataaaaaccctcagcaaactaggtatgaaggggaacctcctaaacttgagtaagatcatctacagaaaatcctacagttgacatcatctcaatggtgaaagctcacgtttttcttgtaagatatggaacaagataaggatgtgtcctgtcaagttttcagtcagtaaaataaggcaagaaaagaaaataaaaagcatacagctcaaaaaggaagaaataaaactgtccatattttcagatgacctgattaggtaaaaaatgctaagtaagatactgtattagtctgttctcctgctgctaataaagacatactcaagattgggtaat

SEQ ID NO: 271653 - DNA, 429 bp, Homo sapiens
catcaggtgaaagccttggctgcttccattcatggcagaaggtaaaggaaaaccagtgtgtgcagagatcacatggtgagagaggaagcatgagagagaggaggtgccagcctctaacaaccagctctccagggaactaacagagcgagtacccactcacaccccacttcctccagagagggcattcatctattcatgaaagatccatcccatgacccaagttctcaagttcttaaatcactccctttagaccctacctctcaatactgccgcactggggattaaatttcaacaggggatttggtgggaacaaatatccaaatgatagcacaaagtgtattagcagggtttacttatgtagatataaattgtgtacattttgcttaatggcccaaagaaacagcttatcaataatctaaccaatgaata

SEQ ID NO: 271654 - DNA, 319 bp, Homo sapiens
tcagaatgttgaaatatatgggtttctaattacatgtgcctgatatctgatcagtatgtactgcagaaggtatctatcatactaaatcttttccagatctgaaattggtcaccagcatctacataaaattgaatatttccctctctccacccgatttccattgggctaaaccaccaaagctggtggagctttatataaacaaggcctacaacccatgctgggtttttcaaaccagtcaataaagacctgaacaatatcttgatccccttttgttcttcccacaagtccataaactctctcaagcaagtatgggcctgcc

SEQ ID NO: 271655 - DNA, 304 bp, Homo sapiens
ccattactcacagtgccagcacatgtttccttaaaaagcttcatcaccatcctcctgcaatgcgaccttcaccggctccccgttgcctgcccaggaggataaagtccaagttctcctgtggaaagaagacccttcacacgctagtcccagcctgtcttcagcccagccccctgtgtttcctttcctgccttatcctaagacatccttaccttccaatcacactcactttccgagcatttttgaaggtattgagggagttgatgagtctacacttgaataaaatacagactttacactccagact

SEQ ID NO: 271656 - DNA, 180 bp, Homo sapiens
ggggcagagagccatcatgtgtctctacatgtaataatcaaaaacacttataatgtcactgatagtattttgtctggtctaacctgcgtctaatcatgaagaaacatctgacaaaccaaaattaaggaacatattataaaataagtggcctcggttcttcaaaaacatcaatatcataaa

SEQ ID NO: 271657 - DNA, 390 bp, Homo sapiens
aatttaggcttttcctcattattccttgcctgtgtctgctgcagcttctggagttcttatttccattcctgcatacctggctttcccataaagtgatgatacaatgtgatcccattctcctgcttaacccctctgagcttctcattatcctcagagtgaagggtgatctgtagttgagcaagcaggttcagttcattgaggcctctttattttcaaagcttttctccaattatcttcattgcattttggccatcaggctgctccatgttctccaaaggttctttgaactttctcccacctctgccttagatttggaagctcacaccaccttcaatgcctttccttcattttctgccagggaattctgcttatcctccaaggcttgactgc

SEQ ID NO: 271658 - DNA, 478 bp, Homo sapiens
tcccacgcatgcccccagagcctctacattacccgccctttcccttgacttccaggcgacccttccccctctctgaaagagcaaaaaaaaaacaaaatagaactaaaacacatcaaaggcaaacagaagaagttaaaaggagatagggacccattcaattcagcttatactccctcccctaaactagggtggcactgggtccagcaactgaactcaggagtactttaaacctaaaagtatcttttgtgggatgctcatgaaagggaaaaaatctggctggaagaatcaatatttgagtttgtccagctaatcatagcattactgctaggttctctcacaaaccagatttctggacttgttttggttagactaaagtagtttgtgctactgggcacacacacatggaaatggaatgtgtcctggaaaaaaaagagttaaaaaaaaaaaacagggctcaattcacacgccaacctgacag

SEQ ID NO: 271659 - DNA, 577 bp, Homo sapiens
tatttaaatccctgtaattcttaacaatgaattctcaaaataagtaatctaggactatgcaggaaccaagacatctgaatcaacaagttaaaaaaaaaatgtctgtatacacacacacacacacacacacacacacaccacctttcggtggaagggacccggaccatcctccttgcagctcccgcagctggctgggggctggggggaagtcccgggacaggtgcatgtcatcaacacgactgtcggtcgtaggaggatgaagccggcccaggtagggaggtgtccagaagcccgtggaccctgcctcaagaggcaagacgtgccaaggggtgccctgcctgcctgtggcagggagtggggtgggcacgtgtggctcccaggccggctgctctgggcctgagtctgtgggagcagcaggcggctggttttaggaccttcctcttccttcccaccaggtgtttcggctctgcacccttctcagtcactttgctttcctatctccctggtaacctggagctccttggagctccttgtcgaaggctgacttgagggggatggtggcttgccggaagagaga

SEQ ID NO: 271660 - DNA, 519 bp, Homo sapiens
gagaagagtgggtccccaccatttactcaaagagtagttccccaccatttactcgtttttctcacaaaataccagagatttagtgtgaacaaaacgagaatctgccatctgcccccatgttttggaagacctcttctcagagagacaaacataagcttcctggacaaaagccagcttataaagaacccaagcgtggcacaaataatctcttagactcttgaaaaatcataagaatgggaacagcccagggaaatcagaaagctgaaaccaaggcctccaagcaaggatgaagctgctagagccacagagcctccccttcctgatgaggtttgaccacaagcacccaggtgacaacacctgaaccactgggtggcacttcagaatcaacctgcctgcacaggccaaccatggcagctgcatctgtttaaattcttcccaagtcttgaacaatctcttcatcttcatattgttgtaatacttctgagtgtggaaaagcagatgaaatttcatgcgctgata

SEQ ID NO: 271661 - DNA, 435 bp, Homo sapiens
taaggctctgttttggatcagctaacctgagcaatccattcccatagactttaattaccaccagtgaagtggatgactcactaatctgtatctttagccatatctctctccccagcagtattgcgactgacagctccacctggatgctctgcaagattctcgaacttgacttgttgtccttgactcctccctaatccttatatccaactgggcaccaaatcctattcatttactttggaaatggcacactaatcctgatctgtgtattcactgccacctgtcatgaattcaggtcctcctcatctctgaatcataggaatagtctcttccttgttctccttataaactttcttgttctactagttaaccctcaaagctggtaccaaagtaatcttcccccaaaattaatctaataaagccattcctttgcttaaa

SEQ ID NO: 271662 - DNA, 354 bp, Homo sapiens
aaaacaaaagtttgcttgtttaaaatgacagttgtgatgtaaaaagtttaagaaatatgaatgtgagtggtaagtatatctcagtttaaatggtaaagaagaaatgtagtttacatttgtatttttccagaattcttttgtcctatgcagtattgctaaagtcgagaatatattccttgcctgtgttagacatgaagggaaaaagaggtcacatattgtgatttccagctgtagcattcaaaaaaaaaattggtgttcatgactctgtggtcggtgccagaggaaaataggaacgactctaattaataggctttctgtgtatataattaaatttagctgctgcaaccattgttc

SEQ ID NO: 271663 - DNA, 258 bp, Homo sapiens
tggttctcagggcttcagactcaggctagaactgcaccatcagctatcctgggtcttcagcttgccaactgcagctcttgagccttcttagcctccataattgcatgaaccaattccttataatactttctctctctccttccttcctccttccttccttccttccttcatgcattccttttcttcttctttttcttttgagacggagtttcaaagcaaaactccaggctggagtgcaatgttgcaatctcggctcac

SEQ ID NO: 271664 - DNA, 545 bp, Homo sapiens
ctatgttgtccaggctagtgttgaactcctggcctcaagcaatcctcccatctcagcctaccaaagcactcatattataggtgtgagccaccatgctaaaataggtttcactattttagattccatatataaatgaaatcatacagtagagtttcattaatagtaaagtaacaatgtgggttgatatggtttgactctgtgtcccccaaccaaatctcatgtcaaattgtaattcccagtgttgaaggatgaaggaggggcctggtggaaggtgactggatcatcggggtggatttcccccttgctgttcttgtgatagtgaatgagttctcatgagaccttgttgtttgaaagtgtgtggtacttctccccgccctctggctccaccatggtaagatgtgcttgcttcacctttgccttccaccataatcctaagtttcctgaggcctcccagccatgcttcctgtatagcgtgcagaactgtaagtcaatgaaatgtcttttcttcataaactacccagtctcaggtagatctttagagcagt

SEQ ID NO: 271665 - DNA, 377 bp, Homo sapiens
aggggaagagcagctcagcagcatctggaactgttaacctgagacttggttcacccagagagaagttgagagaaccttgagctcttccgggatctgttgcaaagctgtttttgttactttttttgagtggagtacacatacacgggtcaaaccccaaaacgcctaaaaacgtctatagtgaaaggattcccgcccctcccgcccccacctttgtacacctggttcttacccttctccccacagtgaaaccccatctctacttaaaaaaaaaaaaattagccaggcgtggtggcgggcacctgtagtcccagctactcaggaggctgagacaggagaatggcgtgaacctgggaggcggagcttacagtgagccaaga

SEQ ID NO: 271666 - DNA, 342 bp, Homo sapiens
aaggccttcccccatggcctggattgccaggttacctggtggtgtatatcctggaggcagtccatcccccctcatactctgaaaaactctgttttctgcctggctcacagtgtaggttgcagcctgcagcttctttcaaaggatgtatggggttttgtttttttgtgtgtggggtctttttttttttttcagttttcctgttaagttcctgcattacttcctgggaaaaagttcacagtgtggatctctacacactattttgtctttccaagtgagagaggcatgctaacaatgtctccaatccactatcttggaaaaataaaaacaaacttcactcagaat

SEQ ID NO: 271667 - DNA, 294 bp, Homo sapiens
gtccctacagaaccgaactcccggggttgttgcgatgacaaggtgtgtaaatgcatgtgaaacaccgacaggcaggaaaccgacagccgtcacgtgtcatcacctgcctgttagttaccgtgctcggcacctttgggttccatgactgtgcagtgaaaggaaatttatttggaaatgtgagaaatgctggaataacattattttgctgtagttgtctaatataaatcattaaaaagggcttaacaacctggtgatttgtatccgcttatgtcagtacttctgagattaaaaaaa

SEQ ID NO: 271668 - DNA, 338 bp, Homo sapiens
tggtttgtagagaaagtctgaatgcaactaaaagctttctttaacacttacatggccacttaagctagttctcggtaattcaaaatatacaaatcaacaataatatttggggccgggtgcagtggctcacgcctgtaatctcagcactttgggaggccgaggcgggtggatcacttgaggtcaagagttcaagaccagcctggcaacatggcaaaatcctgtctctactaaaaatacaaaaaattagcctgacatggaacccagaaggtggaggttgccgcaagctgagatcgcgccactgcaccactccagcctgggcaacagcaagactctgtctc

SEQ ID NO: 271669 - DNA, 362 bp, Homo sapiens
aggataactgtctatgcagccccatcacctggtatgtcactgaggtaggggcattctacctacattctacctatgggagtgtattcatggttcctttgacgtgtcatgtaaccatcgcaagtctgcagttttgcacacactattccctttccctggaacatttttcccctccgtacgaaagaaataattcttatttttcaagactcagctcagacttcacctctgcagcacaggtgttcttgccctctgctgcctccttagccccaagaatcagaggctctcctctctgtgctcccaggggacttctcacccacagtaggtcacttctctgtcttctacactgcaagtgagccccttgagag

SEQ ID NO: 271670 - DNA, 403 bp, Homo sapiens
cagtcggacccttcatgctggtctgaatccaaccaggcttgactgaatcacaggcaaagaaatgactcaaagaccagcaccaactccaaagacagaggttctgctgcaaggacaggtgagcccgtggctgaaccccaggcagaagccagaacacagccgggcgagtctgagacagagtggaggctgtcccgagctgcaggttaaagcatcactggggtttgcctggcttgtcttcattgttcagagggcacaaaggtgcaggatcagggcagacatgtagggaacctttgtctgcagcagaaagtctttccccaccccccattgctctacttccccaaatcgttcaaagctcatttcatctaagacactgctcttccaataaaaggtttacctcagactcacc

SEQ ID NO: 271671 - DNA, 656 bp, Homo sapiens
accaaacaatctgttaccaaaaagacttccaaagacagttaatcttttatatataggaaggaaaatcatttttttcccataatccttattttttggcaccaatccagtcatattttttaaatcactctctctgatcacctaggccaaacaatttcttagacaacaggtcagggcaccactaacaacactcatagcattcattcttttattcaacaattatttattggacacttagtatatacgaggtagcattgtccaacagaattttgtgatgatagtaatgtttatgtctacactgtccaatatggtacccattagccacatgtggctatggagcacttgaaatgtggtgtgactgaggaactgaattttaaattctacttgattttgattaaatttaaatgtagacacctgcatgtggctggtggctactgtgttggacagagcaagtctaagtaaatttttggctctacgactttattaagtcagtaccttaatgcagctgaacaatcctgccaaaaatagtgtctatttagaaagtggctaacatatggatattttgttttattcagtctaacactatattaaaattaacttttcagagaatcacagaattctggagggacaagacaaaaattatttaatccagccccatt

SEQ ID NO: 271672 - DNA, 453 bp, Homo sapiens
ccataaaagatggcattctgcaagactgagaagatgcccacctccattcccagagtccaggccttcattaactcacacgagaactacagaagcatcacccctagttctcctattagtcactcctcctcaactgcctctaatccatccatccatctatccggcatgggtcatgtaaagttacagctgagaagggctggatacagtgaactggaggaatagcggggagaattgccaatactcaggagtcaggcttcacattgatcatgcagctaataagaaagaaggcaaaggtaccaagccccttgccatatgagagcttccagcaactttggcagaagatagaaaggaaaatactactactatttagaaactgcactgatatttcttgacttctcctgaatcgactactgttttcccctcagtgattcaaatacaagagaaatttttctcatc

SEQ ID NO: 271673 - DNA, 415 bp, Homo sapiens
ggccctcagtggattgatgatgcctactcatattggggagggcagtcttctttactgaatccagcaattcaaatgctaattctatccagaaacaccctcatagacatacctggaaatgatgtttagccaaatgcctggcaccctgtgactcagggctggatacagtgaactggaggaatagcggggagaattgccaatactcaggagtcaggcttcacattgatcatgcagctaataagaaagaaggcaaaggtaccaagccccttgccatatgagagcttccagcaactttggcagaagatagaaaggaaaatactactactatttagaaactgcactgatatttcttgacttctcctgaatcgactactgttttcccctcagtgattcaaatacaagagaaatttttctcatc

SEQ ID NO: 271674 - DNA, 432 bp, Homo sapiens
cacttctcctctgatgaatgtgaacaggaaagcgtattgtccccacgtgctgctgggtgttatcttgtgaacctcagagaagtcaacctgactttctggttacatgcaaaaatatattatttccttagtgtttaggttagtttgatttgggcttccaatttttacagtgagaagctgtcagaaccctttctctttatgggatttttggagttttttatttggtttttgccaattcctattaggcattatcagtgtttttattgttgatgtggtaagaactctattgagggtgtaatcttgttgtctatttattatgactatgtctccaagtttatcacttgttcattatttgctatgtagtcttatttaattcagagaagaatatagtcttaatgtaattaaatataccagtatttttctttgtgatatatt

SEQ ID NO: 271675 - DNA, 473 bp, Homo sapiens
gttagcacagcagccctaagggtcagtctataaatatccctattttacagatttggaaactgaggcttggcttagtctcttgcccaggatgccagaactagtaagtgacagaaccaagattcagaaaccaaggctctgactgcagagcctgagtgtttaacctgccccagtgaggcaggatagcttcacagaggagaggggtggggaggagccccttgggctcagggaggctggagatctgtttggagctccctgcaggcccaagaagtccaacaagccagtgtgttgagccctttcgaggctcatttcatcatacatctttcatgtcaccaagattgaattaaggaaatacggcaagagacccagtgtttgaatgcagggaggaacttctgactgtggaggagagggaacctggtggtgggaccatggaggcagggtgcagaggtgcacaataaaattgattatcatcgttt

SEQ ID NO: 271676 - DNA, 418 bp, Homo sapiens
agcatgtaaacatctgcagaaaccaaacgtttcctggaactaagcttgagcagaaatctatcacgtggacctttgtttaaagaaccttgtgaaaaaccacagttacgtaaaagatccaggagcgcagttcatgtggattagattctctaggaggcagagagtctaaggagatcaaagaaaacaacgacttgggaagtgcatgtgctgagcactggagccaaactagcagaaaggagttttagaggcactgaatccagggcctctggtttttggggactgtagtaaagaaaggagttgaggcctggtgcagtggctcatacctttggtcccattactttgggaggctgaggctggaggatggtttgaggctggaagttcaagaccagcctgggcaacaaagcaagaccccttttctaaa

SEQ ID NO: 271677 - DNA, 501 bp, Homo sapiens
ggcaggagggcagaggagtcctgctgatataagacccataatccaaaggactgagaaccaggaagctttgatgtccaagagaaggagaagatggatattcttgctcatgcttctgccttttattcctatttgagcccacaacagattggatgatgtctgcccactttagtgagggaagatcttttttacccagtctatttattcaaatgttaatatcttctggagaacctcatacagacacacccagaaataatgttttaccagcaatctgggcatcctcagcccagtcaaggtgacacataaaattagccattacaacattactgccattttacaatacagtggcaatgtatgagaacgccaggtcccctacattcttggcaatacttggtatggtcagtctttttcattttaatcattctaatgggaatgctgtaatatctccctgtggtttaatttgtattttctcatgataatgataaagaatatccttacatgtgc

SEQ ID NO: 271678 - DNA, 485 bp, Homo sapiens
tgccactttgataatttgatgataactgggtgtggtggcttgagcctgtagtcccagctattcaggaggctgaggtgggaggatttgcttgagcctaggagtttaagaccagcctgggctatatatagcgaaaccctcatctcaaaaaaacattttgatgatatgaaatctaaaattatgaacttgcttgtgaaaatagaatttggcagggcgtggtggctcacacctgtcatcccagcactttgggaagccaaggcgggtggatctcttgagcccaggagttcaagaccagcctgagcatcacagcaaaaccctgtctctacaaaatacaaaaaagttaaccaggcacggtggcacgtgcctgtagtcccagctactcaggttaggatggagaatcgcttgggcctggggaggtcgaggctgcagtgagccatgattgtgccactgcactctagcctgggtgacagtgagaccctgcctcaaaa

SEQ ID NO: 271679 - DNA, 322 bp, Homo sapiens
atttatgtatttttttaaaagcaatagacatattttttatgaatacaaacatatatggtattacattttagaaacataaataagaaaagtaaacgtcaatttcagcacggtggccagaagttacctctgagaagggaggggagtaaatatgatttttatttttaataaatagggagaaagacttcagttataaagatctgaaacaacaatattaactcttctaaatctagagagtaggtatgtgttataatggtctctgcatacagaatatgtttgaagtacttcgtgatttaaaaaatttatatgcccagaaaaacaattt

SEQ ID NO: 271680 - DNA, 452 bp, Homo sapiens
ccagggtccttttctttcttatggatttataaatatgatacttaaggatattaacctttgtcattataagtattttttcccagtttgaaattagccttttatttttccttatactttggatttttttggcggcagtttgaggggagcatgttttaaaaatacgtagccctacgctgggcatgatggctcacgcctgtaatcccagcactttggcaggccgaggtggacggatcacctgaggtcaggaggttgagaccagcctggccaacatggagaaaccccatctctattaaaaatacagaaattagatgggtgtggtggctggcacctataatcccagctacttgggatgctgaggcaggagaattgcttgaacccaggaggcggaggttgcagtgaccctagattgtgccactgcactcccacctggatgacagagcgagactccgtct

SEQ ID NO: 271681 - DNA, 565 bp, Homo sapiens
gtataacgagctcattaaaatgattacagttccctggaacatgaacttgactccacctacccccactccttgctcctcaggggactacagctcttgctcaaaaaacaggatgcctttctcaacacatttcctttctgcatttttccccgtttagttctctttgaagcaggagtgtaggcaacccttttctgctggatgcaattgactttttttcttgcaatgctcagcgttagagcaccaatgacactagtaaaaagtggcactggcgtgccccggcaaaccagtttggcatgaaaactgactcttggtccagcccgggccagcaggtgggctgactgctggagctgtgcccttcctccaggcacaaggtgctgtggcaagtgcttggcagagccaggcacgcagctgggggcccctcagactgctttgggggatgtgtatgtcctcatcgtgggaaggtttgactgctgatcagaacacatccagttcactgtgttttgttctgggggcccagctgtaagacaggctatctgtccatcatcattcaaatgtatctactttctgg

SEQ ID NO: 271682 - DNA, 358 bp, Homo sapiens
agaatctgctaacaatttggggggtatctttccttcctttttaattaatacacaaacatatatacgtgtgttacataaggggtgtttatttgcttttttcacttaatacgtggaagaccttttctctatcgtttgaacctaaagcctagaaggcaagaaagcaactcgttagagagttgataaagtatcactgcagtggccagtgatttggatagaaataagctgaattcagggtaagaactggtttctataaaatatggtttactctgcataataattggaggcagtgttttttcaaactgagtttttttcagccggttcgtgaatggtgaaattaatttagtcatgactagcattt

SEQ ID NO: 271683 - DNA, 464 bp, Homo sapiens
gcataggccctttctctcatctgtgtttatctacccccatgtagaagccatactaagatcaaaatcaaagatccaactgagacccacttttctgatggtagatcgtcttctctgggttgctttccttttggtttgtcttcctcttgtctttcttggtggctgctttctgctgttttctgctatcagtcttgataattgtcttattgggtacagcaagaaacacttgggcagaaacacctcccccaaacagagcaatctggtggagtctaggggaaagtgggtggaataaactgtttcaacttttaatctaggcctaaatgtagatacaagaactgattttccaatataggtcagccaagatcactacgtaagagaatccgtggatatttgggacctagctactggtgatatatgtgtaacagggcctggatcctcatgccccactcctcccaacactcttgaaa

SEQ ID NO: 271684 - DNA, 98 bp, Homo sapiens
gcatcctccaaacttggaagagttaatttcccaagccttagactggttggcttaagattgaactcagggcaaaagcacctggaagcttgacatgctgg

SEQ ID NO: 271685 - DNA, 385 bp, Homo sapiens
cctcagtgggaagctgtggcttgaagatgactgtaaactctctttccgcctcttcaatcttgacaggccccagggctgctaagctaatatggcagaagggacactgtgccagttgcaggcccaggccttaagagactggcagcttcccctctctgtctctggaaacctacctgcccttctgtaaggaagcccaagcagctctggagaagcccttatggaggggcccactctcagcccacagccagcaccagttgggcagccacgcagacccccaacctgcaagccaggcccgctgaggcctcagtacacacaggcagtcccatcagccctgcccagatggcagttttgtgatcaaaatatagacgatagatgattgttttttaag

SEQ ID NO: 271686 - DNA, 514 bp, Homo sapiens
agaattttattatcctagaaaatttccatttaccattttataattaccctatcccattgccagcccctgataattactgatctcttttctgtctctacagttaagaatgctggcttcttttacttagcataatgcatttgagatttatccatgtattagtagtttattcctttttactgtattacagtactccattatgcattttatatatttatcagtggaattatttacagttttggagattgtgaataaacctgctataagcatttgcctatagatttctgtgggaaaataaatttttatttatcttggataaatacataggaatgggatttactgagtcaaaggttaagtgtatatttaactttggaagaaactgtcagattcttttccaaaaattgcctctcattgttgtgagtactttgtattgtgagtctctttattattgttagccattctaatagatacatagtagtatctcattgtggtggttctattttgcattcccatgaca

SEQ ID NO: 271687 - DNA, 225 bp, Homo sapiens
gaggaaggaggtgggaactggaaggtgggaggtgggagctgggaggtggaaactggaaggagggaggtgggagctgggagctggaagatgggagctgggaggtgggaactgtgaggaaagaagtgggaactagaaggtgggaggaggaagctgggaggtgggaactgggaggagggaagagggagctgggaggtgggagctgggaggtgggaactgagaggaggg

SEQ ID NO: 271688 - DNA, 297 bp, Homo sapiens
gccatcatgtccttgggtaggggaaatcctgctcacaccaagaatggctatcctcattctggggtggtggtctcctgctatctctgagagcccccagaactctgtggcttctggggatgtcctgggagggaggattctgtctatctagattgagaaggtctggtccctaaaagcctgtagagaaaggcagccccttgcccccctggagggatgctgctggcatcctgccagccagctgtcttctccctgcattacttcataggaactaggaactgagagccagatctaatcccggcc

SEQ ID NO: 271689 - DNA, 415 bp, Homo sapiens
gtttcttttctgaactcgtctccgtcctccgtgctactcgcttctcttctcgaattctcggcgtttctaattgctatttttaatatattccaaaagaggggtggttctgctagcaatgagatgtgggaagggcttccagaatctcatctcgccttcctgcatctcatggaccggaggaggggttaaaagggaggaaggtcagatgagattgggtatgagatgttggaaggcccttcctctgtcaacgccatgagatgttggaaggccttccaacatctcatcccacaggtacctttttttgttttgttttgttttttttgagacggagtctcgctctgtcacccaggttggagtgcagtggcgcgatctcagtttacttcaagctccgcctcccaggttcacgccattttcctgc

SEQ ID NO: 271690 - DNA, 425 bp, Homo sapiens
gagtagaggagcacgggaacaggatgatggcttggaaggggcatcatttaagagttaaagaaaccaggggtgcaggcaaagcaccccacacacccagctgcagtcctacaggctgcaacctgaaaccttcacatctactctatcaagccccctgggctagagggctgttgttgcacggaaggtgggaggcaggagggtaagggaagaaggcagagaccccaggccgtgtaatcagcagcaaggtgattgtgtgatgtgtcttttcacagttgagttagatgtgccccaccagttatgatgggaatcaatttaaatacactttcttgatcccagaagttcaactacatggacagtggttacacttgacaggatgatttattatagcacaacttatatatttcaaatggacaaaaaaaagtaacatt

SEQ ID NO: 271691 - DNA, 347 bp, Homo sapiens
acctagttgagttggatttctgtcacttacagttaaaattcctgagtaatacacaggagaactagttaacaaattattaaaatagcccacccctaatttaatcaccatgtgcaaggacagtgcttgtatgtacacccaggtatgtctaattctaatagctagaggtagcaaatatggtaaaaattgagccaagtttgcactagcctcttccattaagcaggaattcccaccttagctctgaagccatgtaggacagggctggagaaactactattcctaccaatgtttctaatgtgtgcagtaggctggggtgctggcaggggaaaattaaaaatgtagtttgggtt

SEQ ID NO: 271692 - DNA, 184 bp, Homo sapiens
ctccccagccattccatttcttcagtgggccctttattgatatctgtgagatattagagaaagtgtctcagagaggctggaattttctgtctgggtgcagtgtcatatttatgtgaacagtggcaaccataaatggccacacaatgactctatttaggttccctcaggtagaaagtactacggc

SEQ ID NO: 271693 - DNA, 335 bp, Homo sapiens
gtttgaatgtgttatatgacttattcaatttttccttttctgcaagcacagtaaaaattctcttggtaaggactgagactcacttactctattatcatatatccaggactaaacagtgtctagcatatgtgaagaatagtaaataaatatttattgaataaatgttaccatgtgatctttcttgagagaagcagtgacacaaaaattgaaaacgtggtccaaatccaatttggactctattttcatggagaatttgaggtcaacttattaaatgaatattcaacatattctgcagaatgaaaaataaatcattgttatttttcaaactgtttcag

SEQ ID NO: 271694 - DNA, 464 bp, Homo sapiens
aggctttcaactttgaaaacttcatgaagtgttttttggcataatttcccaaatggctgtggaatatgtgaaatattccttatttctctatggtgacaaactataaagtagtccttttacctttaaagacagagggacatggtgtctatagctttgccttgacgttctgcagagcaattactataatagtttcaggtattgaagatattttaaagaataaatttcaaatttgtaacctaaatttaggagactacttggttcactggtcatctgtatatttgaagaaatttttaatattgttatatttgttttcttattttaaaatatttaattgtcagccaggcatggtggctcattcctgtaatctcagagctttggaaggtcaaggcaggaggatcacttgaggacaggatttcaaaaccagcctgggaaatatagcgagactgtctacacacacacacaca

SEQ ID NO: 271695 - DNA, 374 bp, Homo sapiens
attcgggaaagtccataattggccatggttacatccccactctgggcctcagcaggaaggatggtcttaacaaatcccacggcaaagtcaggtttgatggaaaagtgaccatgtggacagctgtccttggttgggtaagtgtgagtccaaccacagcatgcatatggcaccctcattaacatgggatgagaggcacagctgctgataaggaggaatgcccacagcatcctattatgagaaaaaggcaagtccacccaaaatacgtcaggcctcaaaaatagacaaaagtaccaggaagagaggttgattattggttacaaatatacagtttgacagaagaaataagacctagtgtttgacaggtcagtagttaa

SEQ ID NO: 271696 - DNA, 566 bp, Homo sapiens
agtggagtatttgcagggttggcctggagcccagcatgcgccccctcccacacatccaggacagggatctggacggctgtgggttcagatcccctggaaagtgagagccgtttcttcactagatactttccctccagtgtcccagtattggtggccacagtgggagccccttacagctggctcttgagtcttgttgacacatcccatcattctttgtggccggtgtctccacaggcaccagtgctatgattgatggctgcacggaatacccttactggcccaaaccaaaggcccatccagcttagtctgcctgagaaggaccaaagctgacgtagctttccatgttttctgcctgagagaacctgtgcagctctccactggcacagtgaaagcatctcctaggggtgagttcaaaacagttccctgacatgtcttggaaatagtgctactggggacaaaatcaaaactaatgttacctggggcaatgggaagtgcgttctgcatgtaatttacactggaacttgatatgactactgtaaaaactataaatgaatatgatccataat

SEQ ID NO: 271697 - DNA, 374 bp, Homo sapiens
agtggagtatttgcagggttggcctggagcccagcatgcgccccctcccacacatccaggacagggatctggacggctgtgggttcaggtcaacaaatgtccatggagtcacccatcaatccaaggctcccagcagaaggcagacagtgtgacttggctacaggctttgccattcgctgcctgtgagacacaagcaagtaggcgaagatatccaagcctcagttctcatgaagcatcagaatgatggtatgattgagcatggggctgttggaaggataatgagtaccgctggcaggagccaaaggttcaccatcacgctgctttgggggctgagcaacctttactgataggcaagatcactgacatagacatat

SEQ ID NO: 271698 - DNA, 614 bp, Homo sapiens
agtggagtatttgcagggttggcctggagcccagcatgcgccccctcccacacatccaggacagggatctggacggctgtgggttcaggtcaacaaatgtccatggagtcacccatcaatccaaggctcccagcagaaggcagacagtgtgacttggctacaggctttgccattcgctgcctgtgagacacaagcaagtaggcgaagatatccaagcctcagttctcatgaagcatcagaatgatgatcccctggaaagtgagagccgtttcttcactagatactttccctccagtgtcccagtattggtggccacagtgggagccccttacagctggctcttgagtcttgttgacacatcccatcattctttgctgacgtagctttccatgttttctgcctgagagaacctgtgcagctctccactggcacagtgaaagcatctcctaggggtgagttcaaaacagttccctgacatgtcttggaaatagtgctactggggacaaaatcaaaactaatgttacctggggcaatgggaagtgcgttctgcatgtaatttacactggaacttgatatgactactgtaaaaactataaatgaatatgatccataat

SEQ ID NO: 271699 - DNA, 406 bp, Homo sapiens
aatgaaccaagtgccacgagagaggattatgtattcagctctgtgagaggatggttgaggggccatgagttcagcttggacggttagtcttcctgggcctgaccattcagaatttccaacagtcactacttgccattagtagttgcctcagcactgcttggagggagtcaccttagatgtggtatttatagcatcatggttaagaatttatcctctcaagccaaactgctgtctttacaaagagtaaacaaataagctccctagcacctgtgctcccagctactagggaggttgagatgggaggatcacctcaagcccaggagttcaaggctgcagtgagctgtgattgcgccactgcactccagcctgggtgacagagtgagaccctgtctctagaaaacaaaac

SEQ ID NO: 271700 - DNA, 470 bp, Homo sapiens
cagtcaaaaggaagtgaagagacacagaagggaagcaagatactgagatgctgccaagtatcccagagtccatgatggagtagagatgaaacaatagacccaggtcattcctctgctggaggttctgaggcaagcagtagtgctctgcagatgaacattcatgacaacttgcctttcaactggaggtgtgtgacagccagaaaaataccatcgaggtaaagcttttttctcctagaggagcaactgactcaccgcagcatgttgttatgtggacctcgagtctgtggactagtgaccttcacctccttcagtgtgtgggtctgtccagggcttccatccctccagtaagaaccctaacccacattcctgcatttgataactttgagttaaatcaagaaaagcttggaaatttggacatagttgtttataagtcactcatattatctattaaagtctaaaaatgttgtagt

SEQ ID NO: 271701 - DNA, 476 bp, Homo sapiens
gcacatgaaacaataaaatataagtttcagctatcaatttggtaaaggttaaaaaaatcaaactatatcgtattctcagcagtagtacaggtggtataggtgagatgcttatgtattaattatttgcttctctatataaattattgattatcacaaaatcccatacataactatttggagattaacatgtgaaataggccgggcttggtggctcacgcctgtaatccagcactttgggagggtgaggcgggtggatcacgaggtcaggagttcaagaccagcctgaccaacatggtaaaaccccgtctctacgaaaaatacaaaaattagccgggtgtggtggcacccacctgtaatcccagctactcaggaggctgaggcaggagaatcacttgaacccgggaggcagaggttgcagtgagccgagattgcaccactgcactccagtctgggtgacagagaaagactctgtctca

SEQ ID NO: 271702 - DNA, 263 bp, Homo sapiens
cgccagtttgatattgggtgctaagcagagtggctaatgtctgttttatcacatgtattttgctctggccagaacgaaaaaaaagaattttcctttatgatgaggcttgcccgaggtcaattgtgccacaagccagatcactagggtcgctcagggaaagggaacccagaagcctggcatgctggcaaaagggtaagaatttcttacaagtcagatttctggcttctacctctgtgtgaaaatggttgaatgaatagttaaaa

SEQ ID NO: 271703 - DNA, 421 bp, Homo sapiens
ttgtgcggtgtgtgtttgtggttttggagggggctactctgatggagaagttcagtgccatgcatgtggagtccttgtcaacccctctgctaccactgggcccagacagtggggagcagatagagccataaaaggcctcatgttatgaagaggatcgtggttctggctccaggtggagtccggcagactcaggtccttcgggcagcagcttgccttctgagggccgcgtccgttctcctccactcagagtgacaactgtggcagcgagccaggatctggagagtgctgtcccctgagcacaggaagccctctgatgacaaaggtctagcagtgacagcaacctattgtatcatcactgtaataacccagggctcatagcccagtgtctggcacatggtaggtgccaaggaaatgctaagaa

SEQ ID NO: 271704 - DNA, 590 bp, Homo sapiens
tctcgccagagtgcaggcgctggtgctggcgcagctcggagctgccgcggaaggccttgccgcattctgcgcaggcgaagggtcgctctcccgtgtgcgaaagccggtggtgcgccaggccggaactgccgcggaaggccttgccgcagtcggcgcaggcgaagggcttggcgcccgagtgcgtgcgccggtggctcagtaggttggagcgctggctgaaggccttgccgcactgggcgcacgcatgaggcttctcgcccgtgtgcacgcgccggtgctccgccaggtaggagcccatgacgaaagcctggccgcactcggcgcactcgaagggccgctcaccagtgtgcgtgcgctggtgctgcaggagctgcgagctctcgcggaaagcctttccgcactcggcgcaggggaagggcttctcgctgctgtgcgtgcgccggtgctgccgcagccccgccacacgcacgaaggccttgccgcagtcgggacaggcgtgtggccgtgcgcccgcgtggatcttcaggtgctcggccaggttggagctctggctgaaggccttgccacagtcccggcaggcgtgcggccgc

SEQ ID NO: 271705 - DNA, 353 bp, Homo sapiens
agccactcctacctgcctctctcttccccactctcaataccctgttcccaaacccattcattcccatccctgtcaccagtcccagctccacttctgcgcctcaaccctaacccaccctctttaccaacccctttctcctcattgcctgtgtacctcagcccatctttaatgtcctctgaatctacagccccaaagagctccatcctcaacctcagccacagccctgtgtccatccccacaaagaaccgcattggccccacatacccagacacctgtgactccccaccccactgcctgctcttcaggtagaaagccctggttgaacaataaacgcatgactctccctgaatctt

SEQ ID NO: 271706 - DNA, 404 bp, Homo sapiens
caaaaatagaacttcttgtaataactggtgatcatctgtgatatgattcttatagtggctcaaagccttgcctccacaaaatatatttccaaagcagcaggtaaaattcctaccattacagaaataagttaatttggagtaaatcaattctagagtaactttaaatcatgcatgctttaatatattccagtggcacattagcagagatcaagatccaaatacaagattaattatctacactgcactccccaatctggaggtcactagccacatgtggctattcagcacttggaatttggccagttctggaaatggaaaacacacagatttcaaagacattaagatgaaaaatggtctgtaaacgatcccatttattaatatattaaagttattttagatgtatt

SEQ ID NO: 271707 - DNA, 497 bp, Homo sapiens
caatatcaagtatttcctgatgtagaataatattatttaaattttatatataaaacacattttgactccttacactataggcttcatgactgctttttagttctcacctgacattaaacttgtgggtaaaaaatacacacttctagcgatgaataaatttgatgtagtgaaaacagacaaattttttatattatgttatacctctagcataagtaacagatgttattctcttcattttacatatacggttctcttgagccttgtttcgtacagcgtacacaactttgataatagattatttgagcatttatcataaatgaagcagaaaagaatactgattttgttaactgcattttatcagaatatctcccaagagaaaagtttctaaagtttttaataggctattaaactgggggacatgaatacccattaattaacatgcattattcttgttactatgtagtaggacaatttgacgaagggcataacttaaaaaa

SEQ ID NO: 271708 - DNA, 636 bp, Homo sapiens
aaggcattttcttatttatcatttaggcatttgcagtgtaagacaaactcccttgtttgattacgcattcacctgttcattcattcattcattcaaggatttattaggaaattatttgtgctggctgtgggtacaatgatgaacaaaagcttataccctggcctcatatttatgggtgcagtagacactaatcaaatggtcacaaaatgtgtatcttatttcactgattataaaatacagatttttcacattttatcagggttcatgttataattgatgatctactatatattatagtttaattgatagcgtattttgtgattcataaaatgagttttataatagaattctataattaataaaatatagatatttacataaatttatagtgtatctatgccttttttttcttttttagagatgggatcttgctattttgcccaggctggacttgaactcccagtctccagaatagctgggactataggtgcacaccaccacacctgacagagtatctatgcttttgagtgactacgtgtgctacaagaatgatttaattgaatccttcgtttatttaacttaagagcagtcaatcttgctacattatttttgtctgagagcgaatattgtggtata

SEQ ID NO: 271709 - DNA, 399 bp, Homo sapiens
caggagatgtttcacagagccgctgaatgaacaacacagtcaattctgatcaactttccagtgctatctggggggatttgtaaactcggcgaggagagcatttgtaaaagggttaagtaccccagttttctaactgaattactacaccattaaaatgagctccgcacaacatggcagcaaataggcttctgtctgagagacagagaagggtgtatatggcttctttaccaaatcggagagctgaaaacccaagcagagtcacgtcctaggagtaggcactgaccgccacagtcacctgcccgtcctgtcaagcaacttttcccagctaacctgagttcccatcctaattctttaaagcactgaaaagtttttgaaaagaaagacacaagaaatatttct

SEQ ID NO: 271710 - DNA, 194 bp, Homo sapiens
ctgcagtaatgctgagtaataaccctaaaatgtggacaacaacccaaaacataacatggccaaaatcccttcctgcatggagctcacacactcctcatacctctgctaaatcacttgtcacattgctttaacctcttcgtgggtttcccttccccaataaacagcgagagctggtgcaaaatggaggcccagaa

SEQ ID NO: 271711 - DNA, 410 bp, Homo sapiens
tacagcagaaggtatctgctgagatcacataatttgcctcagattatgagatctaaaataaaagccttgttttgtttttgtttttttttacttttttatttccagtgactatcttccatcgctgttttttttttcatagtgtgcgcatggtcacccatcccactcgccagcgtgttgccacgtaatgctcacctagctccgtggttttaggtttctcttaagacgtcgtgtgtgttgttttgtttcttggttagatttagtagtagaatttcatcatgacattaaacctctattttcatcccatttcattttatatctaggtcgatggatttgaaaagagagttttatcaaaaatatttggataatattaataggatagaaacttttgtttcattaggctttgtgtttgt

SEQ ID NO: 271712 - DNA, 521 bp, Homo sapiens
tcagcctggaaggaatgggagtttctgcctcaagactgatcctaggttcattcccattttctcacccaacaaagtcctggcatcttggctccctgatgttgatgactgaagacacaggttgttacctgtttccattttttaggtggagtacttcttttttcttcttgaatgtttagaaagcatggtcaagttagacttatcttgcaaatgtcaatatagatcaaacaaaagattgaatatgaaaaaggatttatgatttggaggtttggtttggtgattctgttggaggaattctgatgtgaagattaagaagcttgctataggcaggatacttaatggaaggacaagaggtagatggagcaaaagaaaaaaaaaatccttaaatcccagagttaaaacaaggtggtgcttataaaaatcatacttgctttgtataaaattttatcatctataatttattaatcagtaaaactgtaggtatccttgatgccaaaaaagattaaaattctatttttcctaaa

SEQ ID NO: 271713 - DNA, 186 bp, Homo sapiens
tgtgtgtgtgtaaggggtggagtggggtgggggtgggtaagggattctactctcatctggaccttggatttaagagaacgtctctatcccctttcttgtacaaagaccttaaaaagcatccacctaacacctactccatcctcatctctctattggtgttaggaatacagagatagatctgatatc

SEQ ID NO: 271714 - DNA, 701 bp, Homo sapiens
ctcaagtgatccttctacctcagcctctcagtagctaggactataggtgtgcaccaccatgcccagttaatttttgaattttttgtagaattggggtctcattatgttgcccaggctggtcttgaactcctggtttcaagcaatacttctacctcggcctcccaaagcattgggattacaggtgtgagtcactgtgcccaaacttagaaaatatttgaataaataaatgaatgaataaaacttcttggaatgaggtaggaaagatggtgaaggatgtaaaggttgttcagtgtcaggcaggggagaaatgtttcaggagcagggaataacaggtagaactgaacaagctgtattcaaggggtccaggcaagctagctcaaaagaagacctgtgtaattcagatgtgggatagataggctggctgtgatgggaggatggttgtagcagtccttgaaagtttggctgacatagtaaaagtaaaattctttagtgctcattgagtcgttatagatacttggacaggggggctacaaattcaagctttaggaaagcttttcaaataagaatctaatctggattgagtttgtaaagccttggggcagaagaccagttagggaggtacagcagtggcccagagaagagataataaaatagtcaagggaaaattaagacacgaaatcaacagtacggcaatgacaatt

SEQ ID NO: 271715 - DNA, 509 bp, Homo sapiens
aattcataactagtaggagtgagtgtaaattgatattaaatttggagtctaatttgataatatctagtaaaatttaaaaggaaacatgaataaagatgttcactgtgtcactgattataattgtaaaaaataacccaaatatatatatcaataagtaaaaggaaactttggtgtattcactacatggaattttgtagctgttaaaagaaccggacttgggctgggcggagtggctcacgcctgtaatcccagcactttgagaggccgaggcaggtattttgcctgaggtcaggagtttgagaccagcctggccaacatggtgaaaccgcgtttctactaaaaatacaaaaattagccgggcttggtggcatgcgcctgtaatcccagctactcaggaggctgagacaggagacttgcttgagcccaggaggcggaagttgcaatgagccgagatcgcgccattgcactccagcttgggtgacagagggagactccgtctcaagaaaaga

SEQ ID NO: 271716 - DNA, 387 bp, Homo sapiens
ctcttaaacgatagtctacaagttacaataacacttaagacttctgaagtttcaatgataaatctctgtccaaaatagtaacacttaaggcaggtacagttgctcatgcctgtaatcccagcactttgggaagccgaggcgggaagatcacttgaggccaggaatttgtgacaaacctaggcaacataacaagacctcatttctaccaaaaaaaaaaaatttttttttaattagctgggcatggtggcatgtgcctatagtcccagttacccaggaggctgaggtaagaggattgcttgagcacaggagtcaaggctgcagtgagccatgatggcagcactgcactccagcctggatgacagaacaagaccctgtctcaaaaaaaaa

SEQ ID NO: 271717 - DNA, 634 bp, Homo sapiens
agattacattcttattcactctctgaaagtttattgccagtctctgagtagttacaaatgcattattaataatccttagaaaagcaatacattgttgcatggcttaagctttgctcgtgtctagaaatttggaacagttgaacctgacttcatttcactgcctcttaaaacttgatccccctgaaacaaaacctaaagaagtattgtgtttctccctctaaattcagtgaatctacttgtcatttattcagtggtatttgaaagcttaagttggcaaattagactaatattaaaaacttagatatgcctctcttccttccccatctttgagagctgttactgagtaaaggagcaaatgaaaagggatgaaactctctggtagttaagtagtgtatctaaactaagtggagtagatactgcctagttgtaaacttcagccagttgtctgttgagaaagacaggtgcaggggcttttcttttttatttttcatgcaacaacttacttagtgtataacactgagctatccctgtttggaagaagccagaggcccagaaaatttttgctaaaggaggggttgctttatgtatctcctttaaagggagatgggtaggacaggattcagatgctcctgag

SEQ ID NO: 271718 - DNA, 211 bp, Homo sapiens
gttaatgtcgtctttgaccacacacctccttttgtgggttggcgatacttttatttatgagctcgaaattctccacttagcacactattaaggtggaaattggaaggctgatatcagtggcccagattcttaacaaggtattcatgcctactaacgtacgagaacttcaggtttaggccacgtcgacgcggccgcgaatttagtagtagta

SEQ ID NO: 271719 - DNA, 126 bp, Homo sapiens
tccttgattttaaagatacctagcaggggagaaaaaaaggttggctggagaaaattaagtttcacaaaactcagaacagatagcagatagtgggagtggagatcccacattgaatgtggacattgc

SEQ ID NO: 271720 - DNA, 296 bp, Homo sapiens
ccttagtgttctaatagtttggatattttaatattccattctgtcattggcctggatcctgcttatgaatgtggcggttgttacaaggaaaacttgggactgtaatgtccgcctaaactgggaaggcgtcaagagaccaaagaataatttgggcaagtccagcttgatgaatagatgagtttactagaacttacattacatactggacattcctgagcagctctagagtcaccctgcctcccatctctaagcagcctttcagctaatgttttgtttgcctactctgtgtgcgcgat

SEQ ID NO: 271721 - DNA, 224 bp, Homo sapiens
aagaggacttgacagcaacatttgtcataaacacttcatcataaatttgcctggctattagggtggccatcagtgttagttaattgattatatacgagggaaaactaaacctcacatttcttaatgacaggagatagttttgcaacttacagtgaggtgcctacttagttacccttccactaaaatctgaagataatagcactatcttctttgactacatttca

SEQ ID NO: 271722 - DNA, 249 bp, Homo sapiens
tcttacatgcattttcttttcctagtgccttatttccctagatagaaaaagtactattgatgattttaaatacctttgagttagttaatttatgttaatttgggttttttggagaacatgtttcctgaaagtatacaagatttaacatcaaaatctatttgctaagtttactaggagaagtctgttaggttttgaaattatcatggaagtttaatagatgctgtcgatcattcacatgtttagatgctt

SEQ ID NO: 271723 - DNA, 482 bp, Homo sapiens
acagactaggaaaatcagcatgactacagcgggaggtttttggacagtttaaaaaatttttttgaaatagtattagatttacgcaaaagttgcaaaaattgtacagacagttcccatgtgcccttcccctacctgtctggtgtcagcatcctgcatggccatgggaggactgtagaattaaaaaattagtatttgcataatgctgttgactaagtggcaagctttactctgatttcaccagttttcccaacaaggtcctttttctgtttcaggatccaacccagtgcctcccattgcatccactcctcacaccaccgtctccatggcgtgacagttcctcagtttttctttgttgttcatgaccttcaccttttggaaaggtactggccagtcactttgcaaaatgttcctcaatttgtgtttgcttgatgttttctcctgattaaagtgatgcattttgggcaagaacatcataaaagcaa

SEQ ID NO: 271724 - DNA, 403 bp, Homo sapiens
ttttttttcttttgcctctagcccagttttagaaaggactatgtcttggtccttcttaatggtataaaagatatcctcagcccgccagatgctcctgcatttgagtgacgacacgcttctctggctgtgaccaacttttctccctttctttttaaatgacaggacttcttgttcaatacttgctggatatgaagatccaacccagtgcctcccattgcatccactcctcacaccaccgtctccatggcgtgacagttcctcagtttttctttgttgttcatgaccttcaccttttggaaaggtactggccagtcactttgcaaaatgttcctcaatttgtgtttgcttgatgttttctcctgattaaagtgatgcattttgggcaagaacatcataaaagcaa

SEQ ID NO: 271725 - DNA, 452 bp, Homo sapiens
aatagcctttgggggagaaaacagcattcgtttatttctgctttatattaaaataggggtagtagagggatttcttacttgaaggaaaactttatgtttgctttttgctgttaacgtttttcttaaaaaaggggtagaattagcattttaaagcatgtatctattctacaagcatgaatattgacttattttagcatgaattgctgcagtgtaattaatttactttgaaactcagctgcctttttcagccagttagggggatttgagggtggaagggtcctcttccagtaagaacttcaatattttcttgtaaaatcacccataagattgcatattgtttagttggagtatgagctggttgtctttcttaaggaaaaggaaatagaaatatccctcataagatatccaaagcaaaatcctgaaaatggatttgttgtattgtctttttacag

SEQ ID NO: 271726 - DNA, 528 bp, Homo sapiens
cgatgctaaggccactctgggagagcagggcacacgggcaggtcccagcgcaggactggaacgggactgggctctctgctgccctctgctgccgagccagggaacacccccaggacccagggcttgtgcccagctcggcaggacaggtggtgctccccggtatcagagctaaggtagaagacgccactggagggtttcactcctacttccccaatcttgcctgagtccagatattgtccctgccatttcttagctgtgtgacctggggcaagtcgctttccctctctgtgcttcagttccctcatctgtagagtgggaatgataacaggatctaactcatgagattgctgagggaattaaatggcttaatcctcccgagtatgcagcacagcgcctgtgcagcagcagtctctaaccattagctattattattatttagttagttagtatttttgaggtggaggttgcggtgagccgagatcaagccattgcactccagcctgggcaacaagagcaaaactccatctc

SEQ ID NO: 271727 - DNA, 547 bp, Homo sapiens
caggctacgtgaaatatttgtaggaaagattctcatacttatagttacttttgcaacccaaacagtgttttacttgacttctatctgatgattaagtctttccacagatgtaaggagtaacttgcttggttgcctcctttttaacaatactcctcatataaagtacttaatgtcaggtctctgactttgaagaaggaacagtgatgttaattttagtagtttatatagggaagaggaacaatcactggtagccaaacaagtacctatattatgaggaaggaaaaatacatgactactaccaggtttagagatcaatccagagatgctaatgaaagtaacccccaaaaattcaatcttcaggcaaaattatttactcacatgcattttgaattaggtagtaaggtttctatgtttgaatgactgttttttgctatttaataaaactttgtattataaattttattcagcaagtaccaaaattacaggttctgaaaatattctggatattttaatgcattaaattttagtatatgaagcattctgaaaa

SEQ ID NO: 271728 - DNA, 438 bp, Homo sapiens
tcaagtaggaaaaaagtcacaagtacttgcagacaagccaatcaaaattgaaggaaaaatagaatcagcacctagtgtaaattaacttcagaaatatgcagtcaggactgtccttgcggacttgcattctagcttctgagctgaaatttgtgtcattaaactgatatctagatgatgtacatttcttgacttactacaattcaaaaaaaatgaaacaaattacatgaacacagtggctatcatttcccccttgtgaatggcatagtaccagtctatacaattttggatgttgtctttctgttgactgttagttactttagactacaaatctcagaacatttaaataatgatttgttacattactctaaacctaattattttatattcactcacaccatcccctctgttggttctgaaataaactattcaaaggagtgc

SEQ ID NO: 271729 - DNA, 423 bp, Homo sapiens
ccagggacttttcactgctaagtttaagtaacttgattcggatctgttgtggttcccacagccttcaaatactgtggaagttttaatttaaatcttcagataaactcttaatttttgagaactccttgatttaaataaaacatgtcggctgggcgcgttggctcacacctgtaatcccagcattttgggaggccaaagcgggcggatgaggtcaagagattgagatcagcctggccaacatggtgaaaccccgtttctactaaaattacaaaaattagctgggcatggtggcacgcacctgtagtctcagctactcaggaggctgaggcaggagaattgcttgaacccggaagccagagcttgcagtgagccaagatcgtgccactgcactccagcctcgtgacagagtgagaccccatctca

SEQ ID NO: 271730 - DNA, 524 bp, Homo sapiens
acaattgtatagacttttattgtttttgagatacttttacatatagtgtctcatcaaacctcagatttctctgagagaggttttattatctctgtttaataacatacaactaatacacagactaacaggcttgcccagggtgtcacagctagcaaattgtgaggccattgcttgaacccaagtctccagacttcaagtgtaatatctatggatatcagacttctatttataggattcactaggaagtctttacctctagaaaaagtatggtaatgggggaagctttaactattttagtttcaaccttcagttcttccaccctgtcaaccctcaatttatctgtgaatggattgctttcagatgatgattttttaatttttctttcagcagcctcttcaaaatctcttctcccacctcaaacaaaacctaatatgtaattctaagaaaatgtaaaatagatcaatggtatttattattactgtcaacaatataatgtcagataaaaagtatccaaaacttttgtt

SEQ ID NO: 271731 - DNA, 220 bp, Homo sapiens
gaaggcggaggcagcacccacgccaggtgagccgtcgtttctttgcgtggatcttttaggatcgctcgtctaggccgggcgtggtggctcacgcctgtaatcccagcactttgggaggccgaggcgggcggatcacaaggtcaggagatcgagaccatcctggctaacacggtgaaaccccgtctctactaaaaatacaaaagattagcagggcgcggtg

SEQ ID NO: 271732 - DNA, 467 bp, Homo sapiens
aacatactggtaacatgtcctgcaggctttaactcctattcttttttcatgattgttccacagtcttctttcctaaggactattatcagatccatatacccatgttagttagagtaaatgttaggcttctgtaacaaataaacccaaaatataatggcttaaacttaagtttatctctctcacataaaattccaggtgagtggttcagagctggtacaccacaaaatgtcttgctcagctcctatcatcacatcttgcatccctaccatcaagatggaggagaacatgcaacttctttttaagagtctggccttgaggattgcacatatcacctctacttatatctcatgttgtcccaaacaatgacatgaacaattgtagctgcaagggaagttgggaaatagagtctttatctgagtttccatgtacacagtaaaaaaacttctgttgctatagaaaagagaaaa

SEQ ID NO: 271733 - DNA, 439 bp, Homo sapiens
tctctttaaaaagcagatgatttggcagcaaaaagccctagattcccacgtggcacccagagctggagttgcgctcagagaacataagctccctgaagacagtactttgcttttctcaccctgtggccccagcacttggcacagtccaaggcaaggagaagggttaaatgcatggttgaatgaacgaggtaggctttaaatctaatgagaatttctataagaggaagagaggacacagagactcagggagaaggcgagctgaaggcagctgcagtgactggagtgatacagctacaagccaaaggatgccgataattgcccctggaaactaagagagaccctcaggtcctccaaaaggaaccaaccctgtcaacacctcactttcaaacttccagactccacaatgatgagaataaatttctgttgttgtaaaccaaaa

SEQ ID NO: 271734 - DNA, 405 bp, Homo sapiens
tctctttaaaaagcagatgatttggcagcaaaaagccctagattcccacgtggcacccagagctggagttgcgctcagagaacataagctccctgaagacagtactttgcttttctcaccctgtggccccagcacttggcacagtccaaggcaaggagaagggttaaatgcatggttgaatgaacgaaggaagagaggacacagagactcagggagaaggcgagctgaaggcagctgcagtgactggagtgatacagctacaagccaaaggatgccgataattgcccctggaaactaagagagaccctcaggtcctccaaaaggaaccaaccctgtcaacacctcactttcaaacttccagactccacaatgatgagaataaatttctgttgttgtaaaccaaaa

SEQ ID NO: 271735 - DNA, 518 bp, Homo sapiens
ggggcctgggctgccctgatagaggcttcctcttatgggtatgtacgggtagtcgggagaaagcctgttgggaagagaatgcaggcgtcgtccagaggcaccatgtcagtgacagaaggaagcattagaggtgcatatttattgatttattttttattgtggtaaaatatttataatataaaatttaccatctcaaccattttttaagtgtacagcctacagcattaagcacattcacactgtcatccagccatcaccaccatccatctccagatttcttttcctcttcccaaaccaaaactccgtccccatcaaaaactccgaattccccttctccagccctgcacccaccattctcctttctgtctctgagtgtgcctactatagggacccatgtaggtggaatcatgcggtatttatagtcacatcgtgactggcttatttcacttagcataatgcctcagggttcatccatattgtagcatgggtcagaatttccttcctttttaggctgatac

SEQ ID NO: 271736 - DNA, 596 bp, Homo sapiens
ggggcctgggctgccctgatagaggcttcctcttatgggtatgtacgggtagtcgggagaaagcctgttgggaagagaatgcaggcgtcgtccagaggcaccatgtcagtgacagaaggaagcattagaggtgcatatttattgatttattttttattgtggtaaaatatttataaattttttataataatttataatatttataaattatatatatttatatatataaataaatttataatatttataaatattataaaatttaccatctcaaccattttttaagtgtacagcctacagcattaagcacattcacactgtcatccagccatcaccaccatccatctccagatttcttttcctcttcccaaaccaaaactccgtccccatcaaaaactccgaattccccttctccagccctgcacccaccattctcctttctgtctctgagtgtgcctactatagggacccatgtaggtggaatcatgcggtatttatagtcacatcgtgactggcttatttcacttagcataatgcctcagggttcatccatattgtagcatgggtcagaatttccttcctttttaggctgatac

SEQ ID NO: 271737 - DNA, 407 bp, Homo sapiens
cagtccctgaatgagtgtttaaacaccattgctcaacccctcgacccttatctgagtttgatacttctacatactcccaaggactgtttccacttgttaccctgactttgtgtttcctcttcgtttctgacaccatagtatttgtctttatttcaagttttgctatcgtattagaaaaagatggtagtctgaaattggagtttatgagaatttagtaaaaggtcaaagatgttaactgggaagggaaatctcagttaacaggagatgattgagtatgctggagcagttggtgacaccagtaggcttaaagggcaggagagagagtttatcagaacagggaataaatacccagacttcattctccacttcctctgtctcctgccactgtttctcattgaccgaaacca

SEQ ID NO: 271738 - DNA, 476 bp, Homo sapiens
ataggggcggcactgtaccttatggaagtggtaaataagaataaataataaattctaacacaggcaagcattcattaacaggcacttggtagaaacttctttcttaaggcacttcagccacctatttattccctgatccagtaatcccactcaagataattaatccagaaaaatcattcagaaagagaaaaaaaattatgtgtacaaacaagcttataggcgtcttattcacagctgtgaaacactagaaatgatgtgaacatagaaaaaaaattcaagtaaattatatcaaaatcttgttatactgtgtagccattaaattgataagggccacgcccgtgtagaaacataggagagtatttttaatgtaaataaagctaaaatttaaaaattgtgagtcatatgattatagtctattcaaactatgcctgtgagaatcaaaacaagaaaagaataaaaaaatagattttgttgaa

SEQ ID NO: 271739 - DNA, 315 bp, Homo sapiens
actaatgtggagcttgagaaaaatagaggcatcagaaatgatgcccagattttgacctgagctcttcagtgaatgttggtgacattttctaagatgtggaagaaatcaagaaattaaaagttattctggacatgctgaatttgagatatcaactagatactcaaatggagacatcaggaaatcagagaccaggaaacagtttggggctgaagatggaatttgggaatcttcagccataaagaccagggactgggatgaggtctcctaaagagttagtattatgaacactcacataaactgtggaccctgagtgat

SEQ ID NO: 271740 - DNA, 1189 bp, Homo sapiens
gggttcgtgatcttttcctaccactgctcttcttttccccaagaactgacaacttgaggtttcatctttcatagaagggtgcctcattgtcagaccaccacagcaatgggctttccagccagatcctatcagcaacagacaggatttcatgctgtacaatgagtcactgccatttttcttgcattattgctcccgactctttccatgcccagctgagggctgtgcgtctcagtggggcagataaggaggctgcaatatcctgttgtggccctgcccttggagataagagcctttctctccggttggcaggaggaaaatatcactgctgggtaatgagagaagtttaaacagatcagccccataggagggaactcataagactcctagcaaacagagctcctctttaaccttttgtctccttttatcaacaaatgaaacttgctgtaatttcctgtccttttctcaaaattacttttattaaaacctagaaggaaatgaacctgggtctccagagcagtggaaagttgtcatccaccaaccaaatgcctcccaggacgccccccaggtccctcaagcttctgctgcctcctcggtgcacatccctgaaaccaagtagacaggaggtgccctagggccttgggaagactgaaaagtttcccagtaggagagtcggccagactggcgcctcactgcaacagccacctttatttcggtatcaattatgaatccagccgcatggccaaatccctggccattaaggtggaccctgttcctgttcaccagtcaggtgataaaccaggacatgcatttgaaaaagaaagcaccatttatgacagctcagggaaaatgcagagtgtcctcctctgccactcttggtggtttaaacctcttattttctccttgaaaataaggtagcccctaacactgatgcatgcagccagagccggttgttcacagtttttacccaggatcttccagctacgggagcctgtagctgttaggaatacaatgaactttaaaaataaaggagctggtcggggtgcagtggctcacacctgtaatcccagtactttgggaggctgaggcaagaggacggcttaagcccaagagttcgagatcagcctgggcaacgtaatgagacacactgtctctacaaacaaaattttaaaaattagctgtgtgtggtggc

SEQ ID NO: 271741 - DNA, 439 bp, Homo sapiens
cttcaaacaacatttcattgaactcccacgactcaatgaattcatttctattgcagatgaagcctctgagaagttaggtaatttttctctaggttacagtgcaagtaagtacaagagccaggactaaaactcaggcttgttagaagtgtccaaaatccatgttcctaatgacttgtagcatgagggttcccagaagctagctctgagatggagatttgtatgcaggagatttacgaggaatgtgcttcggatcaacacctgtggaaagaatgagttggaagcaggatggggcagatgaagaagctgagcactgatgaagtcccagtgaaagcctcagctagcccccagggaactctgaagctgggatggccctttagaatcatcctgttgtgatatagaagctggaaagaggagaaacctataaaataattaagaaaca

SEQ ID NO: 271742 - DNA, 339 bp, Homo sapiens
aaaggcatagaggactttttagggtgatgtaaatattctgtgtcttgattgcaatagtggttatatgactctacgtgcttgccaaaattcaggtaactctacaatgtaagaagggctaatttcagtgtacataaattaacttcactaaatctaaccagaaatatgcattaaaatatcagtaatgtcataatcatatgcagaaaaagtaaagtatgatcaatcaaattgtttaatttttcaaaatgatccttgagggttttttattccttgctcatattaagagtatagcaccctagagatataaagcttgccctctgttgttaatcttgaaattaaaaa

SEQ ID NO: 271743 - DNA, 178 bp, Homo sapiens
ggaggggggatcttttgctacatggcaggttatatatattttttaaaagctacaatgcaagctaatgctttttaacaacaaaatgtttactagttgattatatatgtaacttgaagctgcttagtagtgctatcacttcttggttaaaacaatcacttcacatttgttcttgtcatga

SEQ ID NO: 271744 - DNA, 179 bp, Homo sapiens
tttttcttcatagcttccttctttataggactctgccctaaaaatttcagccatatcctcaacttattgaggccagttccccctccctgtacatatttgcagtccaaaaactatccccaggcagaaatcctctctctcacttgtttccctgatttcaagaatcataatcctgtactacc

SEQ ID NO: 271745 - DNA, 330 bp, Homo sapiens
gacggaatgctcatctcaagatgtgtccagttttatttatgttttgtatgttagatattttatcaataaattctagcttcacaactaagttagaaggccctttcacaccttttcatgtacatagtgcccttctgtgacgtggaggttgaatagcaattggttaagataggatagtgaggcccaagtttcacagatggaaatctggggctcaaagagattagtacctctactgatgacaggacttctcccagtcctcatgactaacagagtttctatgaacccaggaacaaatatatcattaaaacttgggcctcactatcctatcttaac

SEQ ID NO: 271746 - DNA, 1191 bp, Homo sapiens
gtaacagtaattgaatattctatttatttttgcctttgaatactaagatatataagtcaagggtggactattccttgtcataaagctgaaagtttaatttcaaactgacatctgctgccagttctgtgtttcagtattttatttatatttaaaattccaccttccctatatttgtaatatcatttttttgtggtaattgtgtctttgtgttcttcctttcagtaggtgttatttattaggctcacttttattctgcgggcaacttcagagatcccttgttcctcagaacatgctagaattccttctcttcttcagtgtcctaagtagatgatatgaatgtgcataattaactacgttctgcagttctcagctcaggaatacttttcagctcttacagatagacacttaggcgtaacagttgttacttatgagctcattttaaaagtagataaatgtctgaattttcaaagacaaagggtttcagagttcttgatagtttcttatagaggtgggtttagagcctgtgagaaagccactacttcagaatcttaacaaatagtaattgacacccagtggcaaaaatcagaatccgcttttctttcaacagcagatatttaaggcttaattgctgactgaaagtgcagttcgccctcctgcttctggagacagtgatgcccccagcccagctcactggacaatcagccagggtcaaggtgtggtccccatacccagagacgtcatcttctcctcttccgatctccacgtgtaccccagcttaccccagcttcatcttccctatgcacagaaaattaggataattctaagaattgtttttcttggaaacaatgttttcaatatggcaaagtgaaaattgtttttctaaacaagatattggctggatgtggtggcttacgcctgtggtcccagctacttgggaggctgagatgggaggatcacttgagcccaggagttggagggtgcagcgagctgttattgtgatactcctactccagcctgggtgacacagtgagaccttgtctcaaaaataataataatagtaaataaataaaaatttaaaaagttaaaaaagtaagatgttgatgccagcaaaacttattggtgatgattgaaagccaaaaatatattataaaacacacaagcagtatatcaatattatattatatataaata

SEQ ID NO: 271747 - DNA, 591 bp, Homo sapiens
taaatttagaacttgcatatccccaaatacctgaaagccataactgaactacaggataaccttcagaccttcacacttgtcacttcttcattgcactgtgatttttgttttcgtatttttttttggccccaagtacctatcatattccccagatggcttagccatcatcactggcagattatgaataatgttttacattgaacagatgtaagcaatttgtaatttttcccctttctgaaccagctttgttttgatgaatcaactggaaattgaaacttaagtagaacttctgtttgaaaaggagcaatgttttcccacattggcatatgtagtcagctcttaaatatagagaagaaacaacgaataggggaactggccagggtgtgtggcaagaaatactggaagatcattatttagcattgccatatagttccaatttctttattctatagaaccacataataataaaaaaaaaattaagttgctccaaaccaaccaaaagttcatcaggttgcctgtgtttctatccagtaagaacattcttcaaaagaactagaattctggaaatacagtaagagctggtgaaatgtt

SEQ ID NO: 271748 - DNA, 443 bp, Homo sapiens
tgtcatataagcaaattatgtggcacagaagtttggtgtatggattatttcatcacccagaaacacataaaacagtggtcttctcctctgatgtgattttactaagtattccttcactcttcagtttagaaagagctgaattactcaaagaaataaacaacaaaacattctgtacttcatcaggtcagaaaagctgacttttgagaagataaaatttgaagtaagaagatatggaataatttttcattattcatttcaaactttcaaatgtaattgtctttcaagtttcttacacttaacctgaggcactttttctgcatttttgtaattgattatgagactcgctacttgtatcttcctttctgatttgtttattctaggatacttttacaagaaaaattaatcttcagtgtttaaaaataaaatatctcaacatttgcaat

SEQ ID NO: 271749 - DNA, 482 bp, Homo sapiens
tctgcgtcgctcacgctgggagctgttcctgttcagccatcttagctccacccaccccatgagagaatattcttaaaaccaaatacgtcatagaagcattatgatacatttattgtggaagagaggggtagtttaaacttgtttcatccactgatgttcttattgtagctatgatatttcttaatctgataaaacaatacttataggcaaacgtttctcacttatgtatagatgaaagtatgatttatataaccttgccatacaatagggacccattaattactgaagtaattaatgttttttgagatgtctataatatgttgcagttggtgaagattttagaaagttttatttcggccgggtgtggtcgttcatgcctgtaatccagcacttcgggaggctgaggcgggtggatcacgaggtctggagatcaagaccatcgtggctaatatggtgaaaccctgtgtctactaaaaaaaaaa

SEQ ID NO: 271750 - DNA, 443 bp, Homo sapiens
atgaggagcggccaagtgcggtggctcacatctgtaatcccagtactttaggtggtggaagtggtaagatcgcatgaggccaggagttcaagacgagcctgagcaatatagacctcatctctacaaagtaaaaacattagttagccaggcatggtggtgtgcaccaggaggctgaagtgggaggattgcttaggtccaggagttcaaggctgcagtgagctgattgcaccactgcactccagtctgggtgacagagagaccctggcttttaaaattaattaattaaaaacaaaaagaatattaactaaaatttattgaggctgggcaaggtggctcatgcatataatcccagagctttcagaggctgatgctagaggattgtttgagctcaggagttcaagaccaacctggtcgacatagcaagatcctgtctacagaaaaaa

SEQ ID NO: 271751 - DNA, 392 bp, Homo sapiens
tcgggttcaagcgattcttctgcctcagcctcccaagtagctgggactacaggcatgcactaccatacctggctaattttgcatttttagtagagacagagtttcaccgtgttgatcaggctggtcttgaattcctaacctcaggtgatccaccctcctcggcctcccaaagtgctgggattacaggcatgagccaccgcgcctggcctgcccttctactcttaaggcaggtaggtgggcagatgtcattgtgggagtgtggtatacacaatgtcttctctagacttaaaaaaaattctctttggctccctggataaactttgatttctctagatttagtcattctgtttattcctattggtccttctctttcaatcactaattttgggaaa

SEQ ID NO: 271752 - DNA, 335 bp, Homo sapiens
tcaaaataataatgatatatattttttctatttgaaggttgttaaagatggctaagtgcgatggctcacgcctgtaatcccagcgctttgggaggtcaaggcaggagaattgcttgaggctaggagttcaagaccagcctagacaatatagacagcctctgtacaaaaaatttaaaaattagctgggcatggtggcatgcagctctagtcctagctattcaggaggccgaggcaggaggatcacttgagcccagaaatccaggtcaaggctgcatacgattgtgccactacactccagcctggcctgggtgatggagtgagaccctgtcttgaaa

SEQ ID NO: 271753 - DNA, 306 bp, Homo sapiens
agatggagttggtcagaattttctcttacaatttttgcaaaggcagttttatatatattggttttcatccatggctcctggctcttaactctcgtagctcttgttacagtcttttgttataatgttgggtgtgttgggccccaagggcaggcctcaggaaacagaatctgtctcctgccctcatttcacctgccccagggcatgactgtaatcttcctgtgaaaagtaaagtagaggtttctcttcaaagactttcttccctgtctaattaggaataaatagtaacttctcttagaagcaaaattt

SEQ ID NO: 271754 - DNA, 437 bp, Homo sapiens
tatattcatacacatatcttctggttagttgaaatgatttctttttgagaaaggcttagaaaggagatttctgtgattaatgtttgaaaaccatggctagaacagcatggtttagggcagaggagcccatcaataaggaaaggccctcctttcagcttcatctcgtctctccaccaacgtgtgacctcaactaattatttagctttttcaacttcagtgttcttcttattaaagtgggtgcagacacaactctctaataggaatgttattaggacagtttataaataaaatatttggtttagtgtcaatatatggtaagtgcccaattgattatgttcaatgttttctttatggttcttaaaatatttctttccaaaactgttatggcattttcctctcccactatccccctgaaatatatctctttttaaaatatt

SEQ ID NO: 271755 - DNA, 581 bp, Homo sapiens
gtaccttttcagttacatttgttatatatgagtgtatgtctgtgatctatacttatgtgaattcaataaaagattatacccttctttaatgggattaatgtttttagtgcattttatgcttctaaaagtattcatatatagttatatgcatctttctgacaagaaaattccttaaatgtagtttttgtacaaaatatatttaaaggatgtgctttgagagctgggttcagtggctcgtgcctgtagtcccaggtatttgggaagatgagactggaagattgtctgagctcaggggtttgaggccagcttgggcagcatagcaaggctctgtctctcaagaaaaaaacaaaaacaaaaagaaaatatgtgctttggatatctgcaatgtgaaaacttgtagagaacatttttcaggacctgagatgtctcctccacacagtagggatcagatttactccaacaggacttcacagtttagtaatagcttttttaaagctctgttaatctgaaaccacatttctgtatatctgaagtctgcccagttttggaacagtttgtgaaataaaaagtgttaactcagt

SEQ ID NO: 271756 - DNA, 335 bp, Homo sapiens
gatgtttgagtacagatgatggattggaggatgtgaggctgaggcaggtagataaagcatggaatattgcagcagaatggctagcagaatggctaatatcatgtaaatgataagggaataaaacaaagcaaggtcaatgggttggaggaaaggtaagtatttaggagatatacccagctaatggtaatcatcaccctgaaaatattgtctctagttttttgttacaatatttagtattatttctaaaagcttagctatcatcagttttcattctaagcctttccccacaatatcaaaataaatatcaaaatcaaataaaaagtatcagaatatca

SEQ ID NO: 271757 - DNA, 563 bp, Homo sapiens
acaggtgaccaccgactgcagactgtattaactgaaactggccacagcaatgtttcctatgtgcttttccagaatcctgccacttttcatcaagagctgaagtctattccccttccttctcaacctaggtgagactttgtgactatctccaacctgtagaatgaggtagaaataatgctgcataacttcagagactatgtcataaaaggccgtatggtttctgcctggttctttttctcttgtgacacttgcccttggagactctgcccactgtgctgtgaggaagcctaaactagcacacatggaaaaggccacatggaggagcccacctggagaggaactgaggcatccttggataatggccagcatcatctggctgagccagacatgtgcgaacaagccttcagaacctaagtttaggtatttccagtgcctagacttgaagctttcagctgaggcagcagacactgtagagcagagccaagccatttccactgtgccctgttcaaattcttggccacagaatgtataagcagaataaatgactgttttacccataaagg

SEQ ID NO: 271758 - DNA, 1510 bp, Homo sapiens
gtgctttgttaaacagatgcttgaaggcagcatgctcgttaagagtcatcaccactccctaatctcaagtacccagggacacaaacactgcggaaggctgcagggtcctctgcctaggaaaaccagagacccttgttcacatgtttatctgctgaccttccctccactattgtcctatgaccctgccaaatccccctctccaaaaaacacccaagaatgatcaataaatactaaaaaaaaaaaaaacaaaaaaacaaccatagtcttttaggctaagtgttggaagatagtaatagatttccggctggtgtgactaaataaatcttactttactaacgtaagtccaagataactattcaagctcatcactctcactgtcccttcacgtggtcatcgtgcccacctacgaggtatccaaagccaaaagcccatccccatttagaacctttttggctcccatgactctcttttccatttggcttgtctattaccctggctattatttacacactaaagttcattctttgagttcatgagagaacagtttctggggtctttaaattttaagagaggaacttatgatattctgctcaactataaggatacacacaactaataaacgtgaaaggtcccctccctttcttaaaaagattgtgcttactatttttatctgataaagaggatcactctataaatatattatttgtctcaaattatgactcacctctggataaagatggaagcattttactgcattaattccaagaggatttcagtaagcctgtcattcattatcgtccccagtccttccaaaaatgaaggtgcttcaatattggtctcgaagtaggaataaaagtccctttaaaaaaaaaaaaaaaaaaagaaggcacatgttgtcaatgtaattaaaactttaaaatatttatttttatcacttctttagaacatttttttctgaaaaaaaaggtcaataataagacttcctaattacgcctcgctattttgcattcttggactttaaaaagcacgtattttcaggtgatcactgtactattctttcaagttttctataggctttcaaactaaagagttggagggatggtcgaatgatttaaagagtttctctaataatgtcttaaaatgtgtagacagtatatgttcaattttcccaaatctggttttatcccccacatttgagatgcttgaaggttgacatctgattaattctgtcataaacagggatgccttcatgcctctgtacaactttgcatatagaaaattacttctttttttcccatgctcttaggaaataaaatataatgaccataagcatcatgagcaaggaatccagtgcttctagcttaattcatagctccatctaatcctctgtgctaagtgaaagctcaatgttgattgactattgttgctcacaaatactatgtactaaaaagcagattattttagtgtcttacacttcagcatataaaataaaggcttcattaggatagta

SEQ ID NO: 271759 - DNA, 1105 bp, Homo sapiens
ggatcgacccatgactctcttttccatttggcttgtctattactatcttccaacacttagcctaaaagactatggttgtctattaccctggctattatttacacactaaagttcattctttgagttcatgagagaacagtttctggggtctttaaattttaagagaggaacttatgatattctgctcaactataaggatacacacaactaataaacgtgaaaggtcccctccctttcttaaaaagattgtgcttactatttttatctgataaagaggatcactctataaatatattatttgtctcaaattatgactcacctctggataaagatggaagcattttactgcattaattccaagaggatttcagtaagcctgtcattcattatcgtccccagtccttccaaaaatgaaggtgcttcaatattggtctcgaagtaggaataaaagtccctttaaaaaaaaaaaaaaaaaaagaaggcacatgttgtcaatgtaattaaaactttaaaatatttatttttatcacttctttagaacatttttttctgaaaaaaaaggtcaataataagacttcctaattacgcctcgctattttgcattcttggactttaaaaagcacgtattttcaggtgatcactgtactattctttcaagttttctataggctttcaaactaaagagttggagggatggtcgaatgatttaaagagtttctctaataatgtcttaaaatgtgtagacagtatatgttcaattttcccaaatctggttttatcccccacatttgagatgcttgaaggttgacatctgattaattctgtcataaacagggatgccttcatgcctctgtacaactttgcatatagaaaattacttctttttttcccatgctcttaggaaataaaatataatgaccataagcatcatgagcaaggaatccagtgcttctagcttaattcatagctccatctaatcctctgtgctaagtgaaagctcaatgttgattgactattgttgctcacaaatactatgtactaaaaagcagattattttagtgtcttacacttcagcatataaaataaaggcttcattaggatagta

SEQ ID NO: 271760 - DNA, 419 bp, Homo sapiens
tacacccacacaagaacttgcagcttcccagcctagcctaacaattggtgctgttctcttatgcagagactctttcataatatttttctagctcttgatttaaagatatgaagtcaagatcaaaagaagcattattctgctgagcactgccatattccttgggctcagccacgcctacctcttcacagggcctttcttatttccttaacccacactcattgccctagtgcagtgattctgcaaggcctctactgaggttcctgcttttagcatcttttataggtttccattacttcagggaaaaccgtcccatgactgctctccacctgcccttcccagtccaccacatcacacagatgtggagtgatcattttctttccttagtcattaaagcttgcggtaaaccaaaaggtatctaa

SEQ ID NO: 271761 - DNA, 513 bp, Homo sapiens
actgcactccagtcgacctccagcctcctttctgctcccaaagtatttttttggtttgatttcttatttttttgtgtatcactaaccctctctgttattttgtgggcttcatgaaggcaggggtcttgactattttatttaccaacaaatactcaacacttagtccagtgcctgtcacacagtaggtgactgatagatgtcattgaatgaatgagccctctctgtggatagtaaataaactaggaggtacatagacgatttactgtagacagcttctgatttcagaatgtggggtgcctcttagggcctgtctcttcctttggaaggggagtatcatgtatggaaggctttcttctctgcattggggttcttcagatgtcctcaaccactgcagtaaaggctggtggctggtgtggacgacttggttctaggaggttccttaaggtgtaagtgcttcgctaaggagctacagaaacatgcattatctgggactatttatggggctggttattt

SEQ ID NO: 271762 - DNA, 508 bp, Homo sapiens
caattccagagatgccccggcaatccatttttccgatgacaagtgaggtttagcatctccttgtgggggtgtcagcctttccgtctcttttctgtggcttgccagtttgtgtttttgtctagtactgggtaggagttccaacaagcagaagggctgagtgggcaatgacaggatctcaggggagaacctcccgctggcagaaagatgcatccacatccagaggtccaggaagggctttcttgcaaaagtgaccaggccttttttcatcatcttcactgaggccagaatttactgggaattgtttgaactgctgcctaaggatgtgtattaggttcctgatgataaaagacaggaatactctgcaattattcccagggaaaactacagacctccttccatgagccccactagatcctgaggccacgcagcagggccaggacagggcaggccatgaaggttaacccgaaaaggttttagaaaccctccagacactcacatcctgtgttta

SEQ ID NO: 271763 - DNA, 604 bp, Homo sapiens
gtattactattccagaaagaaaggacaaatgggatgtgaagaactaaagtgacatagttaaaaatttaaccaaatttaagtgcttcctaaaatttggtgaatgtcttattttttaaaatgataataccaataaggaatgttggcacataattcccatttcattataaaacctctttaatagaatagaatcaaataattggaaatggcctatagattaaaaagctgagaaagtatatggtaggtagcaaactccccagaagtatgaactctggattagacatctcagaatacatgagcactcatgttggcttgctttgtagctatgaacttaccctgtattattgaaatgtcagcataatgactggaaggtgaaattggtccattttagagcattactattatgctatctgtccatttaaattaataattgcattaaattcattttagaaggtgctattacattagtagtaagaaagtaaattcatatataaatatttgattatcagatggtttacttacagatacttattttcctgtaaaataggagagtttacctgaagaaaaataaaacttttaacttttctgggaaaatcaaaaaacttat

SEQ ID NO: 271764 - DNA, 458 bp, Homo sapiens
cactgaagtcttctttgttaattgttgagggtgagggaatagggtgtgtaatttttccacagtcagttatatacacacacatgtctataaatgtatttacatatatttcctaggcctaaccagtgagaaggtcttggtgcagcaacaccacattagccaagagaacacctaacacctagctctaaacacctttctccatgaaaaggaaccagggcgctttagagaaatggctgattttagggttgggccagagaaagtatagtatgagactggaacatcttgtgctagaaagtgtggaaatgctcaagaaatggtggagacagttcaaaaggacaaagcaatcagcttgaaagggctcctgttggccaaatctgggacaatttgaacatcaaaataaatcacagtagcaggagattatatcccatgggttaaaatggaatctatgagtccacactttc

SEQ ID NO: 271765 - DNA, 617 bp, Homo sapiens
atcaacaattaccaacatttttgcaaatatagttatctatcttacccttcccctactgatttttggagggaggagtattttaaaacaaattccaataaattggacacatttctagaagtttacaatttttcaaaatggactcaagaagatacagagaatctaaatagacctatataataaggaaataaattagtaattaaaaatctccccatcaaagaaaaaagaccaggccatttggcttctctggtgagttttatcaaatatttaaagaagaaatgataccaatattccacaagctcttctagaaaatagagaaggatggaacacttcccaactcctatgaggccagtatcaccctgataccaaagccaaacacaaggttatacatcattatgaatgcaaaagtcctcaacaaaatattagaggactgatttaaacaatatagcaaagagattatgcaccataaccaaatgggatttatcttaggaaagcaaggttggtttaagatctatcggccaagctcatgcctatgaccccagcactttgggaggctgaggtgggtggatcaccggaggtcaaggagttcaagaccagcctgaccaatatggtgaaacccc

SEQ ID NO: 271766 - DNA, 356 bp, Homo sapiens
ttagttttatggtacgtttgtcattccagcttgttaggcatgagtgtgttgttactgacagagcccctggaggacaggcagacactgtggttctccatggtctctcagtaccaggcacagagcaagcacccaatacatattataggaataaatgatctcaaatcttcacagtgcctcttatagatggcttttatgatatatatctgcagagaaactgaattcagggattttaagtgccttttttgcaaggcccttaaagtttgggaaagtaggtgcatggaattagaactcagattatcctgacttctaagatcacactcttcattgtagcacactgccttcttgccaaaaaaaaa

SEQ ID NO: 271767 - DNA, 458 bp, Homo sapiens
tggttctctgcagggaccactttggccagccttaggacaggaacactgacagaacactggtgccaggcccatgcacgggcacagaagcagaggaagctgccatgtgtggagggtgtacaaacagccaggaagaagccagtcctgctgcctggacagcatggttgggcagctggggacagggtcatgagatggcacaggaaaggtaagtcctacttgggtcctggctgtgacactggccttggcaccaacgaggtcatgtccaccatggggttcctcaacttgctccctctgtaggggtttaaaacaaggtccccatttcttaggtgataaaaccaaagccttcagaggagcagtttgctgagcaattactgacttgggtcccggaactcaagcctcagctctttgactcccaatccagcaagcctttgtgaataaaaaaatgttgcttttctctagtt

SEQ ID NO: 271768 - DNA, 436 bp, Homo sapiens
tttttttttttcttggtcagtgtagctaaagttttgtcaattttttgacctttttgaagaactaacttttgggtttgttgattttttttttctactttttttcctcccccatttcatttatttctattcacctttattactttctttctctttcgtgtgtgtgtgtgtgtgtgtttgtgtgtgtgtgtgtgtgtgtgtttgaggcagagtctcgctctgttgcccaggctggagtgtagtggcatgatcttggctcactgaagcctccacctcccgggttccagcaattttcctgcctcagcctcccaggtagctgggattacaggcatgcgccaccacgcctggcaaatttttgtatttttagtagagatggggtttcaccatgttggccaggctggtctggaactcctgacttcatgtgatgcacccgcctcag

SEQ ID NO: 271769 - DNA, 264 bp, Homo sapiens
agttaaatagggagaatgagttaagaatacaaatgtctgtaatttgaagttctatgtacatgtcataggagaagaagaagaaaactttgttctgagttcaatgattcactgggtgtggtagctaatgcctataatcccagcactttgggaggctgaggtaggaggattgcttgagcccaggagttcaagaccagcctgggcaacaaagtgggactccttctctatgaaagaaaagaaaagaaaagagaaaagaaaagaaagaga

SEQ ID NO: 271770 - DNA, 414 bp, Homo sapiens
cgtttttaacccccttagtctcaagggtctgagtctctgagcctctgggctcctgggttaggtgagaagggtctttggatccttctgtttagagtctgggtctccagcacgcgcatcacgacagcccccgcgtgcgcgcggagttccactccaatcctcgaagtctgctctacgcatgcgctatctgcgccttttacactagcgaccaacccctgcagttccaccttcaattcccacccgcaaccccgcctcaaagggcagaaatcataggccctgtaatccccttaaaatcctataataatcccacaaaatcagttaatcagaatacaactacttcgcccatccagcaacctgccgggtgacagcgcgctgccatgacaacagtacacgcagctccgccgctccctgcggccg

SEQ ID NO: 271771 - DNA, 374 bp, Homo sapiens
gacagaggtctggacctgggccctgcaggtggctggaccgctgacgatgaggtccgagaggcacacaggagtaccatctaaggatgagacagaagtgatggatgtaccagttctgggagtggtttcagttggtctcttttgctgttgagaagaaaattcttatgctacccactggtctcaggaggtggatgagggatatgcagaattaagtcaccagccaagaccagccccaatcagccaaccctaagccaattcccaaaggaatgagtaagcccagccaagatcagcagaggcatccactgagcccagcctccgtcagccaaactatgacaatctgcagctcataaaaacacatgattgtttgaagccactaa

SEQ ID NO: 271772 - DNA, 458 bp, Homo sapiens
ggcggggttgcaaggcgcaagcagcctgctgaatattcatgagcctgaggctggcgtgggttattgtgttcaaagctgcggggtttcatttcctgttcctgaacaacaaatcagtgcagctagatgctcacgtccctgaaggggaggtggccctccgtgcctgagtagcctggccctagccgacctctccagtccccgcgggcgtcttcgtgccaccgagcagccccgctgatgctctcggcacctcctccccgtcggctctcctcgcctcccggctttgtccgggcacttccttggatctggtgccccctcctccatttctgacaatctcctgtttacataagacagcgcaaacatgtcactgagcttcctgaagactgggacattcctcctttgtccgccttgaattactctatacctggccccccgcaaatacacctctgccaatgaatgaccgt

SEQ ID NO: 271773 - DNA, 451 bp, Homo sapiens
ctcttggtttggttcagccaggaaaacagccaattaagtattatagaaataaacagtttaatataagaattagcgcttacatttatgtgcatgtaagcaaaaaaaatgaaagtttttttctgcctacagaaagtcagaaacacaatcacaaatgacatcagctgaaaacactgatataggagcgaaagcagtagctcatcaaggagtccaggaaacttctgtattcaccaggattatgaagtacacgcttgtgtgatgtctatgatgggcctatatctggatactagaattgctgagaagaaccttgttaaaaaaaactctgggctgggtgcagtggctcatgcctgtaatcgcagcactttgggaggccaaagcaggaagatcatgaggtcaggagatcgagaccatcctggctaacatggtgaaaccctgtctctactaaaaaaaaaaa

SEQ ID NO: 271774 - DNA, 125 bp, Homo sapiens
gacattactgtaattgttttcttgagccatgataacctatattaaataatctggagcaacattttattcctgattatttaaacaaggaccagtttttcctactgacttgcatctttttagacagg

SEQ ID NO: 271775 - DNA, 426 bp, Homo sapiens
acctattgaatctcaaattctggggcttaaacaagcacattccaaattaagaaccaatgacctaagggaatgtctggttacctcctagttatacaagcaaaatctgcatagtatgtagtcttttttatttatttatttattttttttgaggcggagtctcgctctgtcacccaggctggagtgcagtggcgcgatgtcggctcactgcaagctccgcctcctgggttcacgccattctcctgcctcagcctccccagcagctgggactacaggcacacatcgccacacccggctaatttttagtatttttagtagagacggggtttcaccgtgttagccaggatggtctctatctcctgaccttgtgatccgcccccctccacctcccaaagtgctgggattacaggcgtgagccaccgtgtccgg

SEQ ID NO: 271776 - DNA, 304 bp, Homo sapiens
atttgtttctttttgagacagggtctcacttttcacccaggctggagtacggtggggaaaacagctcactgtagcctgggctcaagctatcctcccacctctgccttctgagtagctgggattacaggtgcacactaccatgcctggctaatttttgtattttttgtagaaatggggtcttgctatggagtgggagtgttgtattttttatatttaattaaaaaaaaacagagatagggtctcacttgagctcaggagtgtgaggctgtagtgagccatgggcgtaccactttcaaaaagcgag

SEQ ID NO: 271777 - DNA, 421 bp, Homo sapiens
tctccccaccctgatgcacccctattcctatttaaatgacatcactgcttctgggaactgcagtggatggccacagttgttgactaaactcttcatttctttacaccaaactgcccaaacctcatttccagcaggaggctcaaaccagggtagttctccagcaaaagtagggaggaaagtgtcacctttctcaaagctaagatttttccttattaaatgggagatcccagagtacgcacgttagagctgaatcgctgagtgtgtctgcagagagaaaggaaaacaccgtgagcctcagaccatgctgtgtcctgtgttcatgggtcttttcttcacttggtgacattagaaaactggttgggagatagtgctcgaggcaatggcccccaaataaagcctagaagacacttgaggaaatgta

SEQ ID NO: 271778 - DNA, 1041 bp, Homo sapiens
catgttttctttttatggttatatttttttaaactaatctctctgagatacatgctgaagtgttataggccttgaaagctaatcaaggaacttataatttctgaccaactggatttaagaattgctatgaatctttggcctttgtcactctcattcccttcttttttgaatagaaacttttacacctgttatatgtattttcctgtcctactattttattagatgtggggggccaataacttttcttttttgtttcacaggttagcagatcaaaagtaactgtactcgaggagctggactgaagaattacttccaaaaagcctcacccatatctggacatgatgcagaagatgaaattctagactttgagatgatgctatgatgatgatgtgagacctctgaggaccttgcaagaaaatgactgtattttgcatgtgggaattatttgagtcattaggggctggagggcaatctaaggttaactttaagatggcccaattgatcccctcctcctggaattcatggccttgtgaaaccccctccctttgagtttgggctggcctggtgacttgcttccaaccaacagaataccacaaggtgatgggatgtcacttccatgattaagttctaagctgttgtggcttttgtcttgctagcagactttctgcatcatattctcagtttccatgctttgatgaagttagcagttcattggacaagcccatatcatgatgagctgagggtggcttccagacaacggctagcaaagaactgaggccctcaacccaacaccctcaacaaatggagttttgccagcaacactagggagcacggaagcagagccttctctagttgagctttcagatgagccagccctcgttgatgacggtagacctgtgagagcttctgaagcaaagaatctgcctgagccatgcctggactcttgacccacacaaaccataaaacaacgaatgtgtgctattttaagctgttagtttgtggtcgttatgtatcactaaataattaaaacatgcagtaact

SEQ ID NO: 271779 - DNA, 270 bp, Homo sapiens
tagagaaaatggatacattcctagccacatacaacctaccaacattgaaccaagaagaaatagaaaacatgaacagaacaataaatagtaatgatccctcaacaaaaactcaggaccagatggctttactgccaaatcctatcaaatttataaaggagaattaacgtcagttcttctgaaactatttcaaaaaatgaaagaagagagaattctttctaactcattctaccagacccaaattattccaatattaaaaccagacaagggcac

SEQ ID NO: 271780 - DNA, 239 bp, Homo sapiens
gaggtggtgatgatgatgatgatgatgatgatggtgacggtgatgatgacaaggacaataatgagctcagccagacacagcggctgcttgacgttcaccctggcaccacatgggaggcctttcttcacagtgagcttcgtggtgatgagcacagcacagcccagcgtagtgtaggatttattttaggtgcagcgtggggtagagataaaaagactacctgggttccaaatctgggtcca

SEQ ID NO: 271781 - DNA, 226 bp, Homo sapiens
gtgaacagcaagtttggcctggtttccttaggtccctctgggcccatttcttttctttcatcatctttcctaaagctgatatgacaattccatggggaagaaacaaatagtacacttggatgaactttgcgaaacacaaagacctttcctcttatccctgattctaaagggatttttctgtatttaataagtaaataaatgagaacagttttagactgaatagtaa

SEQ ID NO: 271782 - DNA, 291 bp, Homo sapiens
ttcttttttccccgttttaaaaatgaatttggttcatttgctttctgcttctggatttgcctgttctggacatttcatataaatggaatcatataatacatggacttttgtgactggcttctttggcttgtttcacttagtgtaatgttttcaaggctcatccataccacagcatgcagcagtgctttattcctttttatggctgaatattattccattggatagagatacaatattttgtttatccaataataaattgggcacttagattgttttcacatttggtcgacg

SEQ ID NO: 271783 - DNA, 320 bp, Homo sapiens
gtcaggaggaagagatatggtagcttggactaatctggtagctgaaaaaaattacaaaatgaatgactgaatttagggtgacctaaatcactccctgccaaggagggggagttccagacagagtccaaacgtagaagaggagggtgctaagaaaagggtgcagtttctacgtgagatcccctactgtccaaaggcaccaaggaggcttctgagatagagtcagaggtctaaggtgcctcttatctgagccactgaattgacctccccgagggagcagcactcctgtcatggcccatgtgaatggcagctctggtgctgtg

SEQ ID NO: 271784 - DNA, 327 bp, Homo sapiens
gagttcaaaacacctaccctgcctttctgaggatcatgagacagactatatcaaagtgccccaaagcacatttgtaaaatacttaacaagaataaataagactgggttaaatgtatacatcaacttgggagagaactgccatctttataatactgaacctttcaatctacacaaatgatatattattctatttggttatttaatttttgccaaaaatattttgtgtatttcagatgtacatctctacgttatctctccttagatttcctaagtatttgatgttttgatgttattttaaataatatcatttcataaattccatttcct

SEQ ID NO: 271785 - DNA, 157 bp, Homo sapiens
ctaagactacatgtgtactactatagttagggagttggcaaccttctcagttttgtgctaatcccaaacaagattttttttatccctagcgcgcgatataccttatattttgatgccaatcaatctttgttgttgtatgaggtgtgatagatggaag

SEQ ID NO: 271786 - DNA, 468 bp, Homo sapiens
agagtactcatgcagaagagcaaagatatatctatggggatttaaacagcgttatttgtaatatggacaattttttaaaaaaagttaatatccatcaatagggaacagttaaaagtctagccaggcttggtggcacacagctgtagtcccagctacttgagatgctgaggcaggtcgatggcttgagcccaggagtttgaggctgtagtgcacaatgattgtgggcaggaaacaggacctcgactttggaccagattcaagactggctgaaacagggaagaggcacagaaagaacttctccgtaagacacgcccaccagcacgacagtttaccattgccatggcgacacccagacgttactgcctttttccataacaacctggaagttaccaccccttttctggaaatttctgaatagcccactctttaatttgcatgtaattaaaagtcaatataaatgtgactgca

SEQ ID NO: 271787 - DNA, 1001 bp, Homo sapiens
agcagaggagcggaaagcatggtccggggggcggcggacgcctggtaggcgctcgggccgttgttgtggggctgcgcgctggcgctgcagggcgggatgctgtacccaagagagaggccgtcgcgggagcggaagaagctggaccgcctctggagcttccgcgccgacttcttcgacaaactgtgccttggcttctaggagtagtggtatcggcgtctgctgcgagagtcgggctccaccatggacataccggttccctccagcttcaacgacgttggccaggactggcggctgcggcattttgtagaccagatgtggtacgaacgggaggtgaccttcctggagcaatggacccaggacctgcacacaagagtggtactgaggattgtcagtgcccactcctatgccatcgtgtgggtgaatggggtcgacgcgctagagcatgagggatctacctcccctttgacaccgacatcagtagcctgttccaggtggggcccctgccctcccgcctccgcatcactatcaccatcggcaacatgctcatctcctccaccctgccaccagggagcatcctcgacatggccgacacctccacgtgggtaccatcctgcttccaccgcagacacccaccttcctgtcccaccccgtggggcattacattagggtaattacattagtgtcaagatatgccataatactgagaatggaggagtctgaggccctggtccatcaactgacagcatgaacttcacgtcaagaagtgagattggtgaataagtgaagacagaaggaaaattggagatacagctggatgtatgaaccctgctctgaaaacactctttaacgcttgtacacgagagtccagcaggactgtggcccacctcaacagaagaggaactgtgtgctccgtgaggatgtcatagattctgccttaccagtatggaaatcctgaaaacaccatcaactcttcatcatcactaaattctcctttgtcacac

SEQ ID NO: 271788 - DNA, 999 bp, Homo sapiens
agcagaggagcggaaagcatggtccggggggcggcggacgcctggtaggcgctcgggccgttgttgtggggctgcgcgctggcgctgcagggcgggatgctgtacccaagagagaggccgtcgcgggagcggaagaagctggaccgcctctggagcttccgcgccgacttcttcgacaaactgtgccttggcttctaggagtagtggtatcggcgtctgctgcgagagtcgggctccaccatggacataccggttccctccagcttcaacgacgttggccaggactggcggctgcggcattttgtagaccagatgtggtacgaacgggaggtgaccttcctggagcaatggacccaggacctgcacacaagagtggtactgaggattgtcagtgcccactcctatgccatcgtgtgggtgaatggggtcgacgcgctagagcatgagggatctacctcccctttgacaccgacatcagtagcctgttccaggtggggcccctgccctcccgcctccgcatcactatcaccatcggcaacatgctcatctcctccaccctgccaccagggagcatcctcgacatggccgacacctccacgtgggtaccatcctgcttccaccgcagacacccaccttcctgtcccaccccgtggggcattacattagggtaattacattagtgtcaagatatgccataatactgagaatggaggagtctgaggccctggtccatcaactgacagcatgaacttcacgtcaagaagtgagattggtgaataagtgaagacagaaggaaaattggagatacagctggatgtatgaaccctgctctgaaaacactctttaacggtataaggattcttattaacgaattttatttcttttttatctgatcattattttattttgatttatagaggaatatatagagggggatatctatagagacacacacgtttgtgtgtgtatatataaatatatatgtatgtgtatgtgtgt

SEQ ID NO: 271789 - DNA, 1162 bp, Homo sapiens
agcagaggagcggaaagcatggtccggggggcggcggacgcctggtaggcgctcgggccgttgttgtggggctgcgcgctggcgctgcagggcgggatgctgtacccaagagagaggccgtcgcgggagcggaagaagctggaccgcctctggagcttccgcgccgacttcttcgacaaactgtgccttggcttctaggagtagtggtatcggcgtctgctgcgagagtcgggctccaccatggacataccggttccctccagcttcaacgacgttggccaggactggcggctgcggcattttgtagaccagatgtggtacgaacgggaggtgaccttcctggagcaatggacccaggacctgcacacaagagtggtactgaggattgtcagtgcccactcctatgccatcgtgtgggtgaatggggtcgacgcgctagagcatgagggatctacctcccctttgacaccgacatcagtagcctgttccaggtggggcccctgccctcccgcctccgcatcactatcaccatcggcaacatgctcatctcctccaccctgccaccagggagcatcctcgacatggccgacacctccacgtgggtaccatcctgcttccaccgcagacacccaccttcctgtcccaccccgtggggcattacattagggtaattacattagtgtcaagatatgccataatactgagaatggaggagtctgaggccctggtccatcaactgacagcatgaacttcacgtcaagaagtgagattggtgaataagtgaagacagaaggaaaattggagatacagctggatgtatgaaccctgctctgaaaacactctttaacggctggagtgcaatggcgcaatgttggctcactgcaacctctgcctcctgggttcaaatgattctcctgcctcagcgtcccgcatagctgggattacaggcacgtgccgccacacccggctaatttttgtatttttactagagacagggtttcaccatgttggccaggctggtctcaaactcctgacctcaagtggtctacccaccttggcctcccaaagttctgggattacaggtgtaagacactgagcctggcccatctggctgttcatttctatctattataatatcctttataataaaccagtaatagta

SEQ ID NO: 271790 - DNA, 175 bp, Homo sapiens
ctcaaggatgtaaaggctctgcagatttcgggaggcctgtctcccagcacctgatgggacactttttgccccactgtaaattctgggtgtatcctccactgtatgctgtcaccccaagggcaagcactgcatctgcttagtgaaggatttattgttcggaagatacattttcccc

SEQ ID NO: 271791 - DNA, 802 bp, Homo sapiens
gtatttagtagagacggggcttcaccatgttggccaggctggtctcgaactcctgacctcaggtgatccacctgccttggccttccaaagtgctgggattacaggcgtgagccactgcacctggccaaagtttttttttcttctttttttttagtattaacaactttgaccaggaaaaacaaaccctgcttttcctttacagtctctcgtcaggtcttcgccgcaaatctctctccagaggatcgtggctgaggcaccatggaatgctgctgttctactggagatgaaatttcatccaaaagaaaaagggaaaagtatccaaaagtctttctagtctccaggcatttagaaaagctttagaacaagatctgcactggcacaagaatttgagtggaaatcaccctgcccagctgtgagccccggggcgggtgagccacacacttggatctcactgcagttgtggcctctgggaagaaggctttgaatgcagattttaaacaggtactcaactcatactgagccacggctactttcaacttaacaatatgtgagaaacccatctgatcactgcagacctgctgaaatctgttacaactaatccttcaatcctcaccagaatgctggctgtcctgcctctgccatcgcgagagaagataaaagctactgggtggccacagggcagttatgtccccttctctaggttttgtgattctggcagttagaatgggtttccagacttttacaagcagaaacccttatacatgtgattatatgctgtccgtcaacatgtaaaacaggccaa

SEQ ID NO: 271792 - DNA, 124 bp, Homo sapiens
aggtgtcatgtatgtggcctagggtattggcttgtttttaaaaccttcctgtcaattatgctgcatatagaaaagtacacaaatggtaaattttcataaaccgcacttacccaaccagcgcctt

SEQ ID NO: 271793 - DNA, 1340 bp, Homo sapiens
agtctttgaaatctggcatgctttttacacttacagaaaccctcaatttggacactaagttttcattggtaatatttgatgtatttagatttcataaaatttacagataaaaagtagattcaacaatctaagttgtctaagcacacttaaaagttttccagtaactgaaacaacggtaaacctttaaacttaaaattaattaaagttaaaaattcagttcttcagttgcactagtcacatttcaagtatccagtagctcgaggttaccactcagaacagtacagctctagagtatatacaaaacttatcattcaccttatatgaaatgtttaaaaataaatactgtttccctaaaatgtttttatagtgatgttcacacagcagaattttagagtgatgaatactaaaaatcacacctaaatgtcctgttctgtatgctcagaagagaatgaatatgaaatgtgtaacatacatttttaaattaagttgagttgcatgtgttaatattcaggaaatgaaactttttaaaacaattatgggtaatcacaaactgcctcatatggcttaacaaaaattttgaagtcaattataaggcttcgatttgtgaataagggaacaatttgtaacgtgctctggcaagattacaagaaagttaatgaatatagaaatttttcaagtgatgaaggcaggcttatgtgaaaaactgagaatcccctaaatgctactgcttattgatattaaaaactttcaaaaatcttatagccatttatttttaaatgtctatgctgtgtcctgtctccaaattagttttgctgcttatatcccattgcttatctgatagatatgattacttggacttccagaccctctcttaattctaattatgaatgaatagacatcttcaactaaatattatacatttggttataagtatataattttcatttatattgacattgcttcctatacagtcaactctttgcatactaaaggtattaacccaaaaataactttttcataatcctgtgcaatacttagtcatataagcagttccttcatgaagttattggttcacaactatggaatggatggaaccatttagggaaattcctgccatgactgttttttccttcatcaaaaagaaagataatcatgatgaaataatcgattgattatttagtttggaaacatccaaacacaatcataattagaatcatttctctagaaaaatatttctgagattcgttctgacactaaaactgcaccaccaatgtggtctaaatacagaacactagcaagctgattatgtagttaattcctaagagtgcatcaatattaaa

SEQ ID NO: 271794 - DNA, 465 bp, Homo sapiens
aaaagataaggggcattaacagatttggattaatcatgttaaatgggttattactatccaaaagaaactgaggggttttttgttggtattctcacagatttacatttctgtaacatatcttcaagtagttttctaatctagctatttccttccaaagccattcatagaaatagaactctcttaccttcaggcaaaccttacataaagccagtcttgaattttctctggagcttgtaggcaatgaagagttttgctaagtgtctttatcagaacagctttctgtgttccagaagacatttggtgaagacagttaatttgttttcctttccagaggagaatgttccattaatcattctaagaagccaagctgattgctctgttacgttaaggtcacagtattcttgttaacatgacccacacaatacttctgtgtcttagaacaggggtttttttttttcttatggc

SEQ ID NO: 271795 - DNA, 342 bp, Homo sapiens
ttttagaaaacttaattatataacttcagtttacatgtcttatgctttatactttttttcctggaaacttagggtaagtactgttgttccagttttcatttttactatttaaagagtttcctgcctaaatatgtcattttttaaaaaaagctttgaaaaggtgatagagattcttgtagtactgttaattagcccacagtgcatcattcttacaaagagagatttccttatataatttgtatcagaatttatggctatataaatgtccaggctaacattggagaaagacactttaggatgtaggcatattacaataaagaaaagagtattggtgttttttaa

SEQ ID NO: 271796 - DNA, 542 bp, Homo sapiens
ccttcctctgccatcatggctccactgaagatggcctcactgtgattaatgaagaactaactgccaaattcaccggacgctttttaatccttatattataaaaatcaaacaattgtaagcattgtcaaactcttcctcctacttgaaattcctcttgctgaattctgcagtggcatacggcagtttctcaaataatattgtttaattcaacaatgtttcattataatgtttatgaaaaaaaatttgatgcccagctggggccactgtctgtgtggagtttgcaagtcctccccatgtctgtgtctgcctgtgttttctctgagtactccagtttcctcccacacatcaaagctgtgcacattaggtttgttggtgtgtctcagtggtcctagtctgaatgagtgtggatgtgggcatgagtgtgtgctgtgatgggacagcatcctggccagggtcgggtcccacttggctcctgagctgctaggacaggctccagccacccaagatcctgcactagaataaataagtaaataattatctaa

SEQ ID NO: 271797 - DNA, 719 bp, Homo sapiens
aattgttggcatttgagcgggtccttgaagaatggacaagacttaaatgtgcaaagaaaatggaagagtaggacctgagcccaaggcacagaagtgggaatgtgggtgtcatatgaagagaccttcctggatgaattgcagagtttggaaaagcgtaaataagccacatttgcctacaaagcaagcttcaatccatatgcaatgtgcagaagagttaaagtaaaaaataaaagtcctcatccccccaacaatcccattcactagaggtaactactagtaagaatttcatgtacatatttttccagaaattgtatcatactctgcatacagttctgcatcttgattttagtcacttagcagttcagtgttttaagacatctcgtatcagtacctcttgctgtaccccactgggtttttcttctgtgattgggtagttgtcaatcacagtgaatgaatatatcataattttgcattttccaattacttggttggcttcaagttttgttgattacaaaaaaaaattctgaaaacctatgcacatcctcctattcgcttatgcgaatatatctatgggatgtatttttagaaattgctctgccaaattacattttaaatttaagcattaccagttgctcatcaggagggttatatcatttttaagttctctccaacagtataggaaaatacctgtttacatgaatgcttataaacctgtattc

SEQ ID NO: 271798 - DNA, 704 bp, Homo sapiens
tattgcagaaatgacagtgtgactccaagactaggccataaaagaccttgtggcttctgccttgctctctcttgctttgctcattttgagggaagctagccactatgtcataacgacacttggtaaccatgtgtagaggctcacatggcaagaaactgaaacctgccaacaaccagcaccagtttgccagctatgtgagagaagcaccttggaagttggtcatccagccctggtcaagccttcagatggctgcaaccccatgaaagaccctgagtcagaaccacccagctaagccactctcaaattcctaccaaaagaaattatgtgagataatgtttactggtgttgcaagctgctacgtttggaggtaattgttatactgcaatagataacatgtaggtactcattaattatttgttaatgacaaatgaataaatgaatgatgaaggctgtggtttctccccttactgtgttttgcggatatttaatttccagataaacaccccgagcctaaggaacctcatgttccagctttccatataaggatagagtcttcacgaattcttgaaagataagtagggtagaaaccatctgtaagaaacatttagagggaaatcaaattgctaatctcagctgatctgggttctcaattctgccaagttaaggacaccatatatatttttgggacaaaatgcaaaataaga

SEQ ID NO: 271799 - DNA, 635 bp, Homo sapiens
ggggtttcaccatgttagccaggacggtctcgatctcctgaccttgtgatccgcccaccttggcctcccaaagtgctgggattataggcgtgagccactgcgcccggccaatattcacaatttcaaaaggactatctgggagttttagtagtctgggcaagctgattgctctaacaaacaacccttacactgagcagcttaacacaataaaactttatttctcactcatgtcacattttaatgtgggtcaatggggcactctactccatgcagtcatgcagggatccaactctaccttgtggctccaccctcctttaggttcttggatcttctccttccagccagcagatgggaaaagaaaaggagcatcccatgtagaatgttttaataggccaggtctggacgtaatgtttccaatgggtagaatttagtcccttgtccacacctaacctcaaaggagactggaaaatgcagtctagcagtgtgcccaggaagaagtgaggagcacagatgttggtgattactagtggtttctgccataggactcatttctttctttctttttctttttctttttttttttttgagatggagtttcactcttgtcacccaggctggagtgcaatggcacggtc

SEQ ID NO: 271800 - DNA, 1014 bp, Homo sapiens
gaagaccacaaccactcttcaaatacaagtgcaacaggtgtttcgaagatcatagacgtagtgaagacagacaaaaactacaagaaatctcttctgccaaattattcagtcctataagacttctgcccattcacacatagcgccagtttgctatgctatatatttagtcttcacatcatattcaatactggtggtataagttgtatatattgtttttgttttatgcgttttttgcacatttgactccacaaaagtacatttttagtgttgactttgtgtgtaagcgttgtacatatgtgtaaaacagttgaaacttcctcagtaaatgaagagatgtccttttttgtatatctgcatttgtgaaagataaaattaaagatcttagctctctgagcaactgcatatgtgatgttgatccatcgtggtttttggtagatctcatcaaaagacataggttgtagatgactgcagttgtaaagctgattgcatacaattaccacccgtagttatacgcattttaatgtatgtacgaatgaatgaatgaaacaaggtcttgctttgtcacccaggctggagtgcagtggcgtgatcatatctctctgtaacctcaaactcctgggccttaagtgaccctcctgccttagcctgttgagtagctaggactgcaggtgcttgctccaaagtccagctaatgaaaaaaactttttttttgtaggggtgggatctcactgtgttgcccagctggtcttgaactggccttaagcattccacccgtcagagcctcccaaagctctgggatctcaagcctgagccaccatgctggctgttatatgcatttatgcattttgctttttttttaacctatttctttatgaatgtagtttgtctgctcatgactgttagtctacccatgtgactgtcattattagacttgaattataccttgtatccttgcaaaaatatgcatgtgattattgcctattttattgtgtaaagtgacctatgacgtattct

SEQ ID NO: 271801 - DNA, 650 bp, Homo sapiens
ttaaatatgagcaggcatcccaggatcactggacacttatggaaagcctctaatgaaagagccctgacagccacatggaagaagacagcatgaaatgaagagagactatggacactaagcaaatacataagacatgtataactccaggaaaaacaagaagacactgtgaaaggaagagacactgtggacactaagcaaatacataagacatttataactccaggaaaacaaaaagaaaaaaaattaatactagtcacagcgtactacatagcctagttggggatagcatttacaaagtcacaatattgtaagcacataatactgatctgatgaaaattgtaatgtaactaaactgggaaagagaaagtaagcttggaaacagtgatgtgttatggagaggtaggcccatcttctgtagcagtcagaaaatagatacatcctaaatctgaaagctgagaaatggcaacgtgaatgtgtcatgtggagatatggagatgaaaaccaagagtcagctaaatgagttgagggtgcttacctctggggagtagaaatgcgggtggggaaaaggtgggttagaggtttgctcatttccccaaccagacttagatttttcaaactatgtgcaagcatgatgtttaaaaataaaccct

SEQ ID NO: 271802 - DNA, 948 bp, Homo sapiens
taccaaagtgctaggattactggcatgaattaccatgcctggcccagaatagtatattgagtgcccatttacttgccacacagtttcaatgattatcagcttgtggccagacttgtttatctctatttgcatccgctctctgactccttgattattttaatgcaagtcgcagaccataaatgatttcattcataagtatttgagtatgtggcctggctcctgcccacttctccatccccatctggtgccactgcccttctggatttcactggcacggggcaggcaggactggctgataagtgccctgtccctcccttctaggacaataacggtgtgattggactgttggagcccatgaagaagagcatggtgcctgtgcaggtgcagctggatgtacctgtggtaaaggtggcctcaggtgggtctgggggcacttgctcagggcaggagttggaggaccttgttctggggctggcctagccttgggccttacagttgtggcctgcatcccttaccttttcatccttaggaaacgaccacttggtgatgctgacagctgatggtgacctctacaccttgggctgcggggaacagggccagctaggccgtgtgcctgagttatttgccaaccgtggtggccggcaaggcctcggtaagtggccttggtacctccagcagggcaaattggcaggccacccccacagtgaaggccaaaggcaggaaggatttgctgtggtcaggcttgcatcagatgggcttgtggtgttggttaggactttggagacagactgctctggtagttttgccacctactgtctatgggactctgaacatagtttcttcatcactaagtctacctacctgtaaacctacttcattaggttgctgtgaagttaaatgagttaatgagaagaatatcaggcagatggtaagttccacgtaaatgat

SEQ ID NO: 271803 - DNA, 457 bp, Homo sapiens
ccactcccccttttggagtgtgtttttgctgggggtaagtgggcaactacagtgacggttagttgacaaaagcaaaacaaaaacaaaaacgattagatggctttctacatagaaaaagaaagactacacaggttctaaagagtgaaatggtgttcagtggcatttgttttacagcctctgaactgtaagcagaactgtcaagctcccaaggctcgtcctctctcagcaaccccgaagcccccttggctgcaagcactcagcgcccgtaacctctcctgcatgccccagccccaaggtgtccttttgcactccggaccccttggcctttgtcagaaaacgctctgcactgcactgtcccctcttgctgcacaagagtagcggccacagcaatgctcaccaggcttggttgcacacagccccctgccccaggtccaggcctacacacacatacaaaaaa

SEQ ID NO: 271804 - DNA, 752 bp, Homo sapiens
tctcccaattttcctaaattaattgttcatgtttcctacatacccttaatgtttaatatttttttattattttgtgaattttccattctgctttctttaattatacaactgggtttggacattacccttaagtctacagtaaaaattaactttttaaatttttttcttaggataaatttctagggcattattactgggttagagaacctaatcatttgtaggacttcgatgtgttggcccaggttacttttatttgtattcttatattcaagttattagcaagtttattattgtgtctctgtcatactcagagactatacttttaacttcttcctttttttttttttttttgagacaaaatttttctctgctctgtcacccctgctggagtgcaatggccccatcatggctccctgcagccttaaattcctgggcttaagcaatcctcccacgtcagcttccccagtagctgggaccacaggcaagcactgccacgtctggctaattttttaaaaattttttgtagaaacactatctctttattttgttcaagactagactgggcagtatagtgatactccatctctacaaaaaaatacattagctgggtgtggtggtacgtgcatgtagtcccagctactcaggaggctaaggcaggacgatcgcttgagcccaggagttgaaggctgcagtgagctatgaatgcaccactaccctccagcctgggtgacagagtgagactctgtctccca

SEQ ID NO: 271805 - DNA, 400 bp, Homo sapiens
tggcatgcaggagtctctgctacactttcctggaggcctcattctcattgaaaaggagttggcagaactgggctggaagtttctcaatctgatgcatcataatcagcaggtatttggcccatactatgctgagatcctaaaacacatcatccatccagctcaagcacaagaaacagatgtggagcctaactgatagtgctggaccccagctatggcaacagggactcaggagagagaggtcagcatgtttctgggaggacatcacctgtggttagtcgaacagtcagccctcttcctcgctatagccaggacacagggatgcaggggtcaagcatgtaagcaccaactggcccaatccccttcactaataaacctctgagctgcaagaaaatttcagttc

SEQ ID NO: 271806 - DNA, 251 bp, Homo sapiens
gaatcccgtttgtaatgactttcactcttggtgtcagtagttttactgcttgggacttttatttgtgaattacagttgaaagctgcatttttacctatgtcaggctttcatctggccttaccagtctttcctctgtaggatggcagtcactgttggatattacaccatcctgtccagggctagcactgtggtggtgtgctgcttatagcttgctcttgtattgtaataaaagatatctttccctgtcgtga

SEQ ID NO: 271807 - DNA, 173 bp, Homo sapiens
tccattttcctgcttgtgtgtgcgtgtgtctgtatgtacgtgcacatgcacgtgaggatgtgtttttcctgcttgtatatgtgtgtgcacacacatcagcatgtttttcctgcgtgtatatgcatgtgcatgcacatcagcatgtgtgcttttcctgcatgtgtgtacacaaa

SEQ ID NO: 271808 - DNA, 602 bp, Homo sapiens
atcctgtgcctcctgtagagcccagacactgcttgtcgaacaaagaatgcagaggaccgtagagagcagtctacagcctgagacccatcattatggcctggcacatgatgattacacagtcttttaaatttaaaaaaatgaagatgttgaatggcacagatgaattctcttcaattctctgacattatttctcagaaagaaaccaagatgaagactggagctcagattgcctaagtcttggagagaccactggagaaaatggctggtatagagagaatttttcccactaatggaaatgaatgcacatgcatcttataactgacaacagagtacttcaactcccaccatagcccagaatattgttttcttaatattattttcttggtcgttgaagaggatgcagctacctttgcgtctcaacagttctataaaggatgctggtttactgaggggaagtgccttaaaagttggcttaaaggcatctgctgactctgacctcattttgcccaggagttgggggagggaggaagcaacaggctctgaaacagtggccacagctataaaaatcaacagataaagtctttactgtgtctagtccagaa

SEQ ID NO: 271809 - DNA, 528 bp, Homo sapiens
ggtggacctatgtatctctcaataatggcttgaaagaacaacaaatgcctgctgttgctaaggacaacacagtgcaaccccacattatattgatactcgtaaaataaccaaatatcaatattctgatttatagatgaagactggagctcagattgcctaagtcttggagagaccactggagaaaatggctggtatagagagaatttttcccactaatggaaatgaatgcacatgcatcttataactgacaacagagtacttcaactcccaccatagcccagaatattgttttcttaatattattttcttggtcgttgaagaggatgcagctacctttgcgtctcaacagttctataaaggatgctggtttactgaggggaagtgccttaaaagttggcttaaaggcatctgctgactctgacctcattttgcccaggagttgggggagggaggaagcaacaggctctgaaacagtggccacagctataaaaatcaacagataaagtctttactgtgtctagtccagaa

SEQ ID NO: 271810 - DNA, 973 bp, Homo sapiens
agaccccaggcccggacctgcctcgtagttatattaaaagtctagggattaaccagcttgtgcccgtcatttggctttcaatctaatctgcaactattactaggaggcttttagatcaagttccatacccatgtgtctctggaattctacagtgagaagcaaaagtgctcaggagttaagagaagcagacgtccgaaattatctccatgcattaccaaaaaccgtgggcaccacggcacggggaaaacttaccaggtacaatgagccagtgactgttactgaatttcttaagattacacttttcccaactactgcagactgcttcagaatagaagaaggtaagtaagcagggtgattacaagcaatcctcctcggaagtgaaactcactcttctaagtttacctctgttttgaattatttcagacaactctcatgccatcaagccgacggactttcaaaaaaataaaagatgcatttctttacttgtaagtatttgtctttgcaaagggctctctgatatggtagcacagaagtttgcacattctaaggatctgatgttttgccctcttcgggtatcccggctggaaggagctatggtgaaagggcacctaaggtgaatggacagattgtagatgggtgcacacaggaaaatgtacagctcctacaatgtattctgaggaaaaaaaaacatacaaatgggggaataaaagaaggcaaagagataatggagaaacttcccagtctattcaggcctgaatccaagaagggacaagaagaagggcactggcttttcctcgaagtgaaggatgtaactgtcttacacacaatctcctcccatagatctagggcttttcagcctcagtcgttctcagggggaaaggatggggacctgcaacaactttcacttaggctgcatcaattttagttcatattaataattttcaagcacttaaaactgtagccgacactcaaa

SEQ ID NO: 271811 - DNA, 574 bp, Homo sapiens
agaccccaggcccggacctgcctcgtagttatattaaaagtctagggattaaccagcttgtgcccgtcatttggctttcaatctaatctgcaactattactaggaggcttttagatcaagttccatacccatgtgtctctggaattctacagtgagaagcaaaagtgctcaggagttaagagaagcagacgtccgaaattatctccatgcattaccaaaaaccgtgggcaccacggcacggggaaaacttaccagacaactctcatgccatcaagccgacggactttcaaaaaaataaaagatgcatttctttacttctttactaagggaattaattatctggaagaacaggaacatacatgacggctagaatatggtcttagcccaaccttaaatagaacaagctctcttcaccccaatcctgccgccagctcatttccctctctttagagactatcatgatgaagcaagtagagaatggaatctcctggaccattgtctcttgccttctttgcagaattttacatttgttctgtcagaaaaataacaataaaagatttagaatctcatttcc

SEQ ID NO: 271812 - DNA, 903 bp, Homo sapiens
ctctgactcaaaataaataaataaataaataaaagtaatgtgtcctacatcgcatggggcctgagaggacaggcaggcactcctaggaccatcatagcagcgacccagccctggtggccagtgcccctcccctcttttctaggacttttctccaagccagtccttcccctgtccccccttgtaagggctgtctggattagaagcctggccccaggggactgcatcctccaagatgctctccccagcctctgtgtgagaaggatggaggtagggaggctttcatgctgcctgccccctgaagctgaatgaccatccctgctgaatgaagtgttggggggaacccttaggtgtttggccttcaagtttgtcagctccagcagctcgtttttctggcagggcctggtatgacacatttggctgtgttctttgctctggagtggacctattgattcttatcgagctaccagctgagggggaaggggaggacaaatagtagggcagacctgggagagaagggaccctggaaaagcctggccagtggacctgccaggtgggaggcagagcacagataaagagcctgagcctggattgttcctgatctgtcacctaatggtggggagagccccacagtgctcaatgggagccagccagggggcagtcagggtggaagctggccaggggagggtcggggcctgctgaaggctgggaggcaaacgggatgcaaaataacatacaaatgaatgcccactggttttgcatacaaggcttctgggaggtaagaggttccagtcagaggggtctctcctgctttcacctttatattcccccactggattccagaactgtcaagttgggcagtattttataataaagtatgtggagtcaacaagctaaaaaaaacct

SEQ ID NO: 271813 - DNA, 451 bp, Homo sapiens
atagctggaacattttgctaagtgtgtggaagggaagagtgacagcaggaaaggaggggagcttcattctatcagtattatcaggaaattgatttaatatgcttccaagtctctttaaatagagcttcaagtttgaaagggactgaagatatggcttagaggaatccaaaacagatgccaagaaagaagtgcccatgtcccacgcccaccaagacccctctcatcaggaagggatacctagcacatcacatcagaagacatggcatctaatgacaagcgctttgggtatctacccctcagcaccacgtttcagaagtagtcaagaggtcatttttccaaagtattagggcaagctcattttttgttttccctgttcccaagaagtttaatgctaatcaaagcagaatgcctaatcagtccaagatgttctgtcaacttgaattatctattt

SEQ ID NO: 271814 - DNA, 581 bp, Homo sapiens
agtgtcagaaaccctgagggagaaggcagctgtgccgggctgaggagatgacagggtttattaggtttaaggctgtttacaaaatgggttatatatttgagaaaaaaagaacagtagaaacaagtacatactcctctaattttaagataaatattccattcaagagtcgtaatataagccaaattcacagagtggaaaaggccacactctataaagttgatacaaacattccatgaaggtgctactgtgaacaagttttcaaattggatgaatacatgatttggagcaaggttatttgatcatgtggtgagactaagaatgattcttaaaaagtggcaaaagtttccttcaaatgtttctgtcactccttatcataaagtttattttacagcagttttaggattacaaagaaattgcacaggaggcgtgagaattcccatgactccctgccctacacagcacagcctcctccactacgaccatcctgcaccgcagtcacaaatcagttacaatggaggaatctccaaggacgcttggttctttctttttctggtgatctcctaatataacaagcctaagta

SEQ ID NO: 271815 - DNA, 409 bp, Homo sapiens
agagagaagacccaaataaataaaatcagagatgaaaacgttacaactgataaccacagaaatacaaaggatcattatagaatctcatgaacaactatatgccaacaaattgaaaaacttagacgaaatgaataaattcctatatacataacctatcagaattgaaccatgaagaaataggaaacctgaacagactaatagtgagttatgagattgaagcagcaatcagaagttccccaacaaagctcaggacccaatgtcttcactactgaattctaacaaatgtgtaaaggaaagctaataccatttgtattcaaactatttcagaaaattgaggagggaatactccaaactcgttctacaaggctagcatcactctcacaccaaaaccaggcaaagccataacaaa

SEQ ID NO: 271816 - DNA, 547 bp, Homo sapiens
aaagaacctcaaggcacctcccccagaaagctggaacacagtgtcagggaagaagatgaaaaaaccttccacttctggacaaaatttccattctgatgtggattacagagggccaaagaatccaagcaagccaataaaagccccatcagcactacctcctcgactgcagcatccttcaggagtaagacaacatgcgttctctagtcattcttcagggtcacagtctcagaaattctccagtgagcacaaaaatcttagccggacaccttcacagatcataagaaaacctgatcgtgaaagagttgaggattttgatcacacaagtcgagaatctaactatttcggcctttccccagaagagcgcagagagaagcaagctatagaagaatcccgtttactctatgagattcagaacagagatgaacaggctttcccagccctttccagctcatcagtcaatcagtcagcttctcagagtagcaatccatgtgtccagagaaaatcatcacatgtaggtgatagaaaaggaagcaggcggagaatggat

SEQ ID NO: 271817 - DNA, 534 bp, Homo sapiens
aaagaacctcaaggcacctcccccagaaagctggaacacagtgtcagggaagaagatgaaaaaaccttccacttctggacaaaatttccattctgatgtggattacagagggccaaagaatccaagcaagccaataaaagccccatcagcactacctcctcgactgcagcatccttcaggagtaagacaacatgcgttctctagtcattcttcagggtcacagtctcagaaattctccagtgagcacaaaaatcttagccggacaccttcacagatcataagaaaacctgatcgtgaaagagttgaggattttgatcacacaagtcgagaatctaactatttcggcctttccccagaagagcgcagagagaagcaagctatagaagaatcccgtttactctatgagattcagaacagagatgaacaggctttcccagccctttccagctcatcagtcaatcagtcagcttctcagagtagcaatccatgtgtccagaggacactttgcatccagagctctggatgcaaagtgtc

SEQ ID NO: 271818 - DNA, 429 bp, Homo sapiens
cacttctcccactgacagtacctgctaagaattagcatccagctcaaaatgcatatctatctgctgaagtccgacatcaccatcagctccacccagaggatctcacagtaaaaccacaggaaccagagagcgatatgacatctctgctgacgtgaacacaacaggaggctctcctcccctcctctacctccccaggcagtgaccttgcaagctcatcagcacagactggtccagcgtatgggagaactggagcaaggaggctggcagctggcagggttggggtagaggggagggcagggaaaggtggaagaaggtagatacacgaggatggggaggagagcgattgcagaaagatgaaatggtgttctctctccagcaagtcaattttgaaacatcaagttaaaaaaaaaatttcttgagaaaaaaaaa

SEQ ID NO: 271819 - DNA, 511 bp, Homo sapiens
tgctaatgtgaaagtccagtctatattattgaatgaacaataacccaaaggagagctacattttattaggttaagaaaatggaaatgactttgtgcttttctcaatatgaatattaaatatatacatatatatataaatccctttcaccaatttggttatatgatcaaacttaacaaccaaccactaaaagatactgccagcacatgggcatccaaatcttaggattattttgtgaaattgtacgggacacagagaaagagaggaagaaattttcaatcaagcaaatttagcaagatttggcagactcagttgcgcagatcggttgaaatttggtcttccattattactgtatcatttactcttgtgtcatctaaggacaaccttctaactaagactctcttatgctgcaaatgattataatttaaagaccgtgagtgtataaaataagctattatatatgtatatataaaatatactctaataaatacaaaataaagagtgtatgcatta

SEQ ID NO: 271820 - DNA, 272 bp, Homo sapiens
acctcattggtaatcaggaaaatgcagagtaagaccaaagggaaagtccatttcataatcactaagttggtttaaaaaaaaaaaaaaaagcctgatccagcctgggcaacatggcaaaacccaaaattagccgggcatggtggcaggtacctgtaatccagctactcaggtggctgaggcaggagaatcgcttgaacccggaagatggaggttgcagtgggccaagatcgcaccactgcattcaagcctgagtgacagcaagactctgcctc

SEQ ID NO: 271821 - DNA, 640 bp, Homo sapiens
aagtgtcttagccacggtccttcctaggagggcctccaaatggaggtacccaggctaggaaagaagttatgggatttgcatatctagcaggaggggcagggcaagtccttgactgcaaccccctccagaaaactgcaatgcaccggcccatatcgagtatggtgtgggaggacagcttggcccttgaggccagtcaggcaaagcctggtaattgtccaatgtcaggactgaatgatcacacaggattttggtataaagccagattcaattccttttgtatgtttcttcttccctttaataaatgctttcgtggaacacgcctaaaagaaaaaaatcacacaccacaactacctctgattaaaacagggattggctacctacagctcctgtaccaaaaaggagctacggttaatcatccattgttagcactaagattggataactgttgtcacttgcctcccaccacgtggaaaagcacttactgggagccctagattgttagaaccattagtggcaagtggtgatcctatctcctgtttatgagagtcaggttagggatcctcacctcacgcactcatggagctccaaatcccatttcaaccgatttttgttgataacataaaaataaaaaagactgtaa

SEQ ID NO: 271822 - DNA, 328 bp, Homo sapiens
ccatgtacaaataaaaaaaaaactagttttgtttaaaggaggtaattttataaagtgcttagctgaataccagatgcaaagtgcaaggtaaatgttagctggtgctgtgttagtgatactcatttctgtttttttttaaaaatgtatagtatgtatatatgtacatgcacacatatatatgtacacatgtatatacatatatttcacctatattttttttaaaatataaaattaaaatttctgcataaaaatataaaataaaaaaatttctctcatatatatatatgagaggtctcttacagaattgattaaagatctcaaaagaaca

SEQ ID NO: 271823 - DNA, 395 bp, Homo sapiens
tagccttgaagagtaatagacccattttcccctgacactggaggaagacagataagcatatgtatatggttatagagtaaatgtttacgctctactcatgataatactgatgaaaagagatgtatctttaacttctctgttgatgttagaagagaagcaactccacagaagaaagacctgaagagggcaagacccaaagtatggtcacagaggtaaggtgctgaagtgggaaagaagaaatgaatgccatttcagacctgccaggcaggaactgtgtggctaaaggtgtagaaagggctattcaaataacaacaataaccagcaatagcttccacattgagcatttgttataaaatgtgctatgaaaaaaaatactagtatgtaaaactatttgt

SEQ ID NO: 271824 - DNA, 1023 bp, Homo sapiens
  misc_feature (75)..(75): n is a, c, g, or t
ctctctctctctctctctctcttaccttggacttccctattccctgcgtctcagggaatagggaagtccaaggtnagagagagagagagagagagagagagagagagagatgcagcaatattgaaattaggccaattaataaccctgcagagggttctgtgtgttcaagtgagaggaagggtcacatgtctctcactttcaatgaaaagatagaagtgattaagcttagtgagcaagatatgtcaaaaaccaaaataggcaaaagctagacctcttgtgccaaacagccaagttgtgaatgcagaggaaaagttcttaaaggaaattaaaagtgttgctccaatgaacacatgaatgttaagaaagcaaaacagcctgattgctgctatggagaaagttttagtggtctggatagatcgaagaagcaagaacaatcccttaaaccaaagcctaactttctttaatcctatgaaggctgagaaaggtgaggaagctacagaagaaaattctaaagctaacaaaggttggttcatgaaatgtaaggaaggatgccatttccgtaacgtaaagtgcaaggtgaagcagcaagggctgatgtggaagcttcagcaagatctaccaagatattgatgaaggtggctactctgaacacagatttttcaatgtagatgaaacatccgtctattggaaggagatgccatctaggattttcatagccagaaagaagtcagccacttatggtagctcacacctctcattccaggattttgggaggctgaggcaggcagatagcttgagcccaagagttcgagagcagcctgggcaacatggcaaaaaatacaaaaattagctaggcatggtgatgggaggtagctactcaggaggctgaggtgggagaatcacctgagcctggggaggttgaggctgcagtgagccatgatcatgtcactgtactccagcctgggtgaccctgagctggagtgtagtgatgtgatacagtgagagcctgtctcaaaaaaaaaa

SEQ ID NO: 271825 - DNA, 406 bp, Homo sapiens
aacaaacaccattgattagaaaatcttcctgtaatattacctccaacccttcagaattgccagaccagaccttcatctgcacagcacaggatccacttatccacaatggtcaagaggcctgtctttaagatttccagtcacattcccccgaccctgtcatacttccaaccaagctatcctcaaattatcaccagccctgtacaaaaatgtaacaataatacgagacctatacaatgcctgtaatgaaaagtggcagctggtgatactgattgatctaggggttccatgaaaatataagcagaaaactactagataggacagaaaaatcagcaggtgaagattaagctaccaactcaggaccctaccaaacttttcagaaacacaaaaccttggtgccaaattttaa

SEQ ID NO: 271826 - DNA, 489 bp, Homo sapiens
tgaagctggggctggggtctctcagtcctaggtttgggttccaggttccaggtctgagatctctcaatccaaactcaagctccaagttccggatgtgcctaggtttgggttttaggtccgaacggagtccggggtcctggaccctcaattttgggtcctcgggccggctaggggacccaccaggccgtcctcaccgcgcagcctcctcgtggcgacccccgcagccggcgcagccgcatcgcgctgcgacccagtggcacgcgcgcaggggcgcgtagcagcagaggcagggcactgccagggagagcgcggccagcgcggcccagcgcgcggcggggcgcgggtggcccggctcgcaggcgcacgggtccgagaagtcgccctcggcgtccgacaggcagtggtagagcaagctctcggcgcaccacaggcagcttagacggcgcaccaggaggcgacccgggtccggggcctctgcgcagcggccgc

SEQ ID NO: 271827 - DNA, 260 bp, Homo sapiens
actcagctgcagttttcgtaacagtagtgatctgggagaatggccagtcatctccagtcatgggctgggcctcttagagaaactcccaggctggcagctcagagatgtgtgactcctgacctgtccataaacagttgtgggaagggaactttttaaagcaggactcgtagggagaatttcttttcattgttttcttttttgctgttaacttcctttaaatagtttgattcttttcattattaaatgttttcccctgatta

SEQ ID NO: 271828 - DNA, 279 bp, Homo sapiens
atgcatagcgtcgacagaaaaatcagacattagaagcaagcccagaaatgacagatgataaattagcagataaggacattaaaacagctattataaataacttagcagatttaaagaaaaacaacataatgaggataatggaagaaaaacaaccgaataccatttctaaagaagaaaaatacaatatctgaaatgagaatttagctggataggattaatagtttaggcactgcagaagaaaaaaaaaaagtcgacgcggccgcgaatttagtggtagta

SEQ ID NO: 271829 - DNA, 496 bp, Homo sapiens
gccctgatggtcccacttaccgcacctcgccgggaagagctcgtcctgctggtcgggcctccgagcggactgggcagcaccatgctcaagcctagggttcgatccccgcctccggaagcctcagtatccatccctcccctctgcctccctcttcgcgtgcctgaatatttatacaagatacaggcgtcatcacagccgccctcggcttccagagcagctggcttcgttcataaatattataaccactcagaattcatcatcatcacagttaatgataaaattccacagtgccagaactaaaagtcatccgggttcacgaacttggtgcatttccttccagacttttaaaaagaagatatttagggaatttttttttcaagatttttccccccagtccgcttacaaagtaataccatgttcgctgtaaaaaatttggaaataatggaaatgtataaagaaggaaataaaattctgctgtatctccacccaaagatta

SEQ ID NO: 271830 - DNA, 438 bp, Homo sapiens
cattactccctacctttctttacaaactctcctcctccaggatgtattttgtaaagtcagccacagaaaatatagcagctttcaggaaggacaaatcttatggtctgaattcaattgggtgggttgatatcactgtctcacatcatgagattattttaattgtaagaatataggctggtagcggtggctcacacctgtaatccgagcactttgggaggccgaggcaggcggatcatgaggtcaggagattgagaccatcttggctgacgcggtgaaaccccgtctctactaaaaatacaaaaaattagccgggcgtggtagcgggcacctgtagtcccagctactcgggaggctgaggcaggagaatggcgtgaacccaggaggcagagcttgcagtgagccgagattgcgcctgggcaacagagcaagaccccgtct

SEQ ID NO: 271831 - DNA, 534 bp, Homo sapiens
catcacgagagaccaatatgggaaccatcatcaccacgctgtgggaaaaggactatgtggaggcaagaagaaggcgatgtgggaacaggagggaaagtgtctacatctctcccaggtaaccccagggagctgcacagagtcacatccgtgcatgtatgttacatcccctgccaggtcactgccacagccacagctcgctgttgccatttctgacccattaagtgttaacacaagctaaaatcctcactgcattctcagaacggctccacgagaaagaaactgaggctcaaagagagaaaacagcctgcctcggtcccacagagttgacggtggattcagaatcccaccagatctgtgtctgtctctaaaagcccactcaaatccagaatcttatactgcaatacttttgaaggaaagaactatttcttgtcttccctctatctgctgtagacctagcacagtttcctgaatagatgagatgctcggtaaacagctgttgaataaatgaatgtattttgtagtcataaaaaaata

SEQ ID NO: 271832 - DNA, 694 bp, Homo sapiens
tgcaatttgaaaactacaggcttaggactctgtgccaaaaatctctattttaaatgaaaatatttatataaaaatacatttattctgcttaacacaaattaaaactgacataaaattttatgataataacatgattcaagaaatgtgatgtagatttttgagaatgccaaaaatcaggtttcagaaaagctacagtatgaaatctgaaaagcaacagaaattgaaagtgaccttaaagaataaatttcctaatttttcccagtttcctatgtttataactattataaagagtttaactttctggaactgaaggagaaaacatgaaaatgtttatattgcttcttgttaagcaggtagaccaaattccgctttcagtaattcatccatacagaatttggatgactatgtataaaggaaaacttaaatcttaattattatcagtttaaattttttttgtttgttgaatgacaaaggcaataaaaataaatttgactttagctttttttctatactttcctctttttgtaattcttaaattctagtcactagtcattatgagagtattgactaaatattttcacaatctaaatattgtcacaatctaaatttctgtagtagagagagccgtagccctttgtaaaggctttcgttcgtccaaacaacacttgatccaaccaaagttccaatgtgactg

SEQ ID NO: 271833 - DNA, 440 bp, Homo sapiens
cctcaggctccacattttccctccatactttgcacctgttcagggcacagccctcatcatgcccctcaggactccacttgaggcctcttacttcagggagagaccaagaagaggggcctgaagcacttcctgcagaaaggagacccagcccctgccagaggcctgtgtggcttcttatctccttagaccggagcagttggaggctgggtcagaaaggcagaaaggaacagaaaccaacaatgggcaggaatgtcctccagctacaacctataggcgcagctacagccaacaggtgcaattttagggacatttaaaagggtcataattccataaacaaaatgcggtgtatgcacacagcctttaaaaggaaggaaattataagagatgcatgataacatggatgaacccaaaagacactctgctaagtgaaataaaccagt

SEQ ID NO: 271834 - DNA, 452 bp, Homo sapiens
ggtaatatgaaaaagttatttaaatttcatttcacgttgtccttttgaatcctcgcattaataaaatcgttttcagtggaaatatcagcagcaagaaatagaaaatactaacagcaagattttttaatgcccataagaagcagcttggaaattgacactcggttgccaggcacgttttacagctttgctctttaccatggaccagagataattttccttatggagaatttacaagtttccagatgcattatgctgaagatagccaggatccagtacaaggttggtatcccactacaaagcaagggcctgccacaaccagatgcatgtttcaacgacatcgaaagactcaccttggactcatcgctgacttgtcaaccagaactccaatatctgagtttgtcaagatctcaaaggacgtggagtgcatttgtattatcatataaagcacgtga

SEQ ID NO: 271835 - DNA, 496 bp, Homo sapiens
atgttccaagtaataaagaagaaaggtaaagatggcaacgtaattatgaccaagttctgttcagagccctcgaagatcaatttactttttttgctcttaagtacagtactttaatatgagctttagtgagcatatttatattcattttgaggcggtcatacaatgaaattaaaaatcattctccattcagtgacttttaatttagattttgcataccaattacaactctgcctctgcccccgccccccaaaaaaccctacatttcatcttaagttcatttcttgaaagtatctttgtcacaaactaaaaaactaatgatacaatactggaatttaaaaaacaagatgtaattgggccataatgacaggattattgcctggtaattttcccactattttaagctttgtgtttgacctgcatgctagttggatatttatttgtgtacatcgggttttgaggagttcatagtttttctaacagaaatcactgaatgtta

SEQ ID NO: 271836 - DNA, 553 bp, Homo sapiens
agtctatctctgtcatggttcatttatgtgtgagcatgacggactgaagcccgtattatccacagctgacaagtgtcaggccgacagttcaatcagcccttcctcgagatgatgcccagggccccgtgtttgaagtaggacaataaagcaggcaacacaatccgggcaaactgatccgatccctgtatgtaaaggggattctgcttaataacacagtgtggtttttttccctctccaaacacattagtccttaaacagtgagttggcccttaagaaaatctgtgactgacatgaaaatgctgaagttttaaggtggttggtttatccgtaacctcatggggctgcttctttgtgcagactagttttgtcaaagtcagaaaaataatgtattcagtgtctgatcatttttagggagttattcgaatgggattttaagtcagacatcctgatgttgacacagggatcattttcttgtccttttgttttacatttgtggaacagatcatttgcattggctaataaaattaaatctctgaaatgcaaaaaaaaatga

SEQ ID NO: 271837 - DNA, 551 bp, Homo sapiens
gagttctttgtgtcgacctaagaacttatcaaagaactcagcagtatgagaatagatcaatacatagagggtttcctttaagtcttgtagaaactcattactctccagtctctttttccacttatagtagagagaatcagacttgcggatatccagttaactatcaatacctttaaaaaatgtgaacaagcagtccatctgaataattataccaaatgtcaaggcttttaaaagtgcttaactttaaaggtcctttgcagttgttcagacctagattctcagttcagttagcacagagagagacaaggaaaaaatgaggaacacttttctcacgcataaatattcactggtttttgaaatactattgattccttggataagaaaataggtcaactttatagctttttgtctccaaattgatttcccgccacaaacagtggcttgtgcctataatcccagctacctgggaggctgaggtgggaggatcgcttgagcccagaaagtcaaagctgcagtgagctgtgattgtgccactgtatcccaacctcagt

SEQ ID NO: 271838 - DNA, 422 bp, Homo sapiens
gacctaagccagcagtctctggaagaaacccgggataacttttaaataccagctcaggaaatcagttgtacttaaaagagcagcttttttgaagaggggctctgttttaatgacattactgtaaaaagaatggaactgacccctaagttgctttctatttgcggtgggcaggagtgcagatttagtatgcactggcaatgtgatgtattcttagaagtcattctaaaaagtggaatttgttctctattataagacatgaacgttccagaattcattacagaatgaaatactcaggatagcatatgcaggtttcagattccttgatcaggcatctgtttacatcatgctgtcctcatttctactactttttccatttacactaccatgtataatataggtatgtacatatcaaaggaccaaaa

SEQ ID NO: 271839 - DNA, 586 bp, Homo sapiens
  misc_feature (556)..(556): n is a, c, g, or t
ggaatttatctaaggactgtgattgattttaaaaggtatgtcttcactgttttataaacaactacaaacagaaatacttacctgctgagccaaattttcacgatttggaaattggggaagggcatttttctatatatcctcatgttatttgcagtcatttgaagatctttaacttcagggaaatggaaaacttctctgaggggatctacatctttgaatgtgcttccctcgaatggtcacagccctgtggaacaggttccttttttctctaaaccatctaccacactgaccaattttaggaggtactggtgtcacatgacagtttctttatatggaacattaactaactgcaaaacagaagacaacaagaaattaatgaactactctactgtgtgacctgatggtgaatacagaaaaagtaactcggagagtactcattcaacaatatttataaataggtcctatataaaaaatctagattgctgtcatatcttacgaaagtctgtctctcaccttgcgctggtaagttacactaagctctaactgattttttttntgcggcgcaagtgagagtctccgtcgaact

SEQ ID NO: 271840 - DNA, 454 bp, Homo sapiens
ttttttttttgagacagagtctgtctctgttacccaggcgggagtgcagttgcgtgatcttggctcactgcaacctctgtctctcaggttcaagtgattcttgtgcctccgcctcccaagtagccgggagtacaggaatgagttactgcacaaggccaattattcttattttttataaaaaggaaatatagttttataaaaatacttcaagagatgaagtagtttgacatttaaaattctgaacagcaggctgggttagggtgtacaaaatttcaagcccagtctagtcactggggcatatttcttctgcttcagaagtgtcatttagtatacaaagactgcagccccaaggagtttctcacttttagattacttcacactcaaattcaagcaatgaatcaaaattatcatgtaaatattagcaccagtttatggctctagcaccttctgttcc

SEQ ID NO: 271841 - DNA, 125 bp, Homo sapiens
catacagtatatgttcagaacttattcactaattctaactgaaacttcgtactctttaactaacatctccccattatgaacagatacattatgttttcttgtacttctgagcctctacacgtgct

SEQ ID NO: 271842 - DNA, 359 bp, Homo sapiens
gaacaacagccagccatgcgcaactgcacctgagagctgttttaaattcagggatactgtccttgactttgagaaaatatcagatccctctttttcattccacgatgactttctttttttctttttttctggtgaacagggtgaaaacaaagtaacataacactgcatcaagatgcgcagcttgtgaaagaaagagccaataaatcagatgatttgctgtatctacacaaggtcaaattgcaaaacagattgacttttctccactaaaccgtccagcttgggacttataacagctgaacgcttggggagttattttcagtctttacaacagaaaataattaaaacattaaatctccaaa

SEQ ID NO: 271843 - DNA, 442 bp, Homo sapiens
gcagcctgcatccccaaatcaggagcactgggtgctgctgtgttacagtgagtgtaggagcatgccgttctgggcttcactctgcccaaatatgtcttgctcattttcaccgccatatggctgctcgtcccggtctgtttgaggttccttcctgttccctctctgcctctaagtccttcaaaaagccaactggaagtgcctcttccaggctttccttagcctttctttattcccttgaacttctattatgttaattgttcaaaagattagttctgacacttaccctatgctgctttgtattactattggaaaacaacagtagctctctcaacccattgggtggatggtacatgccatgctttatacattcccgtggccctgctgtacctggcacacacaaaaggggattaataaatatgcatatgttgaatgaaaaaaaaaa

SEQ ID NO: 271844 - DNA, 344 bp, Homo sapiens
cattagcatcccagtttactctattccgtcttctccctgtggtttatcaacttgtaggttaagcaccgccaatagttgaatctagggttgacttattcttgctacttggcaggcatttgggctactttttttttctttcatccatttttgtatagttttgataaaaactaaaaaggaaaacaaaaaagcaagttagttttgatattaagtcaaatactactaaaaaggtaaatctgcagctcctcatcatacaatttagtgaatttttaccttcacttattactttaataaggacataagttcaaaatgtgtcctttatttcaagccatattcattacaggaaa

SEQ ID NO: 271845 - DNA, 291 bp, Homo sapiens
gaatgacaactatctcaagctcattttttctagtctacggtaaatacaaggatgctgctgatgatggtaatgatgatcatgatgatgatagcagtgatggtaacctattagtctggcacttaaaatactttcacaaacattatcttatttgatcctccctacacccctttcattaagtggagcaggagagcaacaaaccatcacttcaaaataagaatatgaaaaagattgattgaaacaatcaaacatcaatttccaataaaattttaattgcctttgaggccaactaaa

SEQ ID NO: 271846 - DNA, 260 bp, Homo sapiens
gttgttgatgagatatttggaggtggggatcaatagaggggaaataaaatgatcagtactgcggcgggagaggcccatgccccaggaccagcctgacacctggatggccacaggggtggagggaacggccaagcttggctgctgccatcaggggcccgacctcctaagccctgtccagggggaacctggtccccatcagcaacaccgcacaggtccacccagcacctcgggaccaggacagcactcaccaccctcatcgg

SEQ ID NO: 271847 - DNA, 469 bp, Homo sapiens
aagacctgaggaactaaggggaggagaaaaccagaagatggaaggaacctgggtctctgaatgactgcctggagcataactcccttgccaacctgtattgtgctgggaagtggttaactcctggaagatacacagggatttcccaatgattgcaaagcaggcgtggcaaaatcacagtcttggattcagaatgggaagcccaggtttgagtcctagctctaccaccttgctgggacaaatcattccaccttagtttgtctctaaaataagaaaaatatgaactctgtctttccagactttcaaattccataaggacaggggtcatgtccatttttttaaaaattgtctccatacacctatcctagcacctggtatgttgtagccctcagtaaagatcattgagtgactgaatgatgattgtggagaccaaataaggtaatagacattaaaatgctctataaatcctgta

SEQ ID NO: 271848 - DNA, 408 bp, Homo sapiens
ggttgagtaaatcttagggatttgctgttaatggtaaattagtctacaaaaatagaaatagtccaaaggattttgagagggtgtgggctcagctgcaacccctcctcccaaggccgttggtcaacaacatctccagccctgtggaaagacagaagcagtgaagaaaatgtcagataaacatttggtatgtgtgtacacttctcccagaaatcctaaatgctttgcatgtttcagctaataattcattaaaatggatggattatgctgagcattttataacctacttcactgctctcctgtctgtctaaatccatccctttgtgacaaattttttatacgtggctcattttttctattgtgtttggtgtcttacccccatgtaaagaataaaagcgcatgttcatgttg

SEQ ID NO: 271849 - DNA, 395 bp, Homo sapiens
tttattctcaattttgcagataagaaaattgaagctcaggaaagttctccaatcttttccaaagttttgtgctagtaggtggttaaaatcagaaggaatttacacccactttttctgaggcaaaaaccagtatgctttctgctctactaggttgcctttcaagtcgttaggaaacaaatatgtttggcttaacctgaggaagccatcatggaacagaagatatttgagtaataaatgagatgttcaccaaagtggaggaaagatggaaggatactcaccctctgtataaacttctcagctcactacaactcacagaacgctctcccttctgactttcattcacttctataatgtaatacattgattcaataaatatttatcaaatacctactata

SEQ ID NO: 271850 - DNA, 465 bp, Homo sapiens
gcttgaagatttccgattcatgtacacataataaacactcaggtttgtcatctggaggtgcaaatctgaaagatattccgacaaatgaagtgctggcagagagaggaataaagagatcggtgcctgtcaggggtcaggcagcctgagattgcttctagagatcttttgaaaatttcacacgattgaaggcttaggggcttcactgcgttcgcatttcaaactcagatcagtgggatcacaatcaaaaatagaggtctggaaaattttgatgcaaagatggccacgcgcatcagggcttctctcactagctctctctctctctctctctcttttttttctttctaagacagacaccctgacatggctgtgatcctttggatgacagagttgtcagtaaagaaagagaaaattgcatcttgtctgataacttcctttcagtcaaaaggaatttagggtcttattttc

SEQ ID NO: 271851 - DNA, 594 bp, Homo sapiens
atttgggcaaaaatgtattaataatattcaatctggtgggtgaagaatgatacctttttaaaattggcattccctgttactgttccagtcaagtattattttatatgatcgtcttcttgggtgaatggcttatttattctttgcccagtcttaaattgccctatttgctgtttgtatcttttaatttagtgaataactaagagttatttatatattatggaaggattattacactttggtagatatgctgtgcatatattttctactttgccattacctgttgacttcattttataactacttgacaagtggaagttttgtatattttcttaccttgtttaggaaggctttctctatccccaagaatataaaaatacacacacgtaaatttgcatatttaatccatctggaatttttaacatggaatgtgaagtagaaatttaccatctttagaatttgcaggcattcatcctcaagcttactgtctcacagtcaaaagatggcaggtactttttcaggcctcgtaactgcattcatacaagaaggaagaagcagcagcaaaaggctgaaatgagcatgccaggagagtcttta

SEQ ID NO: 271852 - DNA, 847 bp, Homo sapiens
gggagactgaagtgtgaggaggatcgcttgagcccaggagttcaaggctgcagtgagccatgatcatgccactgcactccaggctgggtgacagagcaagaccttgtcccttaaaaaattttttttcaaagaatctaaaaggaaaaagggaagactactgagttcatgtacagctcaaagaagtggaatagggaagtttaaaagaaaagggaaaagaaaacacacacacaagaatagacactgttggcaaccctacagagtcagagtttgaaagtgagagttggaaacttgacctctgagtttgctggaggaagccagcaacatgatttagaaaggataatataatcataatggcaggaagtgagcacagtcttcttggctggagaatctcagttgcagtgtttggggcagactgactggaaatgatgctatgtcggggaccatgtttgaaagcctaaaatctgagttgacaaggagatgttccatggaggctctgggaaagagggactcgaaggcagacccccacacagcggactagtaaggtctcgctctgtcacccaggctggagtgcagtggcaccatttcggctcgctgcagcctcaacctcctgggctcaagcaatctttccacctcagcctcctgaacagctgggaccacaggtacatgccaccatgcccaggtaatttttgtactttttgtacagacagggttttaacatgttgcccacgctggtctcgaactcctgagctcaagcggtctgcctgcctcagcttcccgaagtgctggaggtgttttatggattgagtactgttcagttgtaccctatgaaagtgacccaccacaatgg

SEQ ID NO: 271853 - DNA, 3013 bp, Homo sapiens
cgggagaaagccccgcccccggcgcccgctcccactcctgattggccgggccagcccggggaggcccggcgggaccccggcccgcgtctcagctataaagatagccccggcatgacagccgcggcgaagctcttctagttcatctgctggccggctctcagtccccgtggcgccccctttcctcttgtcccagagcgctctcgactccaccatgccaaggggattcctggtgaagcgaactaaacggacaggcggcttgtaccgagttcgccttgcggagcgtgtcttccctctgctggggccccagggggcgccgcccttcttggaggaggctcccagcgcctccttgcccggcgcggagcgggcgacaccccccacccgagaggaaccaggaaaggggttgacggcggaggcggcccgggaacagtcggggtcgccatgtcgggcggctggggtgagcccggggacgggcgggcgggaaggcgcggagtggcgggcgggtggcagggaaggtcccgggcccagccccagccccagccccagtccagcgaagccggcaggcgcagagctgcgtcgggcgttcctggagcgctgcctcagctcgcccgtctccgccgagtctttccccgggggcgccgccgccgtggccgctttctcctgctccgtggcgccagcagccgcaccgaccccgggggagcagtttctgctgccgcttcgggcgccgttcccagagcccgcgcttcagccggaccctgcgcccctctcggccgcccttcagagtctgaagcgggcggccggcggcgagcgccgcggcaaggcacccacgggctgcgcgtctggacccgcggccgcgggaatcaagaagccaaaggccatgaggaagttgagctttgccgatgaggtgaccacatcccctgtcctgggcctgaagatcaaggaggaggagcccggagcgccgtcccggggcttggggggcagccgcacgccactgggggagttcatctgccagctgtgcaaggagcagtacgcagaccccttcgcgctggcccagcaccgctgctcccgcatcgtgcgcgtagagtaccgctgccctgagtgcgacaaggtgttcagctgtcctgcgaacctggcctcccatcgccgctggcataagccgcgtcctgcggctgcaaacgccgccacagtctcctccgccgacgggaagccgccttcttcgtcgtcttcgtcctcccgggactccggggccattgcatcttttctggcggagggaaaggagaacagccgaatagagcggactgcggatcagcacccgcaggccagggacagctccggggcggatcagcacccggacagcgccccgaggcagggcctccaggtggtgacgcatccagagccaccgctgcctcagggcccctacacggagggggtgttggggcgccgggtacctgtgccgggcagtaccagtggtggcaggggatccgagattttcgtgtgcccatattgccacaaaaagtttcgtcgccaagcctatctgcgcaagcacctgagcactcacgaggcgggctcggcccgtgcgctagcgccgggctttggctccgaacgcggtgccccacttgccttcgcttgcccattgtgcggagcgcacttccctacagcagatatcagggagaagcaccggctgtggcatgctgtccgcgaggagctgctcctgcccgctctggcgggggctcctcccgaaacgtcgggccctagcgggccatctgacgggagtgcccagcaaattttctcgtgcaagcactgcccgtccactttttttagctctccagggctgacccggcacatcaataagtgccacccctcagaaagccggcaagtgctgctgctgcagatgccactgcggcctggctgctgagggacgagagaccaggatgatttcgaggttggccttagaggaaacagatcatgggaatttctgtggggctttcttcaacttgcaagtttactttcattccttcctatgttttaatcccctaaaattctccctgtagtcaatgttccaccagaggagcggacagtgaaatgtaatatccctctctagagcaggtatgtatatggtataaaccttgagatcaaagactgtcagctttaaatccttctcactttccccactaaaataggatttttccccttaaaactctggagaccctaacgaatcctatatgatttgtaattcctatggaaagtcgcggtgaatgcgtgcatgtctcaatgtccacaaaggattctggctaccctttggtagccaatgttttttttgtcttgtcatcacaggcgcctatacagcttctgtctcaatagggtcagatattttgcactgtatattctgtgaattaaaagttatgtgattggtgtcaaacttaaggagattcaagacctggcagaaaatgtaagaggatttttgctgcttttggggtgcatggggatctcccctgtaaactttcctttgcccaattatatgtacatgtccattcttaagttggtgtttggaggtggggaggatgctactttactggagttgagacaccccctaaaattctcaccctcagctattttgtgggcagtattcaggaagagctacttcaaacctttctttaaatggctttttggaaatacagaagtcgtttcctcaagtttgactgttttaatggggtttcacccaaattgtttaatgcttctgctgtaaatgtcatactgtgtattcattatgaaaatatgtacagcttaaggaagatgttaacacctgtaatccactaaggaactgaatggcaatttgctcaatattcagtattttcttttcagcggcaacttgtttttgatttttttaaaaaaccatttcagtgtacattgtgtactaattccctactagccagtttgggacattggctgagcactgcctgacagaaagcccgtatttgtaagatgcttaccaccaaataaatgtacatagactgtg

SEQ ID NO: 271854 - DNA, 450 bp, Homo sapiens
ggaaaaggagggctcacaaagccacgcattaccctcgaaaagctttgcacgttgcccagggctctcagagtgtcagtctataaggaatgaggaaagactcaggcagtgctggggccacagagacagtggcagctccccttggtctgccgcagaggttggcctgcttcctcttctgggcgttaagaaaagagtggattcagggaaaggggatcaggaggaaaaaaggggtctcggagaatttaaggattagtaggtcaaacagcagaactagcagaggacattggaatcacaaagacagcagtcctttcttatctgggggatacttcccaagacccccagtggatgcctgaaacctgggttagtgcagctctcggttgccatcaatcagagcccatttctcttcatgtcttctacctacgaatgtaatgccttttccatcttcactgagca

SEQ ID NO: 271855 - DNA, 1124 bp, Homo sapiens
aggttggtcttgaactcctgagatcaaataatccagccttttgggcctcccaaagtgctgagattacagtcatgagccaatataccctgctggatctgtgcatttccaatagagtgttgttgaaatctccaactatgataatgaattcatcgatttctccttgcagttctgttaatttttgcctcacgtagttaaatactctcttgttaggtgcgtgcacatttaggtttgttatgcggaaacataacatagtttcttggaaagctaattcttataccattatgcaatgcttttcttcattcctgataaatttccttgctttgaggtttgttctgtttgaaatttgtatagcttctcctgctttcttttgtttgtgccagtatgatataatacatatatatattcatgatccatttacttttaatttgtgtgtctttatatttaaagtgcatttcctgcagacatcatatagtttaatctctgatttttaattggtgcatttagatcattgatattaaaatgattattaatataggtggattaaatatctaccatatttctttctgttttctatttgttgcctttgttctttgtttctatttttgtttttcattctcttcttttcagagactgagtctcattctgttcattaggctagagtgtggtggtataatcatagctccctgtacccttgaaatcctaggctcaagtgattctcctacctgagccctgagtacctggtattacgggcatgtgccacaaagcctggctaatttttatttaatttttgtagcgacagagtctttgctacgttgcccaggctggtcttgaacttctggcctcaaatgatcctcctgcctcagtgtctcaaagggttgggattataagtgtaagctacaacacccagccatgtcttccatttttttcctgcatttttagtttttaacttagcatttataaagttccatattttctcattcttagtatatcaattatactttaaaaatgtgattttagtggttaccctagtgtttgcaatatacactcacaactaacataagtttgctttcaaataatactataccatttcacaggtactgtgagtaccttataataaaaaaatc

SEQ ID NO: 271856 - DNA, 766 bp, Homo sapiens
gatggggagaaattattttcaacttgtctttcaggtagatgtctcatacttgaatgtaaacaggtcatactaattttaaagttgcccaatagaagaatgggcaaaggaaacaataagaagtttaccaaaatagatatatatggttcttaaacaattaaaacgataaaacatctgaattaaaagtacactgagatgcgttttttcacttatcagattgacagagaccaaaaaacttgataaagcacttgatcaggctgtgggggaaaggtctccacatacattacagataggagggtgcattggattgtaggtatcaaatgtacacccacaaaatggaatagtatgtatctacgtaaaagcataaggaagctcctttttgatttagaaatatatgaatttattacctatttgaataaataaattagtttttaaaatagttgaatggctttgctgatgtactattgaagttgactaaatttaagtagtacagcatagagaaaagacaaaaattcttaagtgtcaatcatttggttttaagagactttagagacagacacctggattcatttgctagatctggctatttatggtttgattttaaggcaagttatttaagcttttcttgcctcagttttctcttctggcagtggagtaatagtacatagttcatagtattgctgggaagattaaatgaaccatgtaaaatgtttataatagtgcctggcacatagtgaacactcaataaatgtcagctgtttttacctaa

SEQ ID NO: 271857 - DNA, 219 bp, Homo sapiens
cgggcgaggtgccgcccgcccgcgcccgctctagctctcaccctgcgcggcctaacgggcaccgcggcccagccaggggaggcggcgccggggctgtgaggggaaatgcagaagcttgtggaagccccatcccctccgctgcttagccccgcgcctccgctgcaggctctgggaacgtaacgcgagcagcggcggccctgcccccgccctgccaatgcc

SEQ ID NO: 271858 - DNA, 441 bp, Homo sapiens
gtcaggtggttaaaacactacagataggcattgttaaacaaaacaatggactaagcccctgcactaggctccaacagaacagacaaaatcaaaatggagtcactcatgctaaatgtcatataatcaaactgaaactctaaggaagctgataaatcctaaaacagacctttttttttcctgaaaacaggaaatttcagtctaccagagtcaacctagtaagaaagttgcctcttctttgacctttatgagaaagtaacctgaagtaacctgacattaatgaatcagcttctcttctactattctgtttccttactcccaccttacaaagctcactgctctgcttgccctagtgagagaactcattctattgtgtagagtagagtcagccatgattcatgaattatgaataaaagacaattagatctataactaaaaaaaaaa

SEQ ID NO: 271859 - DNA, 234 bp, Homo sapiens
agacctgggcttgaacttactggacttgccaggctgaccttcctgcatgtggtttatctgcaaagtgggggtggggggtggcggggaccatgccctcctcaccaagctggtgcaaaggaatgtcgttcagggtttttaagccacactctcattgtgctttcttggactctctgatatggttcactgcctatgaagatttttgtcctgttttacttttcactggtttattattat

SEQ ID NO: 271860 - DNA, 462 bp, Homo sapiens
aatatatatgatttacctaaatttacacagctgatttacagtggagcctaggttaaaatttgagtctctttctaccttgccatgtttatcattatgtgtttaataacataatataacctaacaaataaataatacgcttttacaaacaaattatggctgctcaccccatctgggaactgaggagtgcctctgcccggccgccaccccgtctgggaagtcgggagcacctctgcccggccaccaccccgtctgggaagtggggagcgcctctgcccggctgccccatttgggaagtggggagcgcctctgcccggccgccccatctgggaagtgaggggcacctctgcccagccgccctgtctgggaggaagtgaggagcgcctctgcccagcccccccgtctgggaggtgaggaacgtctctgcccggccgccccatctgggaattgaggagcgcctctgcc

SEQ ID NO: 271861 - DNA, 199 bp, Homo sapiens
tcccaagcctacccatgctctcctgccctgacccttctctgaccactacgatccacaccaatgctctccagaccaagagctctcaaaccttcatgtgttaaaggtcttacagattcttgggtcccacccttagagattctgactcagtaggttaggctgggctctaagaatttgcatttcaaacaagtccccagataat

SEQ ID NO: 271862 - DNA, 639 bp, Homo sapiens
attattccacctcccacaccttcccaaccctggctgtgctggccctgactgagaggagggggtttccacttccgtcacctggcaagggaacctccacagcccaagaatattaacatttatcaggtgccgggcatgggcctcatgtgttttatgtaattcaatcctcccaacaaaagtatgagagccagccctgcagcacagccttcaacatgagcaactcctgctctctgtagctccagccccagcctggacctatctttcagagccataatgctgagacagtccctgagtcttggatgaacacaggactcacagtgtctacaccggacagtttctgtttgcacgacgttgagtaaacttcacatccatcggggaagttaccctttgggattactgatgaaggtgaggagaagatgctgttctgagagctgctgataatacgtggatccaaacccacaggcttgagctgcttaattgaaattcacgtcaaaatgaaattctggtttagctcaacttgactactatggatgatgaaaataaatccctgggtcacacaaggatagtgattgagtagagcttgtttgctggcacaggaatgacatttcaactggaattaaattgtcgtcagttaacagaact

SEQ ID NO: 271863 - DNA, 754 bp, Homo sapiens
attattccacctcccacaccttcccaaccctggctgtgctggccctgactgagaggagggggtttccacttccgtcacctggcaagggaacctccacagcccaagaatattaacatttatcaggtgccgggcatgggcctcatgtgttttatgtaattcaatcctcccaacaaaagtatgagaaagaccacactcaggccaagcactgtggttcccgcctgaaatcccagcgctttgggaggtggaggcaagaggattgcttgagctcagaagttcaagaccaccctgggcaacacaagccagccctgcagcacagccttcaacatgagcaactcctgctctctgtagctccagccccagcctggacctatctttcagagccataatgctgagacagtccctgagtcttggatgaacacaggactcacagtgtctacaccggacagtttctgtttgcacgacgttgagtaaacttcacatccatcggggaagttaccctttgggattactgatgaaggtgaggagaagatgctgttctgagagctgctgataatacgtggatccaaacccacaggcttgagctgcttaattgaaattcacgtcaaaatgaaattctggtttagctcaacttgactactatggatgatgaaaataaatccctgggtcacacaaggatagtgattgagtagagcttgtttgctggcacaggaatgacatttcaactggaattaaattgtcgtcagttaacagaact

SEQ ID NO: 271864 - DNA, 541 bp, Homo sapiens
attattccacctcccacaccttcccaaccctggctgtgctggccctgactgagaggagggggtttccacttccgtcacctggcaagggaacctccacagcccaagaatattaacatttatcaggtgccgggcatgggcctcatgtgttttatgtaattcaatcctcccaacaaaagtatgagagccagccctgcagcacagccttcaacatgagcaactcctgctctctgtagctccagccccagcctggacctatctttcagagccataatgctgagacagtccctgagtcttggatgaacacgtgaggagaagatgctgttctgagagctgctgataatacgtggatccaaacccacaggcttgagctgcttaattgaaattcacgtcaaaatgaaattctggtttagctcaacttgactactatggatgatgaaaataaatccctgggtcacacaaggatagtgattgagtagagcttgtttgctggcacaggaatgacatttcaactggaattaaattgtcgtcagttaacagaact

SEQ ID NO: 271865 - DNA, 455 bp, Homo sapiens
agtcccccttgtcctccccttgacctttgaccccttgggcctgctgccgaccagaataccaggcagatgttctctcttttaccttttgttcctggtctttccctctaaggctggaactcagagataccccaaacccccagcttccagctcatccttccccatgctctcagtgcggaccagctggagcctccactgggccgctctccatgtgagccagtgtggatccttggccacagccggcaggacgcttgcaagtgccccgactccagacatcctcccaggtgtccttcccgactagctccctgtcccaggccccagcaggtgaagcaggaacagcagacagagcctccttccctccccggcatcctctgaacagtcaaagttggaagaaccctagatattgttccacattaaactatgcacgcctcgtggcactcagtttcacaatcaaataa

SEQ ID NO: 271866 - DNA, 194 bp, Homo sapiens
attatgacaagaagtgctagtaaaaattagatatttcacgtagatttgtgtagatttttcatttctcagaacatatcctcatcatcaagtgaagtatgactgtatatgcatttgttgatcattggtaaattttgtttcacagtttgatattagcaacaatattggtataactatctttttattgtctacatcag

SEQ ID NO: 271867 - DNA, 199 bp, Homo sapiens
ccctgggtccatagtccaacaggacagagtttatagaacaaaggaaaagtgagcagtgacaccaacatcagtcttctaagcaaacatttcatggagagagcagaatttttaccttaggtgaattcatctgaagctgtttcaacaaattaaaagagcaattagagctccctttcaaaggcttagaccccacagctatatg

SEQ ID NO: 271868 - DNA, 462 bp, Homo sapiens
gaaactaaaagccatatatcgccctgtcagcagaagtaataccatttaacatgcatcatgtttatctagtcgagatcatgctgtgtggtggtcattgtccatctactcagatccatttcctgtccatggttccattggcaattggcttccagctggatatggccggtgggagacaccagcaagagacagggtagtgaaaagaagggataaggcagggtacttgaccatctctctccttcaggaagcagttttgcatcagtagctgcatctcctccatgattctagctgccaccaagtgcccatcctctgccctctcccaatgccactttctgcagccctgatggtggagtggcttcctgctgtgactcatctctgggctgcttccatgatgattgggtctctgctgttcatcacctgtgaagcatttcccacaataaattccctttgtttaaaatgtccagg

SEQ ID NO: 271869 - DNA, 2846 bp, Homo sapiens
atttaaaagactccttggaatctgattcagaaagcctcacgcaagagattatgtgccattctgagtttgatgatcgaatccggggcaacggtatggagcccgacagcttagacgaggaggaaagccctcgatggggaagcctacacgagatggaagaggaagcaagtggaaaagcagctcagatggctcgcgagcaaaaccaccatacctgggaccagggcgccaataacaggcaacaaccaatagaagacaaatattcagacctccgctatgacccgaactggaagagtaagaaggaggaagggcagctgctgtctgtggaagcgttgccggagtccacggacagctctttagaaaatctgcctttggctcccctctacccttcccaggagacgtcaatggaactctccgggggaaaaggcgagcagaaagagagtccacagagtgcagcttctttacttggtagtgaatttttaagcccaaactatgagcatggtgcccgtcgcagcaagccgttttcagagctgagcgacagtgacctggaggagaagtcgagcagcctttctccgtacgtgaagagctcaagttcacataacgaggttttcctgccgggatcacgtggccctcggcgaaggaaatccaaacaacattttgtggaaaaaaacaagctcactttgggattacccaccccgaaaacggactcttatcttcaacttcacaataaaaaaagaggggaatctcatccagaacagatctcctaccccgtcagagctacagacaagacgtctattcagaatgccaaggaaatggaaaatgctgccatcgatcctgaagataaatggcatcaaagagcacaacagctaaagaattaccaggaacactggtctcaatatgaaagtacaaaatcaagcaatgtaccaagagggcaaccttctgacatggtgaatgaccatcaaccttccagaagaccagccaagctcaagattcgaaagcagtgtaaacaccagaatggcctgaagtcttccacaacggaagaggtgactgccagtcaggggaaccagaataaccctcccaggcagcaacaaaaccaaaataagcctcttgatacttcaacaaagcctgaatcgattgtgattatgcatgcctctaacaatgatgtacaagcctcaagggcacttagaagccacaatctcaaagaaacctccaatacatttgctccaccaaaacaggcttttgacaaggtcttatctaaaaactctactggatgtgactctgggctgaatgttaataaagaaagaggacacaaagaccaagaagagaaaagattttcatatcagcagctacacaccctttctgacatggatttgaacaaccttaatgaactttctaagagacacgtgctcctgagccagaaaggctctcagtttgtttatcacataaatactcatggatcaaccaaaaataagaaacaactcaaacagccttatacagagacaaaatacaggaacttagaaatgttatggaaattccattcttcttctgacagccagacggttagagcttctccagattcatggctcacccagataatggagcagcatcagcaagccttggtgcagctgaccgacgtgcagcccagtgaaggggccttatccagcgtcacgcttccacctatactgtcaagggtagaaagtgaatcccaactcagttcagagagaagccaaagaaaccaagtgaaaattagccgtagcaattctgaaggctatctgtttcaactggaaaagggaaaaaagcataagaaaagaagcagcagtaagaacaccaagctgaaaggttatcagaaaagagacgtgaagcttggaggcctcggacctgactttgagtccatcagagacaaaacgcaaaaattaatacagcaaaaggaatatgcaaaacaagtcaaggagtacaacatgaagacactatccattctatcaaaaccacaaacagaaaaaactcaaaagaaatctgctatccctcggcagaaggctttggaatacgctaagaccatccccaaacccaaaccatcaaatctgactcatcaagcatcaaaggaacaaaaaaatccaacctatgctgggaaagaagaaagtttacctgaaatctcactgctggaaatactgcagaacagacacgaaagggaaaaacaggctgtggctgctttcaaagtccttcacatcgtatagacaacatttgataggaaggagaccaaaaatggtccaggaatgaacgtggagaaaagaaacgccaaccaccttctctgcgttgagagtaatggcctattattatcatctatctgccgtccatgtttgctttctgcaggatttaaaatatgaggcccaattggattatggtgccatattttactttctaggaagaaaattttttaaattatttattttcaaatcagttagaattggagctgaataataactagagaataaagcttttggttttattttgaaaaaaaaaacaaaagagaaacatatgaaatattcacttagaaacaaaagaggtggtattggaagaccgaatttctcttgtggctcgggtgcccccagtggggtgtctttgggcgcccgtcctcttgttgagaggggaatctagaaacctagttatatgacatctgcgtgcttcggtggttgacgtagtgggagaccatttatgctaatataaaggaggtattgtgtgtttccaacacagtggtgagatcaccggaaaaaaatatgatgcaccaagggccttatgaggttgatcactgataaagggcggttgtttggtgtttttaatagctctcccccttgtca

SEQ ID NO: 271870 - DNA, 641 bp, Homo sapiens
agcagagaagtagaacctatgcttccacctagtggcctagccagacaaatcaggtagcatactggagaaaaaggtcatagtcccgacaatctggttacactatccattctatcaaaaccacaaacagaaaaaactcaaaagaaatctgctatccctcggcagaaggctttggaatacgctaagaccatccccaaacccaaaccatcaaatctgactcatcaagcatcaaaggaacaaaaaaatccaacctatgctgggaaagaagaaagtttacctgaaatctcactgctggaaatactgcagaacagacacgaaagggaaaaacaggctgtggctgctttcaaagtccttcacatcgtatagacaacatttgataggaaggagaccaaaaatggtccaggaatgaacgtggagaaaagaaacgccaaccaccttctctgcgttgagagtaatggcctattattatcatctatctgccgtccatgtttgctttctgcaggatttaaaatatgaggcccaattggattatggtgccatattttactttctaggaagaaaattttttaaattatttattttcaaatcagttagaattggagctgaataataactagagaataaagcttttggttttattttga

SEQ ID NO: 271871 - DNA, 2503 bp, Homo sapiens
atttaaaagactccttggaatctgattcagaaagcctcacgcaagagattatgtgccattctgagtttgatgatcgaatccggggcaacggtatggagcccgacagcttagacgaggaggaaagccctcgatggggaagcctacacgagatggaagaggaagcaagtggaaaagcagctcagatggctcgcgagcaaaaccaccatacctgggaccagggcgccaataacaggcaacaaccaatagaagacaaatattcagacctccgctatgacccgaactggaagagtaagaaggaggaagggcagctgctgtctgtggaagcgttgccggagtccacggacagctctttagaaaatctgcctttggctcccctctacccttcccaggagacgtcaatggaactctccgggggaaaaggcgagcagaaagagagtccacagagtgcagcttctttacttggtagtgaatttttaagcccaaactatgagcatggtgcccgtcgcagcaagccgttttcagagctgagcgacagtgacctggaggagaagtcgagcagcctttctccgtacgtgaagagctcaagttcacataacgaggttttcctgccgggatcacgtggccctcggcgaaggaaatccaaacaacattttgtggaaaaaaacaagctcactttgggattacccaccccgaaaacggactcttatcttcaacttcacaataaaaaaagaggggaatctcatccagaacagatctcctaccccgtcagagctacagacaagacgtctattcagaatgccaaggaaatggaaaatgctgccatcgatcctgaagataaatggcatcaaagagcacaacagctaaagaattaccaggaacactggtctcaatatgaaagtacaaaatcaagcaatgtaccaagagggcaaccttctgacatggtgaatgaccatcaaccttccagaagaccagccaagctcaagattcgaaagcagtgtaaacaccagaatggcctgaagtcttccacaacggaagaggtgactgccagtcaggggaaccagaataaccctcccaggcagcaacaaaaccaaaataagcctcttgatacttcaacaaagcctgaatcgattgtgattatgcatgcctctaacaatgatgtacaagcctcaagggcacttagaagccacaatctcaaagaaacctccaatacatttgctccaccaaaacaggcttttgacaaggtcttatctaaaaactctactggatgtgactctgggctgaatgttaataaagaaagaggacacaaagaccaagaagagaaaagattttcatatcagcagctacacaccctttctgacatggatttgaacaaccttaatgaactttctaagagacacgtgctcctgagccagaaaggctctcagtttgtttatcacataaatactcatggatcaaccaaaaataagaaacaactcaaacagccttatacagagacaaaatacaggaacttagaaatgttatggaaattccattcttcttctgacagccagacggttagagcttctccagattcatggctcacccagataatggagcagcatcagcaagccttggtgcagctgaccgacgtgcagcccagtgaaggggccttatccagcgtcacgcttccacctatactgtcaagggtagaaagtgaatcccaactcagttcagagagaagccaaagaaaccaagtgaaaattagccgtagcaattctgaaggctatctgtttcaactggaaaagggaaaaaagcataagaaaagaagcagcagtaagaacaccaagctgaaaggttatcagaaaagagacgtgaagcttggaggcctcggacctgactttgagtccatcagagacaaaacgcaaaaattaatacagcaaaaggaatatgcaaaacaagtcaaggagtacaacatgaagacactatccattctatcaaaaccacaaacagaaaaaactcaaaagaaatctgctatccctcggcagaaggctttggaatacgctaagaccatccccaaacccaaaccatcaaatctgactcatcaagcatcaaaggaacaaaaaaatccaacctatgctgggaaagaagaaagtttacctgaaatctcactgctggaaatactgcagaacagacacgaaagggaaaaacaggctgtggctgctttcaaagtccttcacatcgtatagacaacatttgataggaaggagaccaaaaatggtccaggaatgaacgtggagaaaagaaacgccaaccaccttctctgcgttgagagtaatggcctattattatcatctatctgccgtccatgtttgctttctgcaggatttaaaatatgaggcccaattggattatggtgccatattttactttctaggaagaaaattttttaaattatttattttcaaatcagttagaattggagctgaataataactagagaataaagcttttggttttattttga

SEQ ID NO: 271872 - DNA, 2330 bp, Homo sapiens
atttaaaagactccttggaatctgattcagaaagcctcacgcaagagattatgtgccattctgagtttgatgatcgaatccggggcaacggtatggagcccgacagcttagacgaggaggaaagccctcgatggggaagcctacacgagatggaagaggaagcaagtggaaaagcagctcagatggctcgcgagcaaaaccaccatacctgggaccagggcgccaataacaggcaacaaccaatagaagacaaatattcagacctccgctatgacccgaactggaagagtaagaaggaggaagggcagctgctgtctgtggaagcgttgccggagtccacggacagctctttagaaaatctgcctttggctcccctctacccttcccaggagacgtcaatggaactctccgggggaaaaggcgagcagaaagagagtccacagagtgcagcttctttacttggtagtgaatttttaagcccaaactatgagcatggtgcccgtcgcagcaagccgttttcagagctgagcgacagtgacctggaggagaagtcgagcagcctttctccgtacgtgaagagctcaagttcacataacgaggttttcctgccgggatcacgtggccctcggcgaaggaaatccaaacaacattttgtggaaaaaaacaagctcactttgggattacccaccccgaaaacggactcttatcttcaacttcacaataaaaaaagaggggaatctcatccagaacagatctcctaccccgtcagagctacagacaagacgtctattcagaatgccaaggaaatggaaaatgctgccatcgatcctgaagataaatggcatcaaagagcacaacagctaaagaattaccaggaacactggtctcaatatgaaagtacaaaatcaagcaatgtaccaagagggcaaccttctgacatggtgaatgaccatcaaccttccagaagaccagccaagctcaagattcgaaagcagtgtaaacaccagaatggcctgaagtcttccacaacggaagaggtgactgccagtcaggggaaccagaataaccctcccaggcagcaacaaaaccaaaataagcctcttgatacttcaacaaagcctgaatcgattgtgattatgcatgcctctaacaatgatgtacaagcctcaagggcacttagaagccacaatctcaaagaaacctccaatacatttgctccaccaaaacaggcttttgacaaggtcttatctaaaaactctactggatgtgactctgggctgaatgttaataaagaaagaggacacaaagaccaagaagagaaaagattttcatatcagcagctacacaccctttctgacatggatttgaacaaccttaatgaactttctaagagacacgtgctcctgagccagaaaggctctcagtttgtttatcacataaatactcatggatcaaccaaaaataagaaacaactcaaacagccttatacagagacaaaatacaggaacttagaaatgttatggaaattccattcttcttctgacagccagacggttagagcttctccagattcatggctcacccagataatggagcagcatcagcaagccttggtgcagctgaccgacgtgcagcccagtgaaggggccttatccagcgtcacgcttccacctatactgtcaagggtagaaagtgaatcccaactcagttcagagagaagccaaagaaaccaagtgaaaattagccgtagcaattctgaaggctatctgtttcaactggaaaagggaaaaaagcataagaaaagaagcagcagtaagaacaccaagctgaaaggttatcagaaaagagacgtgaagcttggaggcctcggacctgactttgagtccatcagagacaaaacgcaaaaattaatacagcaaaaggaatatgcaaaacaagtcaaggagtacaacatgaagacactatccattctatcaaaaccacaaacagaaaaaactcaaaagaaatctgctatccctcggcagaaggctttggaatacgctaagaccatccccaaacccaaaccatcaaatctgactcatcaagcatcaaaggaacaaaaaaatccaacctatgctgggaaagaagaaagtttacctgaaatctcactgctggaaatactgcagaacagacacgaaagggaaaaacaggctgtggctgctttcaaagtccttcacatcgtatagacaacatttgataggaaggagaccaaaaatggtccaggaatgaacgtggagaaaagaaacgccaaccaccttctctgctggataccttgggttccgagctcgaat

SEQ ID NO: 271873 - DNA, 461 bp, Homo sapiens
tgccatctaagaagccagcagtagaagggagccctggtcgctgtgaaaggaatatttaaaagaacagccgttggacacagctgtgctgtgacaccttcttgctaaacacgtgccctgttatctttcttgagatgctcgcctgccgtttggtaaaagctgtatgcgttgtggtgtatttgagttcaccaaccattatcaagatcaatttgggcagagtagagagacgcttggttgaatggaggccaagctgaaattctgattcttgagcatgtgataatccatgcaaaatgttagccaatttacatttcaatttttaatcttattagcaagtatccttgccacctgatacacttttcagcagctgtgaaactccaaactatattgaattcaatgagaattgcatacatgaaatttaaagactcaggttagaattatgtgtcctttaataaaagttctttgct

SEQ ID NO: 271874 - DNA, 446 bp, Homo sapiens
gcttataatctgctagctttctgatcccactggcatgagatactcttgcctaatagttacagctaaagtccaggagctcactgttactggtctgccttggattatgtgcacattcctgaaccagccactatagctaggggatggaaaatactgttcctggttacttaaatgtaggtgatgctcctcccatataccacatgaacctaaaggagtcctggaggaggccgttcaccacaggaaactgaggtgttcttagaagggtggatgctggcagatctctactagttagagtctacatttgccttactcatttcaaaagtccacattgcagtctcattttaccagtgatctagcttgataaggacattcataagtaactggatgattctttaacattgcagatttgaaaggattaaataaagtcaacaaaattgttatatcaacaa

SEQ ID NO: 271875 - DNA, 391 bp, Homo sapiens
gtatttcttaaataataaaactagaaagtcaaaattactccttgatttgcaagaattactgcctggctgcaagaatggatgttgtgttagcaggcatgaaaacaacattcatctccttatacatcttcatcagagctctgggtgacttaggtgcattgtcagtgagcagatttttgggtttttttgtttgtttgtttgttttgagacagtctccctctgttgcccaggctggagcacagtggtgcaatctcagctcaccacaacctctgcctcccaggctgaggcaggagaatggcgtgaaccgaggaggcagagcttgcagtgagccaagatcgcaccactgcactccagcctgggcgacagagcaagactccatctcaaaaaaaaaaaa

SEQ ID NO: 271876 - DNA, 340 bp, Homo sapiens
aatattaaatatcaagacagatgctgtgctgctatgtgtttaaaaaccatctctctgggaagaaagagccttgatttgtaggattttccgacctccatggtgtaaattgtaccaccacatccaatttctaacagtcaacatgatatcctagaatgtcaacttgggaagaaatgtgtataggctgtcattatcattgaattcatgccagttctattgagagccacctagccttcttttcctaaggcttcagaatgctggcagctctccagagacacagttgaaatattctcctcagaggaatctgactagtctaaagaaatatattgatgctggacttcct

SEQ ID NO: 271877 - DNA, 869 bp, Homo sapiens
caataataaaaacctaaaaaaaaaaaaagactgctatgtaatcttgtgtcttttctttctctctctctctttttttttgagacagggtcttgtcctgtcacccaggctggagtgcagtagtgtgatcttggctcactgcagtctttccttgctgggcttaagcgatcctcccaccttggtctcccacagtggtgggattacaggtgtgagccaccatgcctggcccaaactattttttaatacagtaaaatgcatttattatcatggcttagatttagtgaatgtgtaggagtgaaagtctactgagagaataaatctagtaatttaatgaactttcttcatagcttcataagagttagttaattatgatttcttaattcattgcccaaagaatgaattactggaattcattatattttttttttgaaaaaaaaaaactaagttagctgcctgtgtgtgtgtgtgtgtgtgtgtatgtatgtatctatgtattctagagaaatatatattatatgcatccagagatgtgtaaaatattctctatcagtaggagaatagattaataaattgtggtgtaatcatatgctagaatactatacagcagtaaaaaaatgaactagagctgtacacaataacatggatatatcccacagacatgatgttgaaagacagatatggcctgggtttgttagctcatgcctgtaataccagccctttgggaggccaaggctggggggttgtttgagcccaggagttcaagaccagcctggggaacatggtgaatctcttttctacaaatacaaaaaaaaaacaccttagctgggtgtggtggtgtgtgcctgtagtcccagctgtttgggaggctgagg

SEQ ID NO: 271878 - DNA, 206 bp, Homo sapiens
gtactcaataagcttgttaaaatatttgttgagtgaataaaataatctaaatcatttcctaagtttctttaatgatcaaagaaattaaaccactatgaatctggtttcaggtattaaacacagattaaatattcatttttaggatacatttgttttaaatttaacacatggattcatgaataatgctatagagaatccattattta

SEQ ID NO: 271879 - DNA, 501 bp, Homo sapiens
gattcccttatttgatgagcccttcaggacaggggtctggggttgactcttctccatgcagacctacacagactgctcccctaagcagcagctacatgaattgagtgggcctggttccggtcccctctcttgatccagagtcctcagcacaggttggaagcctgggcgcctccttgccttgagagcatgagtggacacttcctggtgggaaagcagcatgccccttttctagtgttaagggacacctcagcatgattattaaagacagttgcagcaggaggtcacagagggtcacagaggcagggcgcaaattacagtgagctgatttcacaaagtacctggactccaggcccagctctgcagccttgcacaaagctggttcagccctccaaagctgaacaacagtgcaaaagaaggtgcattggtatcaagtgattttcctggatcctttcagcactgaaagcctgtattattaaagtcagattttcacaaaaaggaata

SEQ ID NO: 271880 - DNA, 373 bp, Homo sapiens
aagattttgggggtaatatttcatctgggaagatctctgtagtaaggtaacatttgaacacagacctgggctcgatacatgcaaactataatatacatttagtattcagatattttagaatcacagattctcagatttcaaaaggactttgaaatacatgaattttgtatcacttctatttgtgatcatctagtgtttgcttgaacatctttagtgaaaatagcacattttcaaaagcttatttcattgttggatgactcaaatcctcagaaaattacttttattgctttgaaactagtctcttgaaaaatccacatattttaaattttctcattggaacaacccagaataaatatcatctcacatggatttc

SEQ ID NO: 271881 - DNA, 381 bp, Homo sapiens
caataacttgaatttgacctaaaatgacagaactcacctttgtagaatatatctctcaacacaagatttggatactgtttaactcttgatgacctcttaattgatgactatctatttggaattagtaatgctcagaaattcttggagtaaaagaactactagtatcaacatcattgcttaacaattttgtaccttatatttgtgaagtttatttcctataacttttgccaaaaccagcagaattacaacatttcatggaagacagcaaagtatgatgttagtgatgtgctcactgataatgaacaaagtagagctcagaaatggaacttttagtgctagatttttaaacaaacacttctcatggtgctgatcaattcagct

SEQ ID NO: 271882 - DNA, 493 bp, Homo sapiens
gttataaataagaggggtgctttggagttgatgaaggaagagacaaagcctatgttttgagcagagtgggaggtccaattgaagacaccagcataaatctgggacaactgaaaggtgacactgacagtgtcccttggtgtagggatgtagggatgtcccaaaagagacttgcttatttaaataaaccctggttctgggtagtgcatgagaaaataaaaagaaaaatttcattaagagtttctagtcgcaatctcacagtcgtttaagtttggaattcataatgcatgtggaatatggagtaatcttagctgaaaattttaaaatgattctggccagacacagtgtctgatgtgctcctcaaaatgtccattctaaatcaggaacagtggctcccgcctgtaatcccagccacccaggagggtgaggtgggaggattgcttgagtctggaagttcgagtacggattgggcaacatagtgagacccccatctccg

SEQ ID NO: 271883 - DNA, 152 bp, Homo sapiens
ctccggggtaaaggcagaatattggggtctattttggaaatccgaggaacccaattgcttgatccggcttcaagcctgggcaacgtggcgagatcccctctccacaaaaatacaaaaattagccaggcgatgtgggacgcatctctactccc

SEQ ID NO: 271884 - DNA, 230 bp, Homo sapiens
gaagtaggatcaacaatttttaagcatgacttttgctctataaacagaagtgtcaatgaatgtaaaactggcttttcattggcaaggctgacaaagccttaagtaacaccagaggcttggcagtggtataatcataaattacttttgtatgatataactttttataaaaacataatgtaatgtgcccagttctattactattgctacagaagacaaaacaagcatttgag

SEQ ID NO: 271885 - DNA, 292 bp, Homo sapiens
ctcgggctcccagatcctgtaggtctttcttttctctggctggatttgaaatgcttcgtttctttaaaatcacaatgttgctatctgatttcaaaactgggtgcataggtgtctgttttagttattttttacaatttacatttgaaatgttttataactaaaatgtttaaaacatctctgtaaaaccatgaagggacagggcagagactctatctctcctccttcacaaggaccccaggtcaagcccagaacctgggcgacccctcaaagagcaggggagagggctgccctg

SEQ ID NO: 271886 - DNA, 468 bp, Homo sapiens
ctgcatgactctaattcatggacctcttttcaatttctatgaaatcacaaaatattagaagtgaggaataccatagaatcactattcatggttttcaacaacggtacgcagaagtagtaactctgcagtgatcatgtagaaccaattttctctcatctccatatccacctgcattttgatgtacagctctccctcagtgtctatggggcatttgttcaagatccacttccaccctaaataccaaaattcatggatgctcaagtcctttatgtaaaatggcatagtctttgcatataacctacacacatcctcccgtatactttagatcatcactagattacttatacataatacaatgtaaatgctatgtaaataattgttacaatgtattttaagacttgtattatttttattgtttttttaattttttaaaaataaattcaatctgagattggttgaattcgtgga

SEQ ID NO: 271887 - DNA, 334 bp, Homo sapiens
attgctggtttgagtgagcaccagagcggccactatgttggagagcaatttggtactgcttaggataagtacgtttagtttaagtacactgcggcctggtaattttttttacctgcgattaatctgaaaacattctcacgcaattccacaagggaaaatatatgaggttgcttattagagtatcacagtcataatgagttgccgactacctgggtgtcaatcactgggagactggaggaaaagaatgtggtggatacttattgtggaatattatgggacaagtagaaataagaatttagaacatgtatggatcctaaaaacatagtgtaaagtg

SEQ ID NO: 271888 - DNA, 372 bp, Homo sapiens
ctgagaccaatactcctgagactactatgccaccatctgaggccactactcccgagactactatgccaccatctgagactgctacttccgagactatgccaccaccttctcagacagctcttactcataattaattaacatttacttctggtatggaacaactagaaatactgctggaaataatatccaaagagctgattctaccaatccaatttcaccaggaaaattccatcagggattggatgaccatggggatggacataattgctactaccaacacaacagccaagagagttgccttacaattagaaatgtgtagacagaaatgtatagaagatacaaggattctcttaattggacttaaattcttta

SEQ ID NO: 271889 - DNA, 477 bp, Homo sapiens
tatgccttggtagcttccaaacttgccccccttttatgttttgaaaccctgaaggtcggagcgtaaagccgtggtagagtcaacttctgtctgagccgaggatttctgggacttgccagcctcgtctccgtgtgtctgattggacacctggcaggtccgggcgctccccctccttgagccggcgacaccaggacgggtcagactgtcctggcctagaggaggtcaccgctggggaggaaaagggggtaacggagattctgccgcacagacgggtgtctgtgtacaggctgttttggtggaagcgtctactgtgtcaggagctgcgggtgcctgcgtgtgcacgtgtgtgtttagttgctgagacctgaaatatatatgtcttagtaacaatccgtttgctcgcattttctaaccctttcctctttggggagggggctgctaacaagatgttaactgctggcgcttaaaggtatagct

SEQ ID NO: 271890 - DNA, 496 bp, Homo sapiens
gattatgcctcaggtgtattttgtgatgaggtttctccatgtcctgccatttgattattccttttcttaaatttctgcaacatagacccaatctgatctctgtttttcaaagtagtttatacctaaatattggtttgtgtgtttgtatacatatgtctgtaatagaatggggtggttatgagctgtttaatttgcattaataagaattagtcttgttggccaggcacggtggctgtaatcccagcactttgggagccgaggcagacagatcacctgaggtcagaagttcaagaacagcctggccaacatggtgaaatgccatctctactaaaaatacaaaaattaactgagcgtggtggtgcatgtctgcattcccagctacttgggacgttgaggcaggactatcacttgaacccaggaggtggaggttgcagtgagccgtgatcacaccactgcactccagcctgggtgacagcaagactccatctcaaaaatt

SEQ ID NO: 271891 - DNA, 438 bp, Homo sapiens
tgacaggttaagtaacttaaccttcaggaccaatggctggtaaacagctgactgattccagacttaaaactaggttgttctaactgtaccacaatatttcttaaagcgtattaaagtatctttccttagcttactctgtataaatgaaatatgatataatttagtaaaatttcataaataatacagtaggaatacatttgccataaagatctcaaaatgcctgcttgtaatcagaaattcagcatcgtctagtgagtgttgtctcttgattgctaaagaattaaaagaaatatgtctggctgttacaccttaagatggatctttccaggtaaggtgggaaggaacttacttgtcataacctttgaaatattcatcttggaatttttcttaactgtttaatattgtatttgaggctttagccaggttttgcaaaagttt

SEQ ID NO: 271892 - DNA, 252 bp, Homo sapiens
tccgggtagaggtgcggctgggccctttacgaggttcggtcttggagctccgtcttcggcagcgggctcgggggcctcggactctgcataaggccccggaaaagatgaccggccccgggctgggcgcggtggctcatgcctgtaaccctggagctttgggaggccttggcgggcggatcgcttgagtccaggagttcgagatcagcctgggcaacaaagcgagacaccaccccccacccccagtcgctacag

SEQ ID NO: 271893 - DNA, 493 bp, Homo sapiens
cctcgtcaggacctggctctgccctcggagtcagtctggatccaggagtgattcatcttacacagatgagagggggataaaaggaaaagaacagtcaggacaaatgtgttttcaatggtgcttagcagcaggagaccactgggacttcagagaaacgctactggagtgtgacatcataatacgccaaataccagagtctctcgcctcttggagtttatgggccaatttctcccaagatgtgtgagcttgttgtgccgccgccagtggactcgccagcggctgagcagctcagagtgacagcgactcagcgtctggaagccccactgggttgtgaaatgaagaaggccttctttgcccctgatgcagcccgggcgagccccgaggctccagaagcgagcatctcccagctcctaaagagcagacatatatcctgcctttaagacaagactacaattgcaaatctgagaatataaattacactttcatctttatt

SEQ ID NO: 271894 - DNA, 358 bp, Homo sapiens
ttttaaacctgcttgccaccgttaatgttcctgcggtgacatgaagagccaaataccagagtctctcgcctcttggagtttatgggccaatttctcccaagatgtgtgagcttgttgtgccgccgccagtggactcgccagcggctgagcagctcagagtgacagcgactcagcgtctggaagccccactgggttgtgaaatgaagaaggccttctttgcccctgatgcagcccgggcgagccccgaggctccagaagcgagcatctcccagctcctaaagagcagacatatatcctgcctttaagacaagactacaattgcaaatctgagaatataaattacactttcatctttatt

SEQ ID NO: 271895 - DNA, 503 bp, Homo sapiens
  misc_feature (56)..(56): n is a, c, g, or t
taccgcatgctaacctatattcttcgtcgaaacaacaacacaacaagaaaccctangcacaggcatcacatttacgataggatctttcaagagcctcaaaagcaggactacttcatgagccaactcgtggtgacaagccctgcccctgcaagtgagaaggggggcgcttccaaatcaagcaccatttgtcaagccaaataccagagtctctcgcctcttggagtttatgggccaatttctcccaagatgtgtgagcttgttgtgccgccgccagtggactcgccagcggctgagcagctcagagtgacagcgactcagcgtctggaagccccactgggttgtgaaatgaagaaggccttctttgcccctgatgcagcccgggcgagccccgaggctccagaagcgagcatctcccagctcctaaagagcagacatatatcctgcctttaagacaagactacaattgcaaatctgagaatataaattacactttcatctttatt

SEQ ID NO: 271896 - DNA, 433 bp, Homo sapiens
ctttcctgccctattcatgtttgcctagctacgcactctaacaatatctctatttgcataagcctcgtaactgggaacaactatacccagaagtctctgtcaccaggtatcttgatatcccctcagtaattctcttttcattctggtggaggcaggaacttttccatcatggggatggatggaaaaagagacagataatggcccgggaggcaaagtacttcaattttctagctgtttaggcacctgtgtgcccatacttgcgttggatgctctgaactaattctacgccttgaaaatgacccttgtgaccaggcatggtggatcactccctgtaatcccggcactttgggaggctgaggaggaggatcactgaaacctaggagttagagaccagcctggaaaacatagcatagtgagactctgtctctacaaa

SEQ ID NO: 271897 - DNA, 712 bp, Homo sapiens
gatggcaagattgttttaccaggcaactttctgtattgtacattctatggacgaccgtacaagctgcaagtattgcgagtgaaaggggcagatggcatgatattgggagggcctcagagtgactctgacactgatgcccaaagaatggcctttgaacagtccagcatggaaaccagtagcctggagttatccttacagctaagccagttagatctggaggatacccagatcccaacatcaagaagtactccttataaaccaattgatgacagaattacaaataaagccagtgatgttttgctggatgttacacagagccctggagatggcagtggacttatgctagaggaagtcacaggtcttaaatgtaattttgaatctgccagagaaggaaatgagcaacttactgaagaagagagactgctaaagttcagcataggagcaaagtgcaatactgatactttttattttatttcttcaacaacaagagtcaattttacagagattgataaaaattcaaaagagcaagacaaccaattcaaagtaacttatgacatgataggaggattaagtagccagctgaaagcaattagagaaataattgaattgcccctcaaacagcctgagcttttcaagagttatggtatgatgtcttcagtttattgcacccaaaaatgttaaattcaaattaaaagacagttgacacttaaaa

SEQ ID NO: 271898 - DNA, 948 bp, Homo sapiens
gatggcaagattgttttaccaggcaactttctgtattgtacattctatggacgaccgtacaagctgcaagtattgcgagtgaaaggggcagatggcatgatattgggagggcctcagagtgactctgacactgatgcccaaagaatggcctttgaacagtccagcatggaaaccagtagcctggagttatccttacagctaagccagttagatctggaggatacccagatcccaacatcaagaagtactccttataaaccaattgatgacagaattacaaataaagccagtgatgttttgctggatgttacacagagccctggagatggcagtggacttatgctagaggaagtcacaggtcttaaatgtaattttgaatctgccagagaaggaaatgagcaacttactgaagaagagagactgctaaagttcagcataggagcaaagtgcaatactgatactttttattttatttcttcaacaacaagagtcaattttacagagattgataaaaattcaaaagagcaagacaaccaattcaaagtaacttatgacatgataggaggattaagtagccagctgaaagcaattagagaaataattgaattgcccctcaaacagcctgagcttttcaagagttatggaattcctgcccctagaggagtgttactttatggtcctccaggtactggaaaaacaatgatcgccagggctgttgctaatgaagttggagcctatgtttctgtaattaatggtcctgaaattataagcaaattctatggtgagactgaagcaaagttacgtcagatatttgctgaagccactctacgacacccatcaattatttttattgatgagctggatgcactttgtccgaaaagagagggggcccagaatgaagtggaaaaaagagttgtggcttcactcttaacactgatggatggcatt

SEQ ID NO: 271899 - DNA, 450 bp, Homo sapiens
cagtctacagaagctatactcagatgtaggtattagcaatggtgattttgaaggaagtaactgaagagtaagtatatttactttatattttatagtaaaggccacacacaacaggattattgttgtagatgtataaatattcattttaagagagtctaggccaggtgcattggctcacgcctgtaatcctagcagtttgggaggtcgaggagggcggatcacaaggtcaggagttctagactagcctggccaatgtggtgaaaccccgtcgctactaagaatacaaaagttagccaggcgtggtggcacgtgcctgtagtcccagctactcgggaggctgaggcagaagaatcgcttgaacctgggaggtggaggttgcagtaagccgagattacgccactgcactccagcctgggcaacagagggagattctatctcaaaaaaaaaaaa

SEQ ID NO: 271900 - DNA, 314 bp, Homo sapiens
tgtactgttttcccagctgccttcaggatttgatctatatcattggttttgagcaatttgattatgtgacttgttacagttttctttgtatttcttgtacttgatgttgagctttgggtctgtgggtttatatttttcattatgtttggaaaatgtttggccattatttcttctaatatttttctatgtctcagctttgtaaacatgtgggatatagttaaaattaatgttaatgtctttctctgcttattttaatatgtgtcagtttggggttagtttggatcaaaataaggattgattggttgttcttatta

SEQ ID NO: 271901 - DNA, 420 bp, Homo sapiens
cggatctttcttctttagcttgttgatttgattaattacatcaattgatttttgaatgttaaaccagctttgcatacctgtgataaattccacttactcatggcatataattttctttacacattgttggatttaacttgctagtattttgttgaggatttttgcttgtatgttcatgagagatattggtctatagttttcttttaatgtctttgtctggtttgggtattagagttatgctggcctcatagaatgagtcaggaaatattcccttcagttctatcttctggaagagattatagagaatttaaaacaatttatttcctaaatgtttgctagaattcaacaatgaacacatcagggcttccaaaaatattttaacttgtttctttaaaaattaaagttttccttttgcgataa

SEQ ID NO: 271902 - DNA, 504 bp, Homo sapiens
agtttatcaggtcatatgaaattcaagtttggaaaaatttgaaagtacattgcatgtcaataaacgcatcttggtgtctgattctgcatacatctgtagagaatttgaaaacaagcagtcaatttagaacttctgcttggtcttcggaagcaaaaagaggaaattcaaaagtaattttacacgtccttccaccagaagctgaaaggatggctttttcgcggctgaataacgaaagccccctgcttcgccccggactctgagcagctcaacctgcggaaaggatgtgtaataaaacgcctttccagggagacaaaaaaaaaaaaggccacccaaaggaagggcaactcgggagtgcctggtttctactgcggtacccgggcactttggaagaaagtgcgtgcagattcaagcttttgaaatggtttcagctctgttcaattgggcataggctatttttccttttctgtttttttctttaaatacattatattcattcctctcaat

SEQ ID NO: 271903 - DNA, 632 bp, Homo sapiens
tgaacaaaatacaagggcaagagtatcaggaaaggttacttttttttccctctgcctctgattacccagagagcaacagtgaaaaatatggaggagaagagcagagggctcttttggtccaataacagaattcagaagtaggacacactggggaggcttctgcctcctgcagtggttttctccaggattttttaccctcacttaggtgtagccttgacaggaaaggatgggggccaggagcctggaccatcattcccagcaatctgacctgcttgagggagggaagggtccccatccatcttttcttcattctgggcacctcactttaaaaaatagattttgcggccgggcgcggtggctcacgcctgtaatcccagcactttgggaggctgaggcgggtggatcatgaggtcaggagatcgagaccatctggctaacaaggtgaaaccccgtctctactaaaaaatacaaaaaattagccgggcgcggtggcgggcgcctgtagtcccagctactcgggaggctgaggcaggagaatggcgtgaacccgggaagtggagcttgcagtgagccgagattgtgccactgcagtccgcagtccggcctgggcgacagagcgagactccgtctca

SEQ ID NO: 271904 - DNA, 314 bp, Homo sapiens
agccactccccatgctgcaagcaggggccaaaacaaacagggcccctcccagaaccctgcacccttcattgttctgtcaagttccagttccccattagtacataccatgtttgtgtgcacatgtgtgtgcaaatgtgtccacattacatttgtgcacaactgtgtacgacaaatgtaacgtttttgtgggatcctctcatgacacataattcactatccactttttgtaagtttttctcttcactcctcatctaccaagattgtgccactgcagtccgcagtccggcctgggcgacagagcgagactccgtctc

SEQ ID NO: 271905 - DNA, 372 bp, Homo sapiens
cataagaggaagtagcaacatacccctaagtggccccaggggtagatggcagaggtgtgtatcctaacaagtctttgcagaactggtatcatcaaatctctcagacagttttgacaaatggtatttactatcttttcattaactcattacctcaccctacccccacgtctccccagcagctgagaggctcctgtaaataaatttgtctgtgcattccacaaataggtcatcatgattctggatccacacttgtatcttaacccctctaggaaaagaattgttacaagaatcaacgtgcaaaaatataaacagtttatataggtgttttgacttttaggtcccccgaaataaaaaaattgtgaaccataagaa

SEQ ID NO: 271906 - DNA, 399 bp, Homo sapiens
tgagacagagtcttgttctgtcgcccaggctggagtacaatggcacgatctttggccactgcaacctctgtctcctgggttcaagcaattctcacacctcagcctcccaagtagctgggattacaggtgcatgccaccacgactggctaatttttgtatttttgtagtgatggggtttcaccttgtttgccaggctgttcttgaactcctgacctcaggtgatctgcccacctcggcctcccaaagtactgggattacaggcgtgagctaccccacccagccaagtatttatctatacagatggagagcaagacagagtaaaaaaacaaatgaggcaaaatattgacaattaatgaatcaaagtgaagtttatgggataattctttgtaagatttttgt

SEQ ID NO: 271907 - DNA, 484 bp, Homo sapiens
agcttcttcaaggaaataattttttctttttttagacaaagtttcactcttttgcccaggctggatgcagtggtgcgacctcagctcactgcaaccttcacctactgggttcaagcgattctcccacctcagcctcccaaaaagcggggagtacagacgtgtaccatcacacccagctaatttttgtatttttaatagagacagagtttatccatgttggccaggctggtctcgaactcctggactcaagtgatccagccacctcagcctcccaaagtgctgggattataggtgtgagccacagcacctggcctctgcctcttattttagattacttatgtcaaccacttaactccagtctctatcatatctcacacttggctgaatagccaccatcagcattaatagttgttacagctttctcagcacctggactcctactaccaatgtttctacgaataaaatgtcagaatgaatccaagaa

SEQ ID NO: 271908 - DNA, 528 bp, Homo sapiens
ttctctgactcatgtttttctcacatgagctgagaataaaatgtcttgagattgggagtgtccatgacttgcgatgcatcttactctgtttaatgaatagtagatgcatgtctgttttttgacggcatctaaaatatcataattattatcttgccatttgtgcattttacacaaatatttaataaaactgttattagccaggaagggcaattcccttttctgatattgctagctgtgtttcttgggttgccactattgccactgaatgaaaaaaaccttttcttcacctaaccaggtaatctgcagttctcataatcgctttgtgctattgatgagcagtcatatgtttttcaatgctatttataaagtacggtaaaatcgatgaggaatatgatgctttcgattgttatactaataaaacacaggatattttgtgatatatagctatacttaaatatgtcaggaagaatgcaagtaactattaaaataatattgttaataaaatgatgttgtagaattccaaatcct

SEQ ID NO: 271909 - DNA, 1246 bp, Homo sapiens
tgctatttagtagcttaggcccttctgtgctctaacagaatgaacttgcttactatatgatcttaggcaagccgccctcctccttccaagcctcagtttcctcttctgtgaaatgagggagaatccctactcctcttatctcattgtcttatcattgcattattcttacctgttgggatggtcaggtgagaggtctgcatgagggccctgcagactgtaacattttaagagtgtggggaaagcatggaaaaagtcactctagagatataaagggtgattactgctgttgttatatttattctgctacttgttaacacattctgcctaactcagaagattcagtttggggctgagggttgaaaacaggactcctagggtttgtcccagctgctcacttgctgtgtcactcttgttgtgttgtcgaatctctctgcctttgtttccctatctattcctgccaagatgatgtgtatattccacttagcttatcctggaggaaaagggggcggagctctatccacacaaggtggtgttattattattagcgtgacacataaaaatattcatgtctacatccaggaactaatctgcatttatcattctgtgcccgagtggacagatggtgaaagatatttttagattctgaaatggtaacttcctattcttggtaggaagcttcatcccccttttccttcagcctaaagtgggccagatgcccctcgactcactggctatccccccattcagaatccacttacaagaaactaatacttctcttctttgttaagcataaactgagtttccctcaaatagggcaaaaatggccatgggtgtggggtcccaggggagtagctagaattgctaaggatcccctcagctctatggtttcttggatatggataaaaggactagctatttctactatctcccatttgcaaaatgaggaggctgggatgagataagtttgtagggataacaatctaatagctcttaggttgaatgtggcttgtggaagtgttttgtgtggcttgcatagtattttaaaaacccagagtcgtagcttccctttaaaaaaattggatctagcagtatcaatcctgtaacaatttagaaagagtctatgtgctctaatttgtccatctttccctttgatcatatctgtactatttcacttagacatgaaagccctaatttacagttctataacaattattttattaaacactgactttgtgccaagcctact

SEQ ID NO: 271910 - DNA, 354 bp, Homo sapiens
cagtaaaagagaagtgatttgtcccatacaaggaatcctcaataagattaacagccaatttctcaacagaaatcatgaaagccagagggcagtgagacattaaaagccctgagagaaaaataaaactgccaacaaagaattctatatcctgcaaaactatccttcaaaaataaaggagaaatggagacattcctagataaacaaaagctgagggagttccttgctagtagatctgccctacaacaaatgctaaagggatacattcaggctgaaatgaaaaaacagtagacagtaacacaaggccatgaaggattaatgaactctgataaaggtaaatacataagtaaatataaa

SEQ ID NO: 271911 - DNA, 461 bp, Homo sapiens
aagaacaaatattataaacaacatctattcaattctgagttttttctcatttctttagatattcttaatgtacagtattagtaggttagtgtctctgctggtattgggtaaaaggcacactttatcaagccaatgagagaccattgtgttttaattcctatgttgggttaacatatataagaggtctcacagaaatctccaatgcaacacgttccaaaactgaaatcttgactttcctccacaaatcttttccaccctcatctcttcccttgcctgttgatgcaactctatcttaagagttgcacaagaccaaaactttagaatctttgactcctctccttctctcagacctcttatccaagcttccaggagatcctgtttactctacattcaaaatgcccagaataaacacaagcttgggcaacacagcaagaccctgtctctatttttaaaataataaa

SEQ ID NO: 271912 - DNA, 539 bp, Homo sapiens
ccaccctgtgagcccatgagtgagctcactgcacttgttatagacatcctaccaccagcagcctgattttgctgagtccgtagcttacaactccaatctcatggccctgcctttcacctcacttgctgccttaaaaacctgcagactgaggtggcgtagaagctgtgacatcccagtacccagaagttcatctcacacccagatcttggtttctaaatgtcattctctactaaaagggaccagggctggtacaggagaagagcaagagcttggaatatcttatacctgagagtaaggaagtgctcagagaatcacaggagcacgttaaaaggacatagaagtcagtttaatgagactgcttctggccaaagttggaacacatcaaacattaaaacaatgatggtaatggattagattccatagaataaaatccttgaggacatagttatataaacataactgaggaagaaggaaaagctctccctaacagaataatacaactagtaaatgggaaaggaaaggagttaggaattcacgct

SEQ ID NO: 271913 - DNA, 437 bp, Homo sapiens
caccccccatccccaccccagttctcgcccctggaggcaaccagtgttgccaggttttgtttatccttctaaagggagacttcgctcgcaaacatgcatgtaaatacacgcatgcacatacagagcatgcacacacacacacatcctttgcttaccactggtggtgaggctcacgtatcctgcatctttcatatatatatatatatatatatatatatatatatatatatatatatatatatatcttggcgatattgacatatgttaagtgttagtattctgcagatcaccccatgttagtctgtgaagaaccaccttattccctgtaattgttgcatccgatttcattgaatgaatgtaccacgattgatttaacgagtctcctacagttcagccaaggttgtttctaacatgattcctttcgtaaaaaaaaaaaa

SEQ ID NO: 271914 - DNA, 537 bp, Homo sapiens
aaccatttcctgtcttttttattacatggacttactccaaaaaggagcgaaagaacttgcacatgtttccattctgatcagttctttctggattttccgggcatttttgttaccaggtgtctgaaagatcctgagtgctatgaactggctttcacatctgcgacctgctgtagccctcccacaacactgggcccaggggtgttgattttcttttacaaatggggcaactaaggcatgttaacagctgagcctaggtttgaacctggttccccctgtgctggtgcagagctgtttcccctgggatatatgtctccagtgtcactgcccttccactgggtttcctgcttttacctaacatcgactcacacggtcattttcggggtggcagggcctcctgtcttgtcgttttaatggccacatggcattccatcatgttgatggatcattttgtttggtcactccctcatcgttggatatgtgtgaggtgtctaatttcttgctataataaatgcaactgctgtattttgttcaaattac

SEQ ID NO: 271915 - DNA, 253 bp, Homo sapiens
tcgcttaccagaaagcaaagcatttttttttgttttgcacagtttcctactacataaaataggaaattcattttcatgatgttttattaacataatactcttatttttatgtggtaaaggttttatttaaagcaaattcttaaattcttaatacctacattgatcattattatataatacacatgtgtttgcctgcaacatttctgcttgaggcagactttaaaaaaaaccctttgtaaatcttttcatttgt

SEQ ID NO: 271916 - DNA, 1079 bp, Homo sapiens
ctttcataaggcaggggttataacgaccaacagagactccacaaaaccatttactcacaagagaaaatatggcacggattggattagaagtggaaagactaatgcatttttgtccataaggattagaagaaaaatggttctctcagctctgcaagtgagcacaacaagcaatccaaaagcattatttgtgtgaagcagtttgtagaatttgttccatttgtcactagaactagtgtttgaagctcagcaaaagttgagttatggttaagccccagggtcagtggccacgtgttcagagtagtaccttaggtttaaagctgattcacaacctgaaaaacactcagtggtgttctctcccaaattatcaatcattaacttgtggtgttttaaaaagaggataaaagattgcttgaccagaaaataatgacaataaaaaggaaattatatatagtgtgtgtgtttatgtattacacatataatacataatgtgaattttcccccatgataactattaaacatgtttatttaatagttaaatatccatctttgagggcttttaaaatttatatttctttgttaactttgaagttgagactgcatgcaaaggctgctccatttcaggtaaatagtgcctcagtagctgtttgatttaccttaaaaaggaaaacaaaatgacacaccttccaacccatagactttctgaggtctttgaaatacaacaataactagaagaggagaatttgcgtagtatagtgatatggtttggctgtgtccccacccaaatctcatcttgagttatggttcctattatccccacgtgttatgggagggaccaggtgaaaataattaaataatcagagcagttttccccatcctgttctcatgatagtgagttagttctcatgagacctgatggctttataaggggcttcctgcttcactgggtactcattcttctctctcctgccaccatgtgaagaaggacatgtttgtttccccatccaccataattgtaagtttcctgtggcttccctaaccatgtggaagtgtgagtcaattaaacttctaccctttataaa

SEQ ID NO: 271917 - DNA, 536 bp, Homo sapiens
tctccttcagagcccccagaaagaaccaaacctgtggacaccttgatttttagcccctagaactaggagtatgacaactgggacttgtcttatcatttatccacagtacgtgggaaaatggccggcacatgggacttcaataaatatgtgctcaatggtgaaccacctagtgctttatattttacaaatgtctgcagcagttttttgtcatctttatggaaaacaaggcacgtcttaaagtcgttcaagtccttcactttttcacactgaggtctgtcttcatatccacttatctttcaagtctatgaaaccccttataaaaactttcctttgaaatattttaaaattcaaggcccacggctgattaatactgtttctcctccataacccctaggatcctccagttctgggttttaacaagaaaaatatcctcaatcctctctagtttctaggtgtaaagcagcttggaccctcctgggtttggtgggtccatctctcttggagtccaactctgtattcctaaaaagcaattattg

SEQ ID NO: 271918 - DNA, 529 bp, Homo sapiens
tttaaaagaccaattcaattcctccattgcacgaactctgccattctggaatgctcttcctctcatggctcatttcttcttgtcatcacacttcagcttaaatgtcagttctgaacggcctttcttgacgaccggaactaacacagatatttgctcagttttaattctcgacaatgcacttaccactatctgacattgttttgtattattttatgtatttcactggtaattgtgtctcctctccctcctacccccaatagagtatgacaactgggacttgtcttatcatttatccacagtacgtgggaaaatggccggcacatgggacttcaataaatatgtgctcaatggtgaaccacctaggtaggcagatatgtacgctaggatcgtgctcgtggggagcttaggttctaaagggaaaggtcaataaataggagaaaaacaaacacctagattctgttaactgttgcatagaagagattgaagttatacagaagacactgaggagtctataatcagaagtttctca

SEQ ID NO: 271919 - DNA, 357 bp, Homo sapiens
caggctgactaggatgggaaattccagcctggtaaattctagtcagactggttctctgctctcgaaccctgtttcctgttaagatgtttatcaagacaatacgtgcacagtgggacatagaccctcatcagcacagcggggcatagaccctcatcagtaattctaattttgcccttgccttgcgatctttattgccctttgaagcatgtgatctctgtgacctactccctgtatgtacaccccctccccttttaaaatccctaataaaaacttgctggttttgcggctcggggtcatcacagtcctaccaatatgtgatgttacacccagaggccagctgtaaaatttctctctttg

SEQ ID NO: 271920 - DNA, 303 bp, Homo sapiens
gtcagagctcccccaccttccccagggctgctcttggggacgcagcaggacaggcggctcccctttctaaggggagataggtgctgtcaccaacgaggaagggaagtgaagaggataccctcccaagaggctctcctgggcacagccaaagcccagccaggccaccaagatctgagacgcttccacttgtccaggctgaggcagccatgggacccctcccctcttcgtgcccctaaacacacgctgatgtctgccttcaggtgctgagcggggtcctggtaaaacggctaatctccaaatacg

SEQ ID NO: 271921 - DNA, 444 bp, Homo sapiens
caggtactctgtagtttcatttgctaaatcttgcagccctgctgggaacccacatagctgagaagctctatccaggcctcagtcaggactgtactcaggggggtgtccttacacccagggaaatcagcttggaggagcccagggctagaatgcctggtgttgaaatggcctcaggggccaggcgcggtggctcacgcctgtaattccagcactttgggaggccaagatgggcagatcacctgaggtcaggagttcgagaccagcttggccaacatggtgaaaccccatctctactaaaagtacaaaaattagctggccgtggtggcatgtgcctgcaatcccaactactcaggaggctgaggcaggacaatcattggatcccaggaggtagaagttgtagtgagctgagatcgtaccactgcactccagcatgggtgacagagc

SEQ ID NO: 271922 - DNA, 452 bp, Homo sapiens
ttattctgagtgtcagcggtgggactgttttatcctgccatctcccctttcacccacaggaatgagcagcccagtgggtaaaggttggccagaactatagttgactcaactacagttgagtgaatgatctttgcttgcttttcttcctcccacactttggttggggaaactgaggccaccctgaagttcccacctacacctcatgactttctgagatccctggagggtggcttaggaaatgtctttggagatttgggaacacactggatacatcagttggtgagccagggaaattagcaggaacgagctcatttcgatagcaatgagctgagtctccctccagctgccagacatttacgaggctggctgggtgccggcggccggaggcctccaatggccctcatccctctgccttccggctggaaataattcgtgtttaaaaaataacaata

SEQ ID NO: 271923 - DNA, 313 bp, Homo sapiens
tccgcttgtagacaaaaaactaatctgcagacttaagctccagtgtcttccgtaaaattctctgtaattcgtatccgttgtgtttcatttgtgggggaggagattcagaacatgagcctgaggaaacttgagaaaggaaagcacaaaaaacgcagatgaggaagctaaaaatcagagcctttgataccgctgtcttgaagtaattgccaccagaacagctgtgaaacatctggctttctgaaacatctggctttcggggcagttggacacttggtgaaagagacattaactgtaataaactgggctgacaaaa

SEQ ID NO: 271924 - DNA, 372 bp, Homo sapiens
agaagggttagctcattcttttcatctttaagcttttaaaattacttagtctaaatgttgttaggtaatggaataaccattccttttcagcttttggtacatttccaaactggctggcagagccaggaggaagtgaaggcattagaaacactaactttggttggttgctaccgtcttagtgctgagactataacctttgttggttgattgatagagaacaagagaacacaatcctcgttccactaacaggtaaggaacccttgtgataactagttggtatgagagggagattacttgatagcatttcataaaaactttatcccaaaatataacatgtcctagaaataggatactgtgactgactgtactccg

SEQ ID NO: 271925 - DNA, 394 bp, Homo sapiens
agtaggaaacctttctttgtaggaaattgctgacttataggaaaactattttacagactcacatattaaaaaaagagaaaccaacaatttgttttttaattttaaaaacaagaatttaaaatttccacgtagttgcttttaagagtaaggccaggaaagaggaagtctttgggagaagcgagatagtgggagaagctcaggggaacgtggagggacagagctgacattgcctgctactgctgccctgtgatgctgaccaataattccttttttgctaagtaatggtggattcttattcaaagttcagagtgtttctttgaagaaaaaggaatttccccaaggaattctgggggtttctcctatctgtaaagaaatagctaaagtccagactaat

SEQ ID NO: 271926 - DNA, 345 bp, Homo sapiens
accagcatatatggaaagtcagctctctgtattcaccggatgtgaaacatcacatctcacaaatacagtatttatttctttatttctcacaagctttttcctctttaaggagcaggcagacctgtattttttattgcttttggtataagtggatctgtgcaattcaaagctgtttccttcaagggtcaactgcagtagtattcccgtcttataaataaagacactggaggctgagaggttaagcaagctggctaagataatactaataggtaataggtcaagattggaacccagatcgtcccctcccacagtctgtggtcttttcagaaactaattttcattaaa

SEQ ID NO: 271927 - DNA, 467 bp, Homo sapiens
tctagagttcagatgaggaaagagtcagggtggagaaacacaattgtgagatgttacaatgaaatttagaccacgggcacactgagattacctagggacccagtgaccctgacaagagctgtttcagtagagttgtgagggttaaagcctacctggcgtgtattcgagacaaaatgggagaagaggaattgaaggtagcaaacctagacaatactattgagttttcctgccaccaatgtgaatttatatccccagtccaagtatatttgaaataccgccagtcatttgtatcttacagatacattcatgaggaaggaatattttatttttgttcatatgtatatctttcccactagccaaccagcacccagagggaagaatctgtatttttctcatctttctattcttgccaaacacaatgcacgagctagataattattgcataataaacacctttaattaagaaa

SEQ ID NO: 271928 - DNA, 440 bp, Homo sapiens
tcctataaataaactgctgaactttagcatgtaccatattaagaattttacaatcttctgaattctgaaactgtgtgctttgaattgtaattatctctgtagtctttagagcaattgtgggcatcatgcataatctacttgtttatttaacaaacattgggcacctatcaaatgccagaaactttgtcaactactgaaatttgacaaagaagcacaatcaagagcttgtccttcaagcactgagagtctggtacaatcacttataggctagttcaagtgcaatggttctcagaggctggtgagccatgagattgtatttaagtgttgaacttgcaaataagtcacatatttgctctgtttcatggagacccctatagtattttacctttgctctctcattaattaacgagttaaataaaatctttgactttacatttgta

SEQ ID NO: 271929 - DNA, 1177 bp, Homo sapiens
cagaagggcagcctcatatggtttgtatggggaatacttagtcttgggatattcaaagggaaaagaggaaaagtccagggtttttcctggaaaaaccaggcttgccttagagctctcatactgacaaaccctttaattacatgtattgtgctgtgtattggcatgtagtcagtgttcagtgttttttggagttgttttttgctttttttgtttttatagacagagtctcactctgttgcccaggctggaatacagtggcacaatcatagctcactgtagcctcgaaatcctgggctcaagcgatcctcctgccttggcctcctgtgtagctaggattacagacccacactactgggcctggccagcagtgtgttttgacttgagcagccttggcttctttctctttccctcagcagcggggagtcagcttggccagtgcttgtgatgggcaagcctggggcatccccttctcatgggttgggtgaagcctctagtgctgaaggacaaagctcacacaactccccgcttttggctgtcagcaccagccagacaggagcaagaaccaggaacaactcccagcatctcagaatcaaatctccactcctggatgctctagtctttcctgattacaggcccacatggagcctgtttgaaggggtcgctgccatgggctgagtcagggcattgaggtctggatgtcagggctcagcagtgtccagtttccaggcctcattacagctgctcccatgaggggttcccccagcactgggcctggagagttatgagtctctcctgtactttctgctctggggacctggttccacaatcttccgggaaggtctttctggtgtatgtgctctgtttcagtttatattctggactcctatgaagatgtttcagcaaagtcttttgctcctttttgttttatgtttagttatgtctgttgtaaaaaatcaatgtaataagtttataattaattaaaaaaaaacccagtcacttctaatctcacaaaagaaagaaagaaaaccccgggcctcacatgccgggggccggacaaacggggtctcgattggccttggccataagtgtccctgacccaattttctttgtccagggggaaaccggcggggcccccaaaagggggcgcggataatcatagcccggtacctgtagaccg

SEQ ID NO: 271930 - DNA, 538 bp, Homo sapiens
actcacttctgttctaccagcctgcacttcagcctgcagttgcttgggtccaatccactcctacattttgctcttaaggatttgaactgagaggcatagaatgttgtgttcaattatggtgaccttgagctgaaaggttttgtagagcaagggttacggttggtttcacaagctgaagtcatgagtaagcagaaggtataagtgagccgaggaagctgatatgcagatcatagtaacagtcaacatttattgagaagttactttaggccaaacatttctccaagcacaccctatgtataatctcctttagtcttcatatccatgctatggacagggccaaattgagacagctgcaataagcattgaaaagattatggtgttttgttgccactcctgcaatgtaagcacaaacccaagataatttcatataatacccattatattgcaaaatcaccactttaatgaccatatggatgctttttcatatcaatttttttgaaatattttatcccttcatcttgattcccctgctttgctg

SEQ ID NO: 271931 - DNA, 358 bp, Homo sapiens
atatcccaattacattgattttatctttacaaattatatgaatgtattaaattatcacatgtaccccaaaaacatctattatgtatcaatttgaaaatttgttaaagtaaaaaaaagtattcaagtaacccatagaagacaaaggagaaacaggaactaaaacaaatagaacaaataagacaagtggcagacttaagctctaacatatcagtaattcctttaaattaaaagatagatggcagagtggattaaaaatgacacaattatataccatatatagaaaactcttctcaaacataatgacacaggtagattgtaacttaaaagttgggggaaaaagtctgtaggactaggtacg

SEQ ID NO: 271932 - DNA, 328 bp, Homo sapiens
atcaggactttaaaacttgattctaagagtaaaaacgaggaacactttggtgggaaaggagccatggagctcagtgagatgatcctcacagtgtatggtcaggacaggcatatctaaaccacgtgacatgcatcttactcttatttcatgctcagtgcctggtacagagtcagacccatcataggtactcactgttcttggaaacaaacactgagtagtgacccctgacgcagatgttaacaatgtccctggcctagggtactttgagcttttcctaccattcatcttcaccaatgaggagctcttcctggggtggttttgctgtagt

SEQ ID NO: 271933 - DNA, 443 bp, Homo sapiens
tcaatcagctgggtgggcgagataacatttagagggcacagacccttcttatgagttgatgatggctttggttaccaagaaaaatgtacctatacacacacacaacttttgcctacaaatctaaggactcacagaccccccaatgtccgtctgcaaccccaacagttgaagtccattgccacctccaggttaaataactgtcatcaacgactctattattttgacaatattgatcaaaacattaaatgcccatactcttcaactaaataatttcacttgatggaatttgtcctacaaatgatgcatgtgaggaaaataacaactataaaagttgtttattgcagcctgttgattacagaaaagctaggaaatgatctcttcatccacaggggaccagttaaatcaattgtatctacagagtgaaacactctgcaatcttcaaa

SEQ ID NO: 271934 - DNA, 624 bp, Homo sapiens
tgcccttggcctgtttctatgaagctccctggtgagaagagtttgtcttttcctttgcaccccgaagcccctgcctgggctaaaaacgtgcaggaatgcggcatttggagaaattacacctctgagctgccaggatatattcaaacagccaagaacagaagttggcccaactgggacgcatccgtggagcagcaaatatgcacactcctggcagtcatgcaagcaagatggtcaacgtcagatacacaaggctggcttgagcagtgttcactggggaaaattcatggacaggggagcagaaacagaagaaaaaccacccaccccaatgtcttgcacactgcaacaactctgtgaacactggtcattattctactgttgttattggtgctctttactggccaaagctcagtgggaggactactatctaacacaagtgccctgcaggacagaaagaacaagagtgctagagcttttgtgcatctgggccattttttcatttgacatatgaagaatctaagaacctgcaaggtggaagtgacctgttcaaatagcagcaaagtcaaaagcagatgtagctctctatctctgagcctctaataaaattaatctaaatagttgtcaaaa

SEQ ID NO: 271935 - DNA, 303 bp, Homo sapiens
ctataataataattatttatttatttattgtttttgagtcagagtcttgctctgtcacccaggctggagtgcagtggtgcaatctcggctcactgcaatctccacctcccgggttcaggtgacgcttgtgcctcagcctccgaagtagctgcacttacaggcatgtgccaccatgcccagctaatttttgcatttttagtagagacagggagaaaggagaaacatcttcccaaaattcataaccataactaggccctcgtaaaagtctgtgacccaaatttccactgactatgtgatcttaaa

SEQ ID NO: 271936 - DNA, 455 bp, Homo sapiens
aatttcaggctcccggagactgtaagtggcagagttagaatttaagcccagatctatgtaactccaaaattcttaatctctaaactgaagaattgttttcagtcttgttccagtacctatactagatttccaagaattcagacaactcctaatctaccacataggggaaatagggtctataagaatatcatttatgtcagatagtgaaacaaacatgagattatttacacattccagacccaggtgacctaaatcttcaaagaaggtgactgatccctttggagcaggtgctgcgtacagtgagagagaagtatgtgtattgtgtgcagcggcatggatggggaacgatttcttctgcccaaggatatgagggtgtgggtggcttctcagagcagattatgtctgtgttgggttttgaaggatgaataggcatttgctaagcatggtttctttga

SEQ ID NO: 271937 - DNA, 278 bp, Homo sapiens
tagaaaaatgttctctgtctagggtgtggacgaaggcactttactaatcttatgcataattcatccttggttgctggggcactcaaagttgaaactttgccctctgataaaattcagctggatgttttttatttattagactctgatccctttaggggtttagcccttattgcgagcccagggattctaatttggctaagccctagctgtgaagacttttcttactaatttgcccttggtgaattttagctcttgtaataccacctttaaaaaacaaa

SEQ ID NO: 271938 - DNA, 428 bp, Homo sapiens
caaggcagccaatgtagacccacagaggcttcagttatgagaattagcagaggaacaaacaagtatgtttactatgcataaaaaaacacaggaataaattaacagagtaaaaaataaagacatataaaaataacacattagaaaagaaatgaaacagaatttctagaaatgaaaatacaatctcaaaaagcaaaattccaatgaatatgagaaatagagaaaaataaatcaatatgaacatatatctgaagaattacctcaaaagcagagagacagaagaataggaatgctagagtaagaacatctaatccaaattgcagaatcaatgaggaaagagagactagggcaagaacagttttcaaagacatatcaggtgagtattatcctaaagtgaagaaagacacaaaaccacaagtttaaagggtaaa

SEQ ID NO: 271939 - DNA, 219 bp, Homo sapiens
actaaaaaggtctgagagaccacacgcaggtcttcagctttagggtagacagaaatggagaagaaggaatgagagccctgggaggaaaacttttcacttcagcatattttggatagtgatgtcaaggatgacagaaaatagaaattattattttatgtaaaaagttgtatcctagaactgagagtatgaccaaaagcctatgtttatttgccgtcaatt

SEQ ID NO: 271940 - DNA, 296 bp, Homo sapiens
aggggatatagaatgtccaataccagagcccttacacagtggaaagcactgactcaggcacaagccaggccactggcaatcaaggtgacacaccttcttgccaccatcgccctcctagcagggtcccttcaatggtgtctcagagccaaccatcatatcctcttatcaaccacctttacaatctccggagctatttatgagctgacgccctcaacaagtcagctttcagtacaaactcctagaaaggcaggtcaaaggtctgactccagagaaaaaggcaacagctccctctcaca

SEQ ID NO: 271941 - DNA, 444 bp, Homo sapiens
agccaaaattcctgggtctaaatagtggttctgctacttaacatttgtatgagcttcctcatctataaaatgagcataacatagctacctgctagatactaagattaagtgaattgtgcaagtaatgtgcttagaatagtttctggggctcagtgtcagatattttcacaggacgtatacttggtattaaaggttggcattaaaacagtctgattaaatatttgtacttttgccagtaacattcatgaggataggccatatctaacttatttcccatttccattgtatctagctcagtgcttgacaggtagtagatgcttactatatagttttgaaagaacaaatatatctatatactgccaattaatttacctgtaaagaaaaacaatataatttttttttcctttacttattatttttaaaatgtaagtttcctgtttaatt

SEQ ID NO: 271942 - DNA, 221 bp, Homo sapiens
gttctttgttcctttttcttccttttctgacttattttggataatttagtactatttaatattccattttatctcttcttttagctttttagtaccccttttaagtcattactctggagattatcatatgcatccttaagttctcagtctaccatgaattcatattatttcaaaatgtagtaactttatcacagtgaagctccatttaacttccttctatc

SEQ ID NO: 271943 - DNA, 377 bp, Homo sapiens
aaaaaatgttcaagagaatgcagctgaaatgcagggcgcataagtggatatagtgggaaagaaggcaggccagcgtcagacagccgcggggccttagctactgggtggaggaggagtatgaactttatcctgtagatcagagctgcaaactagccatatctaggctgagtatttggctcctgcagtgtttggggagttaatttgttttttacaataagtaatacgttcaaatacatttgaacagggcgcaaaattcaaaagggtattcagtacagagtaagtccccttcctccagccactgtttccctgaccaggggcaagcattgttaacagttgttttcaccagagtatttttaaaaagtcagagccaacattta

SEQ ID NO: 271944 - DNA, 425 bp, Homo sapiens
gagcattttgtatatgaagaacagagtgacaggaagaagaaagagcaccaggctgagcaccattcgacctccactaatacacgtctgaccttgttcaagccccttcgcatctctggctcaggttcccctattaagtgcaaatcacagcagtaactcaacaagacatgggactcaaaaatctaaatgacatctcaacaacatgtgattgtacccaggcatttccccctgggagcaccaaagggaagaaggtaatttttcggtcttttggaagctgtgccctggtgccaagatgcctcaagccaaaaccacacagagcagcctgcctgacagatgggcccagtagcctttatcaagctcttaggctcttatgagcttccctacttgcgaattaaacataaatttatcctttgcggctctttcataaa

SEQ ID NO: 271945 - DNA, 565 bp, Homo sapiens
gaggttcaagaagtagaggttagctctggattggatgctttcagaaaattgggtaattctatattattttaatgaatttcatttaagaagtgggaaaaacactgaaattaaatctataattggtaaataagcagcattcactcatactagcaaggaaaaagagctcttttgtctttttcttttttttttttagacattgtctcctcaggcatgaagtctggctccaaccgggttataaggttattttctggtcttggtgttatatgaaattatttgcattcaataggagaagattatggccaacctgtgagtgtcagaacagttccacgttgttgggctgattctcttctcaaaatattgttcattgcagagccatattacttactgaaacctctaagtatagtctgggattgcttatggatctaagtaatcttagagctgagattacttaatttctactattattttcttgataatgtatccctaagtttaatcttgttatttccatctgagatttgtgcttgtctgttattaaatattcttaataaaaatttaaaaaacaaac

SEQ ID NO: 271946 - DNA, 449 bp, Homo sapiens
taagaccaagttcaaatagtagttatcaattaagtcttcaagacaaatcagtttcttccctctttgtacacccattctactttctatctttttctattatatttgcttaggtttttgccatcccagctggactgtaaaattttctttgttttaagtgtttttattttaatttttgtgggtacatagtaggtgcatacattgatggggtatatgaaatgttttgatacaagcatacaatgcataataatcacatcatgtaaaatggggtgttcatcccttcaagaatttatcatctgtgttataaacaactcaattatactttcaattaatttaaaatgtacaattaaattatttttgaccattctcactctgttgtgctagcaaatactaggtcttattcattctttctattttttgggcccattaacatccccagcacctcccctgcc

SEQ ID NO: 271947 - DNA, 958 bp, Homo sapiens
gaggtggaactgcttgctggtagtgacacaattgggaagaaggagaagggccggagtctggagttcgtgctctctgacttctgtgggtagcatctgccattctgctggtgctccttcagacctttcagacagtgcagaggacacagaggaatcaagggacagctgttctcttacaaaccttgaaaatcctgtacagagccctcagataaccaaaacgtggtccagaactgaatcctggggccaacatgcccatttagcacttctctcaatcagtccttttccccaggtgcattaaacagggcagctgccttcccaccctatgggcaaactgcttggcagctaggagtgtgcctgctcatctcccaggctgctttcctttgcacctcagcaaggagggcaggccgtgcatccagggaagcacatagttactccttctgccagaaggccaccccctaatctggtttaccgtggacactgaagtcactccctgtctcctggccatgaggaaaactcctttgagaggagcctctgaagccagtggagagagtaaaaagtgagaatcctgcctagttgaacaggcagttcagcctgttctggaaagagttaaggctgtgtccataccaagccatttaaagaatctgcccagtagaatcaatattgtcaaaatgtccatactacccaaagcgatctacagaattaattccattcctatcaaaattccagtggcattgcttacagaaatagaacaaataatcctaaaattcctatgaaaccatgaaagaccccaaattactaaggcaatcttgagcaagaagatctaagttggaggcatcacacaacctgatttcaaatattataggctggacatggtgactcacacctgtaattccagcactttgggaggctgaggcgggagttcgagaccaacctgggcaacatagcgaaaccctgtttctat

SEQ ID NO: 271948 - DNA, 471 bp, Homo sapiens
gcagatgatgaatctggttggtaaaacaacgagggatgttcaggtggctttgctatgagagcagtccaggtgaggaaggacatacttcttaggtgtgactgctgtctcctgagcactggtatgatacggccacagtgaatagccctgcagttgggctaatggctaatgtctcctgcaacccaaatctcaactgagacgatttcagaatgtagcaagttgtcagcttcttctcagttaacacataaaatgcatacagccaaatatctggcaaaagttcaagagttcaattttcctcaattactgatgcttacaggatttttcttaacatattctaaatgaattagctctgaagaatgaccctggccataatcacagcacagtgggtaagtgtttagacttttatatcaattaaacataacattcatatccaaagtgttttagtgtatctgacaataaaaccttttccaccat

SEQ ID NO: 271949 - DNA, 891 bp, Homo sapiens
tgagctctgatcatgccactgcattcctgcattccaacctgggcgaaagagcaagaccctgtctcaaaataaataaataaataaataaaaataaaaataaataaaaattgattgggagttctttgtggccaagacttgtcaactgatagctttaaggggaatgtatgctgattcctaattgttatcctccatccctctatcttatctcctgttgcaatcataaatgatggctggatgactactccattcctctggatgtaaaatctacattctcttgcctgaggtggatacgtttgcttgggttctgtttaaggagatggggccagcagtgtgtttcagggcctgtgaaatgtgttctctatccgggcttttgcttaatctctgttttcagtcttgcctatcagtcccactgtcgggggtacctcgtgtctgagtctagaacctttccaggttgctgtgggacagattagcctccttgttctcagtatccccctgacctccacctttgttgctttgctccatgaattaaccattttccatgtactgtcattgtctaatgaagatgaattctcttctgttggtaaccccattccttttttgtaattgtgtgcttatacaatgtttattcttcactgtatttctattggagcctcaggacaaagagcagatggtgagaatctgtgttcagtgttaagttttccttctgtaagacatgtgcaacttgtgtttttcactgaatagatcatggacttaatgcatatagagctactttgtttttcatgattgtgccttcaattatatgtagaaatataatttgtgaattgcctgatgaaattttcctaattttgaattatctttgcattcctataataaacactgttagaatggcaa

SEQ ID NO: 271950 - DNA, 398 bp, Homo sapiens
tctgatctgctagcctaactattccccaacacctttaggaagataggtcttccctgaccctcagtctgaggtctagaagcccttctgccttgcctcacaggcatcttccctcctcccccgtcccctagaccagtccaacagcagcccgtgcagcctctgaagtccactcccagtgctagctgatgggaaccccatgggctcctgtctgctatacaaatggaacagactttcttcagagccaaccccagctgccccactgaagctggttgccacagtgattttcagtctcataccagattctgatctcttctcttgcccacctttggtgctgcagagtggatcatcttgttttatactcaagtcatcattaaaatttatagaaaaagagagaatttaaa

SEQ ID NO: 271951 - DNA, 596 bp, Homo sapiens
cccgcctcagcctcccaaagtgctgagattataggtgtgagcctctgtgcccggccttgatttttcttttttttaagtgttaacttaatctttctcctgaagattctcagagactaaagatgaaagaagattttcattgcaaacttcttacccgttattaacaagtaaagcccatccttctgacacatggttggtgtcagtttggcattagatcacccttcctgtcctgaatctcccgacaatggaattcaggtgtggacacttgctgtgttgaaggaaagatgtggaatagccgaatcaccgtatgactcagtctgtactagagaaacccgctaaaaggctcaatcgtgtcacaaagacattcgtccacatgcatgtcaggacccttggagctattccacccagaagaccagagcagaggaactcaggctgaagaattaagtggacatttcccactgaaggatcatcagcaataaaaaggaagagcctctgaaaaactaacaggagtcatttgaaaagtatgatgctattttaaaaaatctatctgtaacatcatttcttgaacatattgcaagaaaaaagctatgctttcagtg

SEQ ID NO: 271952 - DNA, 321 bp, Homo sapiens
tgctggatggaaggactctgagcctaccaaaggaagcgtatttacaaacctctaggtactgacttgttgctgaaggtcagaaatttgcaatgacatttggatgtattcaagggtggaggggcaggtttggggaaagttcttttaaagaaaaaatgcaaaatttgattacaagaagctggggtgcctcccagggcctcggaaagggcttgcacaagtgaagcaccctgaagataatgcttcattagctttacagtgaagccacctctgaatctctgtttggtgtttgtccaaaatattccaagttgaaggcaggcctgatta

SEQ ID NO: 271953 - DNA, 447 bp, Homo sapiens
tgaaaaagatggacaagcctgacattagcagctcactgttgagcacacggccccctgcagaataaacaagtgtgtggtttccatctgatgaaggtgggcatgtagttcctggacagtccagtgacttccatcattccacagacaagatcagatgccctctctaccagccaccgtgctgggaccggcccaatctgtgtttcaaatcagcttgtagcacgcagggattcaaaatatttaaagatgaggtttgaaggtacgtctggagaccaaggacgttagttctggaggtccccgtctcctgcgtgtttgcggagctggtgacagtgccctctccccgtgctggagagggctgaggagaggctgtgtgtctcagcaggatgccagtcaggattcttctggctatgggcttattttttgcaataaattcatcgttaaagtcccaaactt

SEQ ID NO: 271954 - DNA, 218 bp, Homo sapiens
ccgccacctggatgcactgaggtgtgcacagccacgtggagatgatgctgggggctcacggtgactctcaggaggccctggcctggcctatctggagccttctctgtgaaatgaggctggtaacgcccactagcagggttgtaggggacatggatctgtggccacctcctcaaggggtgccacacgcaccaggtcctgactgggagtccggcccccag

SEQ ID NO: 271955 - DNA, 338 bp, Homo sapiens
tgcatcacattgacccaaattgtcacttttcacttgcccttctttcagtgtaagaagaagctgtctttggagtgagaacaagggtgaggttctggctcagaaaccttagaatcacagacactgttttcctgaaaacattgcttctttctctcatctcaaagaaatgccacaagtcgtgtgtaagtataacatgctggacaggtccttattaaatttatatttgtattttgatattattttaatcctgtagaagaacatatacattttggtgtttattcttcttgattatagaagtttttgtgtttctactttgtttataataaatattttaaagttaa

SEQ ID NO: 271956 - DNA, 552 bp, Homo sapiens
cttgtaccttttatgttgacactgtaagtttgggcactaaaacctaaggacttccatgttgtcattgactctaatctagttagcgttgctactgtatgcttctagctttgattaattcatttaaataaacgtcactgaacttattaaggccttcctagcaaagctctaattattgtaagattccttttgtcggagttgagaggaataaagaagttttgagactcatggtaactttagaagatagtatcatgaaattatttgatttgaatcattgagaaaagccagccagctccttattttaactaccttgggtataggagtatgtgctttgagaatgtatacattaattttttgcacattatcaagaatataaataattccagatgctaaagaaatttggggattatccgttactgcctagtttataggctctgtaaaattgaatagatgtaataagggaattaacaaagactctgacttttaaagtaagagttactatgactttattttaaaagtctgtcttattaatatatctgagatgtgaataaaatc

SEQ ID NO: 271957 - DNA, 511 bp, Homo sapiens
ttggtcatagcaatcctatgaggtaggtattataacacatactatacaataaagaggttaagttccttgtacagtgttgaacaatcaatgagtgtttgaggacaccaccaaagtagtataactgataccaagacatgttgtttacccttaggagctatttctatctaaaagcgttaaaggtgttttgctcaaataactaaatttaaggtagtttgaaataagtagcataagtgtagtgctaccaagatgtagtggatattcagagggaagattattttggagaccacggaaaggctttaggtgatggtttctaaatggaggcttttagaatcaataagatttcatcaagttggcttatgaggatgtaggagatgaactatttcagaaggtactcattttttacatcaaatacgttcaatgattctagtcttttgggaataggaaagtgatggtgaaggggcaacctctttagttttcagttttcgggattcatatactcactctatgacca

SEQ ID NO: 271958 - DNA, 297 bp, Homo sapiens
gccactgcactccagcccaggtaacagcgcaagactccatctcaaaaaaaaaaaataataataatatggatttaaaaatacagtataacaactacttagtatttacattgtattagatattataagtaatctagagatgatttaaagtatgtgggaggatatgtttagattatgtgcaaatactataccattttatatcaaggatttgagcacctgtgaaagtcctggaatcaatgttattaatacaggacctgaaacatgatagatatttaataaagaacagctttattattgtta

SEQ ID NO: 271959 - DNA, 473 bp, Homo sapiens
ggcggtccggacatgatttatagttgggtgaaatcttcgcagtaatggtcattgggcaaaaagccggttagcgggggcagggcgtcctagggagaggagggtggatggaattaagggtgttagtcatgttagcttgtttcaggtgcgagatagtagtagggtcgtggtgctggagtttaagttgagtagtaggaatgcggtagtagttaggataatataaatagttaaattaagaatggttgtgttaggatcacaggtgtgagccaccgtgcccagcctctttagtcctgttctgtttcttggaagcaccatgcttgtcccacctacaggcctgggtctcagccctcctggccctcctctgagaggcctctccacagccacactctccattgtccattcattttgtttctgttgcatttattcccgtctcaaagtctcttgttcatatattgattacttgcttatccactgcc

SEQ ID NO: 271960 - DNA, 985 bp, Homo sapiens
agctgcaaacatagataagcgagctggaatcttgcacaggggaatgtcagcagctgtgtcaatagaaaagggctacctgtgggccaggcatgtccaacatagaggctccatcttccctttttttgtttgttaccacatgtacagtaaaggaatgggcagtgtggcacaggccaggcagaggacccacctgcataataaaatttggttaggggtgaccagcttttcataccctatgcaaatggcacagctattcctaaccagtttttagtgtctatgcacacctggtctaatcaatcttttgcaccctatgtaaatcagaaactgcctcctcaccaggcacctataaaaacccctgcatttcactgcagatccagcaacttatttctctaggacccctctctctagcagggagctattctttctttcacctattaaacttacgctctcttaaactcactctttgtgtgtccatatcctttatttccttggccatgagacaatgaaccttaggtatcaccctagacaacagggctgcttcaataccagaatctctgggacacagctaaggtagtgttaagagggaaatttatagcattaaatacccacatcaaaaagttagaaagatctcaaattaacaacctaatatcacaactagagaaactaaagaaacaagaggaaaccaaccccaaagcaagcaaaaaacaagaaataaccaaaatcacagctgaactgaagaaaatttagatgcaaaaaactattcaaaagatccacagcctggatatggtggctaatgcctgtaatcccagcaatttgggaggctgaggtgggatggtttcttgagctcaggagtttgagaccagcctgggcaacacagtgagaccttgtctctacaaaatatcaaaaaattagctgggtatgatgaagtgcacctatagttccagctacttgggaggctgaggtgggaggattgcttgagtatgggagg

SEQ ID NO: 271961 - DNA, 552 bp, Homo sapiens
tacgaatgagactggaaaatacagcgtgtatttgggaggctgtatgcctagctaaaaatcaggaggcttattactaactaagaaggaagaatgtgatactgaaggtcaactggcaggttttgccacagtgtaaaaatcaggatttcatagatatacagaatttttgaataagtgactttaaaatcattccatacaaatccctctttttcagatgagggaagagaaacacagaagttaagtgatcagttatgatcatgtattggtaggagcatgattagaaaccaagtttcttgggccgcagtttcatattcttgatgctcaactaacctatgaaattaaattagggatgatggtttaagaaaacgattcacatggaacccccttaaattagtttatttattacatattttaaaaatttatcctgatgtacttatttaaaccttaagaaccacataatactatataatgcttttctgtacaaatctcaagaaacactttcattcattaaaacatcatgaaaatccttaaatgtgttaaatggaaaaaaatgaa

SEQ ID NO: 271962 - DNA, 310 bp, Homo sapiens
gaataaggaaactgcttctttcttttccaggaaattcatttaaaaatttgcacctcacatacaataatatcactcatagtaagtctgaagctgaagagaggggagcagggttttctccctaaatttcatcctactaatctttgaaaatcctcaggtattaatcttaattaatagtattagtaatatctcccagctgggcatggtggctcatgactataattccagcaatttgggaggctcaggcaggcagattgctttagccaaggagttcaaaaccagcctgggaaacacgcaaaaaccctgtctctac

SEQ ID NO: 271963 - DNA, 564 bp, Homo sapiens
acaggcgcgccaccacctctggctaattttttgtatttttggtagaaatgtggttttgccatgttgttcaggctggtcttgtactcctgagctcaaacaattcacctgccttggcctcccaagtgctgggattacaggtgtgagccaccatgctcagctttctggctaattttacaatttttttgtagagacggtcttgctatgttgcctagattggttttaaactcctgggcacaagtgattctcttgcctcagtcttccaaggtgctgggattagagatgtgagtcactctacctggctagggctcactttttggaaggagtttacctctcccccaccagctgataatttttaccaaaagtcgtatgttttggttccaagtatgtttatggcagttatcctgttagtgatgtgaacagaaaaaataagagtgctgagagaaagctgttccttctacaaaaactgaaggatgctggcttggtttctgtcgctacagaacaagttaccaaacacaaatttggcagcttgtaacaacaagcatttacactctcacagtttctgtg

SEQ ID NO: 271964 - DNA, 344 bp, Homo sapiens
ctagcccaacaaagctaattacattttaacttcagcaaaactgaggttgacttgactgctgggtctgctgttagcccatcccttcaaaagcatgcttgatggtccatttctctttcattctgtatagataagattgattcattcatactcatggcttcaatcatcactcagtttatatctgcacagtcatcacattactcaaataaacatgtttcttactccttagcaagataatcataattagcatgaaaatttatcaacatacctaagctctatgtcagtgacaatatcttacctaatgaggtaagactgggaggtgttacttttagcagaatgtacttcat

SEQ ID NO: 271965 - DNA, 456 bp, Homo sapiens
catttctctgcttaaaacctccgcttgaattcttttgctcggatgttcgtggctgctatgaattccttccctccctgcatgcatggagaggtggagtctgtccctccattgctgggaacctgggctggcctgtgactgctctggctaatggagccctgcagaagtgctgctgtgctttatggagactggctgtttaggcttccggccagttggaagcctttagttgctaagtgagaaaccccggtgggttctgctgaagagagaggccacatagaaagcaacacagtgccagacatatgagtgaagaaggctctcagcagaaccttatgggtgcctccagccccagcctctagctggctgcagcccatgggggaacccactaaagaaccacccggctgaacccagtcaactaacagaaacatgagaaagaatattaaatggttgtgttaagccact

SEQ ID NO: 271966 - DNA, 476 bp, Homo sapiens
aaatattgcctgttttcttttgaaatacagaaattcacaactggattttaagcagaagtttacaatctcaatattatgtaacaggtcacattgccagagaagtacatcaaatatttatctagtgcttactgtgtaccaggtgctggtacagtgggaacagatgtgataaagtgggcaatggaaagcgcaatgcagccgtattcccttgaaacttttcatgattccctttttactgttttcagccaagggacttaggtagtattcttctgaagaaaaaagacctcctttagtgatcagttaccttttgatattttaaaatcatactaaaattttagttgttaaataccatggtgctacaataagaataaaaagataaattaatggatcagggtgggtaccccaaaaatataccttttttttttctttgagacaggttcttgctctgttgcccaggctggagtgcagtggcgtggtca

SEQ ID NO: 271967 - DNA, 271 bp, Homo sapiens
aagggattctttttactttgttgattttccctattctaattttttcatagtcttccattaagggctcctctttgaatgattattttaaaatttaccttcctcttacattgttttccaaatcaatctttttccctttctaaaatagtacttttggggccacgcgcggtgcctcacgccgcaatcccagcactttggaagctcgaggcgggtggatcacgaggtcaggagatcgagaccatcctggctaacacagtgaaaccccgtctctact

SEQ ID NO: 271968 - DNA, 468 bp, Homo sapiens
ttatttaattctctaatgtatgggaagcagcgtagcatcgtccttgctgttgctatggtatttattgctgttgagccttcaggaaacctctctgcatctcggtttcctcatctataaaatggagatgataactgtacttacatcatggagctgctatgaggatcaaagaagttatcaacacttcagaatacggccagcacataggaacaatatatctatttgctaaatcgaaggataaaaagaaacctactttgtatggaaaaggagaaagaaaagagtaagattgaactatgctttgctgcatggtgggtttgatgaaagtggagtcacgctgattggtgctcaagataaatgtcttaggggaagactcatacccagtggaattttttttagtgaaatatcgtggctcatggactgtgagatttgtcatttgttttcaataaaatgataaaaatcataaaaaatttt

SEQ ID NO: 271969 - DNA, 813 bp, Homo sapiens
  misc_feature (4)..(4): n is a, c, g, or t
gggngaggggcaacgtatataaatgcgcgcaggcgtagttaagagagcgcattttgacttcgaggcaccgccgacgttactgtgtcgccatggggcgccgtccagctcgctgttaccggtattgtaagaacaagccgtacccaaaatctcgtttctgccgaggggttcctgatgccaagatccgcatctttgacctgggtagaaagaaggcaaaagtggatgagttcccactcggtggccacatggtgtctgatgaatatgagcagctgtcttctgaagccctggaggccgcccgtatttgtgccaacaaatacatggtgaaaagttgtggcagagatggctttcacatgcgagtgcggctccatcccttccatgtcatccgcatcaacaagatgttgtcctgtgctggggctgacaggctccagacaggtatgcgaggtgcctttggaaaaccccagggtactgtagcccgggtccacattggtcaagtcatcatgtccatccgcaccaagcttcagaacgaggagcatgtgattgaagccttgcgcagggccaagttcaagttccctggacgccagaagattcatatctccaagaagtggggcttcacgaagtttaatgctgacgaatttgaagacatggtggccaagaagtgcctcatccctgatggttgtggagtcaagtacgttcccagtcatggccccttggacaagtggcgggttctgcactcatgaaggttttggcagtactgtctccttgggccatgctggtctgacttatgcttactaataaattctgtttactggcaaaaaa

SEQ ID NO: 271970 - DNA, 1341 bp, Homo sapiens
  misc_feature (4)..(4): n is a, c, g, or t
  misc_feature (1341)..(1341): n is a, c, g, or t
gggngaggggcaacgtatataaatgcgcgcaggcgtagttaagagagcgcattttgacttcgaggcaccgccgacgttactgtgtcgccatggggcgccgtccagctcgctgttaccggtattgtaagaacaagccgtacccaaaatctcgtttctgccgaggggttcctgatgccaagatccgcatctttgacctgggtagaaagaaggcaaaagtggatgagttcccactcggtggccacatggtgtctgatgaatatgagcagctgtcttctgaagccctggaggccgcccgtatttgtgccaacaaatacatggtgaaaagttgtggcagagatggctttcacatgcgagtgcggctccatcccttccatgtcatccgcatcaacaagatgttgtcctgtgctggggctgacaggctccagacaggtatgcgaggtgcctttggaaaaccccagggtactgtagcccgggtccacattggtcaagtcatcatgtccatccgcaccaagcttcagaacgaggagcatgtgattgaagccttgcgcagggccaagttcaagttccctggacgccagaagattcatatctccaagaagtggggcttcacgaagtttaatgctgacgaatttgaagacatggtggccaagaagtgcctcatccctgatggttgtggagtcaagtacgttcccagtcatggccccttggacaagtggcgggttctgcactcatgaaggttttggcagtactgtctccttgggccatgctggtctgacttatgcttactaataaattctgtttactggcaaaaaaaaaaaaaaaaaaaaaaaaaaaaaaaaaaaaaaaaaaaaagaaaaaaaaagaggaggggggcggctataatagtattttccctagtagggggcgacagaagtattatgctgtgtaccaagggtttcttttcgtaagacgaaagggggccgccataataataggtaacggttactattatagtacgcgaggaggcagagggccgcgcgttttattaaaaaagtagtatagagttgggggagaaaacagcgtgagcacaacagtagggagaaactctttctggggagacaaaggagagagcaacataatactttgtggaggggggggatgaacacaatatctggggagagaagattatttgctctccaaagagaagaaattttatgtaaggccgatcttgagcgggagcacaaattattaacaactgtctagcagcggtgtatataacaggggttggaaaaaactcgacgtggaaatattaccgacgggcggtacttaaagagacttttgggtctctaaggagagtattgn

SEQ ID NO: 271971 - DNA, 378 bp, Homo sapiens
ttgcacaatgatgaaattgcctaatgatgtgtttctcagaatggatttctgttgttaagcagtgcatgacagtattcaggaatcaataacctcttaggtgggataattatattgtggttttgttttttaaaaagaaatccatctcttttaaagagccatgctgaaatattacggatagtatgatatgttgtacaggatttgctttccaattcttgagagtgagacaaggtaggaagggaagtgggggagatttaaatgaagcaagattgaacatgttttaactgggtgacgggtacgtggaattcattgaattgttatctttacttttgtaaatgtttgaagttttttataataaaaatatttatgggttttttgttt

SEQ ID NO: 271972 - DNA, 321 bp, Homo sapiens
ggctattagtatttatttgatacctatcacatcacatgttttttttttttcacttaatactgatcctgatctttaaagcaattgttattgttcccatttttctgatggaaaagccagaaagtgagtaagttacttacccaagtttaaacagctataaaatagctatggcagatctgttggttgcttgtctataaccatttttcttcttcttctttgctggctgaacatgcttctcattaaagaagttgaaaatgctggaaactcaaaaagaaggaaaatgctggaaacttttttaaatttttgaaacagggtcttgctttg

SEQ ID NO: 271973 - DNA, 412 bp, Homo sapiens
gagccaatgtagtggctggatcttcaatcgtgggagccgaggtgtctgtggccctggaaacaccatttgtctcccagcaattgggcctcttagttccactttcagttgcactgccgtcttctctagggaggcagttggggccaagcacagtggctcacccctgtaatccaagcactttgggagaacgaggcagctggatcacctgaggtcaggagttcgagaccagcctgaccaacacggtggaaccctgtctctactaaatacaaaagattagctaggcgtggtggcgcatgcctttaatcccagctacttgggaggctgaggcaggagaatcgtttgaacctgggagacggaggttgcggtgagtcaagatcatgccgttgcctgggcaacaagagtgaaactctgcctc

SEQ ID NO: 271974 - DNA, 340 bp, Homo sapiens
aagtgacctgcactacttcctagattgggctttcagacgctggttgtgcttcttccatattcatatccccttttctgccagcaggaatctggagctggtggtaccccaacttcaactgtgcagatgggaacaatgtcctaggatgtggcagaggaacatcatgggaaaaacccaagatctctgaatgactggagcagagacaccccactcgcctagactgttcgcgtgtaatttcttcaagccacagtattccagggtttttaatagtcatttggcaataccctgcataatatgataaacaagtgtgcaaaacatgtcagatgggataaatatgattgag

SEQ ID NO: 271975 - DNA, 638 bp, Homo sapiens
tgtgggtgtatacaattataaacacttaaaatctttgtttgtatgtagattatacctcaacttaaagaaatgcatcctattctccctcctccaaagcattttactgtgtacaactctctgtagctctggacttttctaggggtgcaatgactattttaaatttaaagtccacatcagggcaaggcctccgtataataggaaaactgaacaggatctttgaaactgagtctgtcccagaacatttctgatgaaaacagtgcccgtaacgcaaagctaggacagggcaataaaccttgtaagtctggccacatataacatttttcagttaatacagatagaatctgaatctcagaagctgaggcaggaggatcccttgagttacctgtttttttctgtgcccccagtttctttctttctagaaccaagctggcttcctgccttcaggtccaacttctgctccttcctgctgcccgccactatgaaaatccctttccataccctggagtctcttgtcctcctccttcagacagagctgccaagagcaatagctttatacgcagaagcccatccacttctggtggctttatgtactggggcccaccctcttctgcagccgatgacatttgaaatcccatcca

SEQ ID NO: 271976 - DNA, 511 bp, Homo sapiens
aatatgtgcctgtcttctctaaggttcccgtttgttctcacgttggatctgtctctccctcttcttctccccactctgcgtgtacgtgcctgtgcatgtttgtttcgtcatctctgtgactacctacccacctaccactttatcactctttttttggtccagtcttcccccgtgtctgagactgttcatctgtggccctgccgctgttccaacctcggggactttccctcactgcacgtggttaaacactttgctgagagccctgtcttcaaacagacttccccaggtcattgtgttggtatctggcacacaacgtcactcattgtttatccagttgtgttgttttataagagagtttctttatctcaaggaatgcgtgtcacgtgtctgcaggagttactgccccggtttcaagagatgtgatggtcttgggctttactgacttacactagggcttttttcagtgccttccccagaattacgtgttttttcaagttcatctaaaaaaaaa

SEQ ID NO: 271977 - DNA, 486 bp, Homo sapiens
gaaaaaaaagaaatggttgaagtttgtttgccttggttataggtgaaggctgggttgtttgaggatgacggctggttttaattgttccgaagctcggcctcctgcctggtcacatgccggctctgtcagcgagttgtgcaccttctgtaacttcgtggtgttgaacaagtgatggtttcccacattttagtttgtttctgtggtttgaaatgcaaaatgtgcaggaaaaaaaattgcgtggcaagaagtatttttccagggatggcatcacaggcacgtggagctacatacaccatgtgccccctgccctgctcaccatcctgatcactgtctgtcctgcccttggaaatggtgatgtattgatcttttaggcaatgggaatcaactttgaaggtgacaaataaatataagctttgagagcactcctttcacctttctgagagggagccattggtcacagagtggcactctcagatcggcggccgc

SEQ ID NO: 271978 - DNA, 712 bp, Homo sapiens
cccactctcctctttccggtacctgtgagtcagctaggggagggcagctctcacccaggctgatagttcggtgacctggctttatctactggatgagttccgctgggagatggaacatagcacgtttctctctggcctggtactggctacccttctctcgcaagtgagccccttcaagatacctatagaggaacttgaggacagagtgtttgtgaattgcaataccagcatcacatgggtagagggaacggtgggaacactgctctcagacattacaagactggacctgggaaaacgcatcctggacccacgaggaatatataggtgtaatgggacagatatatacaaggacaaagaatctaccgtgcaagttcattatcgaatgtgccagagctgtgtggagctggatccagccaccgtggctggcatcattgtcactgatgtcattgccactctgctccttgctttgggagtcttctgctttgctggacatgagactggaaggctgtctggggctgccgacacacaagctctgttgaggaatgaccaggtctatcagcccctccgagatcgagatgatgctcagtacagccaccttggaggaaactgggctcggaacaagtgaacctgagactggtggcttctagaagcagccattaccaactgtaccttcccttcttgctcagccaataaatatatcctctttcactca

SEQ ID NO: 271979 - DNA, 580 bp, Homo sapiens
cccactctcctctttccggtacctgtgagtcagctaggggagggcagctctcacccaggctgatagttcggtgacctggctttatctactggatgagttccgctgggagatggaacatagcacgtttctctctggcctggtactggctacccttctctcgcaagtgagccccttcaagatacctatagaggaacttgaggacagagtgtttgtgaattgcaataccagcatcacatgggtagagggaacggtgggaacactgctctcagacattacaagactggacctgggaaaacgcatcctggacccacgaggaatatataggtgtaatgggacagatatatacaaggacaaagaatctaccgtgcaagttcattatcgaactgccgacacacaagctctgttgaggaatgaccaggtctatcagcccctccgagatcgagatgatgctcagtacagccaccttggaggaaactgggctcggaacaagtgaacctgagactggtggcttctagaagcagccattaccaactgtaccttcccttcttgctcagccaataaatatatcctctttcactca

SEQ ID NO: 271980 - DNA, 487 bp, Homo sapiens
catcttcgagtgcttcaccggtccgtgctccccctactcctcatcagtggtctggattcatttccaggaagtgagccccttcaagatacctatagaggaacttgaggacagagtgtttgtgaattgcaataccagcatcacatgggtagagggaacggtgggaacactgctctcagacattacaagactggacctgggaaaacgcatcctggacccacgaggaatatataggtgtaatgggacagatatatacaaggacaaagaatctaccgtgcaagttcattatcgaactgccgacacacaagctctgttgaggaatgaccaggtctatcagcccctccgagatcgagatgatgctcagtacagccaccttggaggaaactgggctcggaacaagtgaacctgagactggtggcttctagaagcagccattaccaactgtaccttcccttcttgctcagccaataaatatatcctctttcactca

SEQ ID NO: 271981 - DNA, 512 bp, Homo sapiens
  misc_feature (36)..(37): n is a, c, g, or t
  misc_feature (39)..(39): n is a, c, g, or t
cgcggggcgccgcccgggttgaaaagttgtatttgnngnccttcggtgtttcacgttttgccccctctactctcatggtctggttctttccatgagtgagccccttcaagatacctatagaggaacttgaggacagagtgtttgtgaattgcaataccagcatcacatgggtagagggaacggtgggaacactgctctcagacattacaagactggacctgggaaaacgcatcctggacccacgaggaatatataggtgtaatgggacagatatatacaaggacaaagaatctaccgtgcaagttcattatcgaactgccgacacacaagctctgttgaggaatgaccaggtctatcagcccctccgagatcgagatgatgctcagtacagccaccttggaggaaactgggctcggaacaagtgaacctgagactggtggcttctagaagcagccattaccaactgtaccttcccttcttgctcagccaataaatatatcctctttcactca

SEQ ID NO: 271982 - DNA, 493 bp, Homo sapiens
cccactctcctctttccggtacctgtgagtcagctaggggagggcagctctcacccaggctgatagttcggtgacctggctttatctactggatgagttccgctgggagatggaacatagcacgtttctctctggcctggtactggctacccttctctcgcaagtgtgccagagctgtgtggagctggatccagccaccgtggctggcatcattgtcactgatgtcattgccactctgctccttgctttgggagtcttctgctttgctggacatgagactggaaggctgtctggggctgccgacacacaagctctgttgaggaatgaccaggtctatcagcccctccgagatcgagatgatgctcagtacagccaccttggaggaaactgggctcggaacaagtgaacctgagactggtggcttctagaagcagccattaccaactgtaccttcccttcttgctcagccaataaatatatcctctttcactca

SEQ ID NO: 271983 - DNA, 361 bp, Homo sapiens
cccactctcctctttccggtacctgtgagtcagctaggggagggcagctctcacccaggctgatagttcggtgacctggctttatctactggatgagttccgctgggagatggaacatagcacgtttctctctggcctggtactggctacccttctctcgcaagctgccgacacacaagctctgttgaggaatgaccaggtctatcagcccctccgagatcgagatgatgctcagtacagccaccttggaggaaactgggctcggaacaagtgaacctgagactggtggcttctagaagcagccattaccaactgtaccttcccttcttgctcagccaataaatatatcctctttcactca

SEQ ID NO: 271984 - DNA, 251 bp, Homo sapiens
tgcctcatagagtttatgagttttccagttggagaagaggagagaaagacgttactggccacaccacagctcttttgaggaatgaccaggtctatcagcccctccgagatcgagatgatgctcagtacagccaccttggaggaaactgggctcggaacaagtgaacctgagactggtggcttctagaagcagccattaccaactgtaccttcccttcttgctcagccaataaatatatcctctttcactca

SEQ ID NO: 271985 - DNA, 247 bp, Homo sapiens
  misc_feature (39)..(41): n is a, c, g, or t
ggtaatatgtgaagtgtagaacattttaaagaaaaaccnnncaaccctcactggccacaccacagctcttttgaggaatgaccaggtctatcagcccctccgagatcgagatgatgctcagtacagccaccttggaggaaactgggctcggaacaagtgaacctgagactggtggcttctagaagcagccattaccaactgtaccttcccttcttgctcagccaataaatatatcctctttcactca

SEQ ID NO: 271986 - DNA, 246 bp, Homo sapiens
gaagaggtggggggtgggaagtgtgtttatttacgtttataagacgttactggccacaccacagctcttttgaggaatgaccaggtctatcagcccctccgagatcgagatgatgctcagtacagccaccttggaggaaactgggctcggaacaagtgaacctgagactggtggcttctagaagcagccattaccaactgtaccttcccttcttgctcagccaataaatatatcctctttcactca

SEQ ID NO: 271987 - DNA, 767 bp, Homo sapiens
cccactctcctctttccggtacctgtgagtcagctaggggagggcagctctcacccaggctgatagttcggtgacctggctttatctactggatgagttccgctgggagatggaacatagcacgtttctctctggcctggtactggctacccttctctcgcaagtgagccccttcaagatacctatagaggaacttgaggacagagtgtttgtgaattgcaataccagcatcacatgggtagagggaacggtgggaacactgctctcagacattacaagactggacctgggaaaacgcatcctggacccacgaggaatatataggtgtaatgggacagatatatacaaggacaaagaatctaccgtgcaagttcattatcgaatgtgccagagctgtgtggagctggatccagccaccgtggctggcatcattgtcactgatgtcattgccactctgctccttgctttgggagtcttctgctttgctggacatgagactggaaggctgtctggggctgccgacacacaagctctgttgaggaatgaccaggtctatcagcccctccgagatcgagatgatgctcagtacagccaccttggaggaaactgggctcggaacaagtgaacctgagactggtggcttctagaagcagccattaccaactgtaccttcccttcttgctcagccaataaatatatcctctttcactcaaaaaaaaagagggatttacctgacaccggggtcttccgaagcattttcgtggaaa

SEQ ID NO: 271988 - DNA, 1123 bp, Homo sapiens
cccactctcctctttccggtacctgtgagtcagctaggggagggcagctctcacccaggctgatagttcggtgacctggctttatctactggatgagttccgctgggagatggaacatagcacgtttctctctggcctggtactggctacccttctctcgcaagtgagccccttcaagatacctatagaggaacttgaggacagagtgtttgtgaattgcaataccagcatcacatgggtagagggaacggtgggaacactgctctcagacattacaagactggacctgggaaaacgcatcctggacccacgaggaatatataggtgtaatgggacagatatatacaaggacaaagaatctaccgtgcaagttcattatcgaatgtgccagagctgtgtggagctggatccagccaccgtggctggcatcattgtcactgatgtcattgccactctgctccttgctttgggagtcttctgctttgctggacatgagactggaaggctgtctggggctgccgacacacaagctctgttgaggaatgaccaggtctatcagcccctccgagatcgagatgatgctcagtacagccaccttggaggaaactgggctcggaacaagtgaacctgagactggtggcttctagaagcagccattaccaactgtaccttcccttcttgctcagccaataaatatatcctctttcactcaaaaaaaaaaaaaaaaaaaaaaaaaaaaaaaaaaaaaaaaaaaaaaaaaaaaaaaaaaaaaaaaaaaaaaaaaaaaaaaaaaaaaaaaaaaaaaaaaaaaaaaaaaaaaaaaaaaaaaaaaaaaaaaaaaaaaaaaaaaaaaaaaaaaaaaaaaaaaaaaaaaaaaaaagaacgacgaaaaagaacacagaacaaaacacagaaaaagaaaacaaaagaggagcaagcagagcggcgcgcccgacagcgaccggcgaccaatccagtcgacggaggagcggggcgcacgaacaccaagccgagtacgatgagacgacgacccgaccgggagcacaacggagcagcagcggagagggcagcccaccacacccagagcggggcagcgggcaaagacggagaaacaacaacgggg

SEQ ID NO: 271989 - DNA, 631 bp, Homo sapiens
  misc_feature (609)..(609): n is a, c, g, or t
aggaactctattgccaatttcggtatatgtactagccaagcaaaataaggttcatgagccccttcaagatacctatagaggaacttgaggacagagtgtttgtgaattgcaataccagcatcacatgggtagagggaacggtgggaacactgctctcagacattacaagactggacctgggaaaacgcatcctggacccacgaggaatatataggtgtaatgggacagatatatacaaggacaaagaatctaccgtgcaagttcattatcgaatgtgccagagctgtgtggagctggatccagccaccgtggctggcatcattgtcactgatgtcattgccactctgctccttgctttgggagtcttctgctttgctggacatgagactggaaggctgtctggggctgccgacacacaagctctgttgaggaatgaccaggtctatcagcccctccgagatcgagatgatgctcagtacagccaccttggaggaaactgggctcggaacaagtgaacctgagactggtggcttctagaagcagccattaccaactgtaccttcccttcttgctcagccaataaatatatcctctttcactcaaaaaaanaaaatgggcctcctggcctaat

SEQ ID NO: 271990 - DNA, 741 bp, Homo sapiens
  misc_feature (719)..(719): n is a, c, g, or t
cccactctcctctttccggtacctgtgagtcagctaggggagggcagctctcacccaggctgatagttcggtgacctggctttatctactggatgagttccgctgggagatggaacatagcacgtttctctctggcctggtactggctacccttctctcgcaagtgagccccttcaagatacctatagaggaacttgaggacagagtgtttgtgaattgcaataccagcatcacatgggtagagggaacggtgggaacactgctctcagacattacaagactggacctgggaaaacgcatcctggacccacgaggaatatataggtgtaatgggacagatatatacaaggacaaagaatctaccgtgcaagttcattatcgaatgtgccagagctgtgtggagctggatccagccaccgtggctggcatcattgtcactgatgtcattgccactctgctccttgctttgggagtcttctgctttgctggacatgagactggaaggctgtctggggctgccgacacacaagctctgttgaggaatgaccaggtctatcagcccctccgagatcgagatgatgctcagtacagccaccttggaggaaactgggctcggaacaagtgaacctgagactggtggcttctagaagcagccattaccaactgtaccttcccttcttgctcagccaataaatatatcctctttcactcaaaaaaanaaaatgggcctcctggcctaat

SEQ ID NO: 271991 - DNA, 991 bp, Homo sapiens
cccactctcctctttccggtacctgtgagtcagctaggggagggcagctctcacccaggctgatagttcggtgacctggctttatctactggatgagttccgctgggagatggaacatagcacgtttctctctggcctggtactggctacccttctctcgcaagtgagccccttcaagatacctatagaggaacttgaggacagagtgtttgtgaattgcaataccagcatcacatgggtagagggaacggtgggaacactgctctcagacattacaagactggacctgggaaaacgcatcctggacccacgaggaatatataggtgtaatgggacagatatatacaaggacaaagaatctaccgtgcaagttcattatcgaactgccgacacacaagctctgttgaggaatgaccaggtctatcagcccctccgagatcgagatgatgctcagtacagccaccttggaggaaactgggctcggaacaagtgaacctgagactggtggcttctagaagcagccattaccaactgtaccttcccttcttgctcagccaataaatatatcctctttcactcaaaaaaaaaaaaaaaaaaaaaaaaaaaaaaaaaaaaaaaaaaaaaaaaaaaaaaaaaaaaaaaaaaaaaaaaaaaaaaaaaaaaaaaaaaaaaaaaaaaaaaaaaaaaaaaaaaaaaaaaaaaaaaaaaaaaaaaaaaaaaaaaaaaaaaaaaaaaaaaaaaaaaaaaagaacgacgaaaaagaacacagaacaaaacacagaaaaagaaaacaaaagaggagcaagcagagcggcgcgcccgacagcgaccggcgaccaatccagtcgacggaggagcggggcgcacgaacaccaagccgagtacgatgagacgacgacccgaccgggagcacaacggagcagcagcggagagggcagcccaccacacccagagcggggcagcgggcaaagacggagaaacaacaacgggg

SEQ ID NO: 271992 - DNA, 438 bp, Homo sapiens
gctgggggtggggctgccagtcctgtggattgtagtagggactcatggtgcctcttctgggtgcccgtggacaaattggcagccacttcctcctctctgaggtccataaaagccctgggctcagccagagcagggcagaggatggccagaggacaaagagggcagagaggtggtgggatgaccagctgcagagaggagtactctctgctgatagctggagacaatgggatggctggctgcagagaagagctaccttctccactgagagctgcagagacaacctgccagcagagagaagccaccctttccagggcctcctctccactgagaactgagcactggacagatgacctgcctacagagaggagctacccactgtgggcctcctctgagctgttctagcactaaataaagctcttcttcatcttgttcaccctt

SEQ ID NO: 271993 - DNA, 1738 bp, Homo sapiens
taagtcagtcagtgtttattgatcacacaggaagtaaagagccttagtgagaagtccatcaccaggtttatctttataccagactttaactgatcatgaccctatcttgctacccctggatattttccacattacttgggacaaatggaaagcaacctctgctctccatgatctgttttcacattggttatagcatctcttggatggagtagagggaggtcaggagaagaagcccacatagatatataactgtcttctctcagattacacattatagcattaaaggttttgattaaaatctaattgtaagatactgctgattacaattaccaaaatagcatcacaggagattcaattaaaattgttatggaaataatttttgaaatagtttaaaatgcaagaatattcagcgatgttaataatttagagatactaataagtgttctgctagatagactatttgaaaactataaatgtatttttggattaacaatgccaaggtattttttcatattcacattgaaaaatacaggcaaaactatcaatattttttctgcattatatgaaatttcacaggtagaactaaatctatgatatagaaaataatagcacattacacatagagaaaaccaagccacttaggtttagatagatatataacatgtaacatcttctctgttaaccaattatagatacatatacaacatgtaatgttttcttagttaaacaattggaaatgtttaggcattttactgtgtgggggcagtgagtatgcacatgatcagacttgtattctagctttacaattaaaattcacagaatcatttcctaaagattttattatcctttcataagtataaatatatatacttttacatataaatagttctgcatttagaaggtatcctacacatcaaacatccattaaacatgtactatgccaaaagttagagcttatactgttgtgggtctggagttgtaggaggatggatcatggtatggaaatgcagaagtgcctgatgcaaagatccttgcctgcaggttaaacaaagcaccacatatgtagacatagcacacatatgcaaaacaactaagaaaaagacctccttaggtctttgcgtaacacacacaaagataaatgtaaaaattatatagttgatttatatggtttatgtaacaaagagaaaaactccttaatggacttatccaaagatgaaatggactgactcaggaaacagtgggctcccagtaattcaaaggtgacatctgcatgggcaggaaagaagttaaaagcaaatcccatgtgccaataacaaccagatggcttggaagtagcagagactgccgaagagcaggagaaaataagattgctaaaagagaaagagtcagaggaagggagaatattaactcttaggataaaaagtgacataaccggccatagaaagttaccaactgttcataagtaaaggaagaaaataattattgtagtgtttgaggaaaattatgcttttgatcctttgtggaatagaaccaaagaaagcaaggttccaaggattaagtttcttactgaaggaataagtttggttaatggctacaaaagtgaaaagaaagaggaagaaggcattgaaggccacgagttacatttgttggcaaagatgagtatgcaagtcaacaagtcaaaatattttattttgtcatgttggggattaaagatgacaaaagaagcaaaaatgtattt

SEQ ID NO: 271994 - DNA, 326 bp, Homo sapiens
gcaaaaaaacataaaaataaaaaagtttaaaaaaattaaatgaaaggcttttatacagcacattcggaagagtggcattatattttatagtatttaaatgagtgtcttaatctttccttaattatccctttacacttgctgctggcctccggattcagattgcgtcttccgtataactcaaaggcttttcaagtacttcttctcagttttctttcaaagtaggtcagttcagattttatatctaacttgcaaatggaaaatctgaagcatgggaaagttaggtaatttaccaaaactttaataatcagtggcagaagttaaataca

SEQ ID NO: 271995 - DNA, 300 bp, Homo sapiens
tcccaagttttattcaagaactctgcagtgtggattgaacagaaaattggaaatcatagtcaaagggcttcccttggttcgccactcatttatttgtaacttgacttctttttttttctgcttaaaaatttcaattctcgtggtaataccagagtagaaggagagggtgactttaccgaactgacagccattggggaggcagatgcgggtgtggaggtgtgggctgaaggtagtgactgtttgattttaaaaagtgtgactgtcagttgtatctgttgcttttctcaatgattcagggat

SEQ ID NO: 271996 - DNA, 534 bp, Homo sapiens
cgtgctattacattgtacaaagacaagcgtcaagaatctgtagaccagctgtctttgattttgtcttatgagtgccagatttctcagaagctctacattcctcgaagtacagccactgctgccttaggtgctgccgcacggttagctacatccaggagcctcctacactggtaccccagtgtgaaaaggatggaagcatgagggagggagggaggagggagaaaaacagaatccagccgcttaggctttgatgaactcccaggccaaaatgaggagttattgaagcaaaatagtatcttgatcattgatacttttgtctttctgtgactatatgttagctttattatgctaacagtctactttgatgtgtaagtaagtattgatatttactgttaatcttgatttttcttgattttattctgtgtcattttgttcacctttgtttttaatgtagtttaaaggaatttgtttttttgtgtttgtttttcttgtacattatcatgactgataaatgaaaattgaaaaactaaaaaa

SEQ ID NO: 271997 - DNA, 534 bp, Homo sapiens
cgtgctattacattgtacaaagacaagcgtcaagaatctgtagaccagctgtctttgattttgtcttatgagtgccagatttctcagaagctctacattcctcgaagtacagccactgctgccttaggtgctgccgcacggttagctacatccaggagcctcctacactggtaccccagtgtgaaaaggatggaagcatgagggagggagggaggagggagaaaaacagaatccagccgcttaggctttgatgaactcccaggccaaaatgaggagttattgaagcaaaatagtatcttgatcattgatacttttgtctttctgtgactatatgttagctttattatgctaacagtctactttgatgtgtaagtaagtattgatatttactgttaatcttgatttttcttgattttattctgtgtcattttgttctctcctgccctccacgtaggcagaaggcatagtttctattgtccttgttttttaaggaaattatcatgaccaaatgatggaatttttttttttaaaaaa

SEQ ID NO: 271998 - DNA, 980 bp, Homo sapiens
actcctgtgctcaagtgatcatcctgcctcagtctctcagtagtctgggactacaggtgcgtgctactgtgcccggctgattttcgtattttttgtagagccagcatctcacttcattgctcaggctggtcccaaactcctggcctcaagcagtcctcccactgtggcctccccaagtgctggtattacaggagtgaactaccgcacccagccagttttcagtgtttcagtctcgtacagtcatgcgcagcataatgatgttctggtcaatgatggacagcatatatgatggtggtcccataagattataacagctgaaaaattcctaacacctagtgacatggtagccgtcctaatgttgtagcacaatgcattactcttgtgtttgtggtgattctggtgtaaacaaacctacttcgctactagtcgttatagaagagcaaaggcagaagacacacacatcacaattttaaaactatgaaagtacaataataaagacactgtggtactggcatacagatacacatatagatgtagcagctggttgtccaggctgggtggggtgctgcccccatgcctataatcccagctttttgggagcccgagatggaaggacggcttgagttcagaagttcaaggttacagtgataataataaagattattactggtatatgtatttatgatattgtactttttattttagagtttactcctacttattaaaaaaaagttaactgtaaaggagtctcaggcagtccttcaggaggattccagatgaaggcattgttatcagaggagatgacagttccataagtgttattgcctgtgatgaccttccagtggaacaagatgtggaggtggaagacagtgatattgatgatcctgaccctgtgtagggttaggctaatacgtctgtgtctcggtttttaacaaaaaaagttaaagaaaaaaaaaatagagaaaagagaaaatgatata

SEQ ID NO: 271999 - DNA, 405 bp, Homo sapiens
gagccttgctgggaattcagaacatcaaggtctggccttgtctggaattgtctggtgtcgagtttcccaaacttcaagcttcccgctactacctttattatttacttaacatttttccttaaattgactcatttttaaaatcaaagtacatatttttggaaagaaaatctgatactaccactgtaaattgaaaagtagctgttactcaccagaaaaggaagtggtaaaagataaacacagctaaaaccaagcaatgttaatacatgttagccgttttgctggcttggaaagactcctagaggctcaggtgtgtgtgtgtcattagcaagtgttggaagtgttaaatactgaatctttctcggaagaaatgagacaattgaaaagagaatgtttctcactattcaa

SEQ ID NO: 272000 - DNA, 1222 bp, Homo sapiens
ccagattaacactttaaaaaaagtcatacgcaatcagagtaaagggaatttgtcagtcatttactccaatatcctcatctaataattaacaaaactgaagttcaaactcgttgataactaacatatttttgtgagattgttgtataatgtctgccttcgtagtagcctgtgaatttccaaaaagtagaaaaccacgtctgtgtgaatggcttagtatcaacaatgattgatatagggtgaactctcagtgatgaatatttctggaataagagaatgttgtggaactacttctggccagacttcttaattgtaggctggtgctttttgtgttatactatgtttcttttcactcaaacctcatcttgttttgcagattcacttattaaaaatctctcctgaaagtttttgtatatcctggagtggcccacataaaactgatcgttatgagatccaggaactctcctggttgtataatgtgatcacctgcttttggaggtctaatgatgcatacccccagagacagaccaaggaaaaagtaaagctgaagcaataacttatttatttacttacttacttacttactttttcctggctaagatgatctagacatgtggatcttctatccttggcatcaaatttggtgctcctttcttgtgtctaacaattaattgcttcaaccttaatttcacagtagtaccaattttgtgttaaccttggctgtctgcagactactttcattcttgttgcttatttctactctttagtaacccggagagaagcagaaaagtttataggacttgtgttctataaatgagggaactaaggctttgtctgaattcagataccctctctgccatcatactgtttttacgttgtgcagttttgcctcccttcactgggttggggctgccttagaactatggttgagctaaggatgaggtggcctccacctgtaatcccggcactttgggaggccaaggaatgtggatagcttgaggtcaggagttcgagaccagcataggcaacatcgtgaaaccctgtctctactaaaaatacaaaaactagctgggtgtgatggtgcatgcctatagtcccacctacttgagagactgaggcaggagaagtgcttgaatctgggaggcagaggttgcaatgagccaagactgtgccactgtactccagcctgggcgacagaacaagactctgtcttaaaaaaaaaaaa

SEQ ID NO: 272001 - DNA, 1204 bp, Homo sapiens
tgagatggagtctcgcattgttgcacgatcttggctcactgcaagctccaccttcctggttcacgccattctcccgggaggcagagtttgcagtgagtcgagatgatgccactacactctagccttgagcgacggagtggaactctgtctcaaaaataataataataataataatcttactgagattatttttagtagaaagaggggtgatgtagaaagaacatatatttcagtagaaagccatattgtgcgccccatattagattcttgtcctgtttaacgtctttggggttttgttatctattgatgtctacaaactggacgggttcctgatgtttctagtttcctccagtatctggctgcaactcccaaactaacactttcaattttctcccaccgttcttattggaatcacgaagaacaaaactgccctttgcccagaaatcctgcaaactgaggctggacgacttgaaatactcatcagcgagattaccacgaagcccaggtgcgagggaccctcacgcctgttgctgcgtgggccgcccagacatcgccagagaccaaaccgcagaagatgctcggagcccaacatctacaaacctgccccgccacggcccccaggctcagaaactggtttttagtcagctccaatgattagctttttttttttttcttttgtttccatagaaatgcctcttcaaagcattatgggacaacacacccacccagtttctgtaccgtggagcttcttggggaagtttcagactaggaaacaatggggctcaggacacatcaccccaaagtatgactgtaggagaccagaatacgccacccctaaatatgactataggagaccagaatacgtcaccccaaaatatgactgtaggagaccagaatacgccaccccaaaatatgactgtaggagaccagaatacgccaccccaaaatatgactgtaggagaccagaatacgccacccctaaatatgactgtaggagactagaatacgtcaccccaaaatatgactgtaggagaccagaatacgtcaccccaaaatatgactgtaggagaccagaatacgtcaccccaaaatatgccatgttgacatgttgattactttgagctaaaagcaactgagaaccagccaacagaaaaaaagctcttcagctccctaaaataaagtaaaaaactctcttttctaaaga

SEQ ID NO: 272002 - DNA, 583 bp, Homo sapiens
tgacgaaaccaccttcattcaccagtcaactcccctgctatagctggttcagcctgcagcagccccacagtcctgtatcttcctgcagctgaggatgacgcagacgcctccgccatctggccccttcccccagtttcatctccgtgtgggactcccattcgtggacatatcattaaaatgggttttctcctgttgatctgtctgatgtcacttttcctcccctgcagcttggtgacatgaaaggacctccgtggctggccttactccctgtggatgccacagctgcaggatcctggggccccaacagaagccggtgaaggaagagttcctgctccagcaggtgcctggtctccaccttcaggggctgctccaggagagtggcaatttggggcagcaggaggaaacatgggtgtgaactagttctttttttttttgagacagggtctcactctgtcacccaggctagagtgcagtggcaccatcatagttcatcgcagcctcaactcctgggcttcaagggatcctgccacctcagcctcccgagtagctgggagacaggtgggcaccaccacacccagctaat

SEQ ID NO: 272003 - DNA, 1046 bp, Homo sapiens
cactacagggaacggcccaggaacccatccacccgtccccagctctcatcactctgacctctggctttttgtttcctggggcatttcacagcaaattccacctatgagaccgtctcatccgtaatacaccagtacatgcttccagcagcttggtgacatgaaaggacctccgtggctggccttactccctgtggatgccacagctgcaggatcctggggccccaacagaagccggtgaaggaagagttcctgctccagcagaacaaaactgccctttgcccagaaatcctgcaaactgaggctggacgacttgaaatactcatcagcgagattaccacgaagcccaggtgcgagggaccctcacgcctgttgctgcgtgggccgcccagacatcgccagagaccaaaccgcagaagatgctcggagcccaacatctacaaacctgccccgccacggcccccaggctcagaaactggtttttagtcagctccaatgattagctttttttttttttcttttgtttccatagaaatgcctcttcaaagcattatgggacaacacacccacccagtttctgtaccgtggagcttcttggggaagtttcagactaggaaacaatggggctcaggacacatcaccccaaagtatgactgtaggagaccagaatacgccacccctaaatatgactataggagaccagaatacgtcaccccaaaatatgactgtaggagaccagaatacgccaccccaaaatatgactgtaggagaccagaatacgccaccccaaaatatgactgtaggagaccagaatacgccacccctaaatatgactgtaggagactagaatacgtcaccccaaaatatgactgtaggagaccagaatacgtcaccccaaaatatgactgtaggagaccagaatacgtcaccccaaaatatgccatgttgacatgttgattactttgagctaaaagcaactgagaaccagccaacagaaaaaaagctcttcagctccctaaaataaagtaaaaaactctcttttctaaaga

SEQ ID NO: 272004 - DNA, 422 bp, Homo sapiens
aaggtattatttgtattcataattttcagatgaggtaatttaggtgcagagaagtttaagcacttgttcacattcacacaagagcaagtgttagagtaaggatttaagcttaaccaggatagttctggggggtactaggttgaccactacaccaatgcctgttaaccttgatttgctgaccatcatgataattatgaagtcaaaacaaggaataaacttagtaatttagtcaaatagactttaatgaggaagcaggtttaaaacaaatggtcagtaaacactttttgggcacgtaatatacaccaagcaatatgcctcctagcagaatggcattgaatggcaaagctaggtcctcaggaagagtggctgtccaggaatggaccaggtggaattaatcatattaaatcctatatttaaaatta

SEQ ID NO: 272005 - DNA, 318 bp, Homo sapiens
ccagggactgagggacgcgcccggggagggccagcaacaagccgcggcccgggcgcgacagcggcggtccgcgccgagccgttccagccgccggcctactgtagccgctgcgccaggacatttttttttaaagctctccaagctgcccccctcctccccgactcctcccgctgcaaaagaaaaacaaaaaaaaaaaaggaaggaggctagaaaggaaacccagatttgccaccacaacgaaaaaaagaaggggaaaaggaaaaggagagaaagtcgagcgactgtggggttagacggaggcagacagagcgtgggccg

SEQ ID NO: 272006 - DNA, 850 bp, Homo sapiens
caaattttattatttaagggcatctaaagagtccagtaactatgagaaatttacattaaaactgatatgagcatttgatttttaaagtttaaaacctaaaaccttgtttctaaactttatctgacaaatttcgtaccccatgttttgaaaacgtctggacttcaccaagagtgggccaagaacaattacattttggatataattcacagaaatattaacttccaagagtatctggggtatttttttatactaaaggagaagataatatagctactcttattgaatgtgcagcttatgagcttttggactttttaaaaaaaatgtgtggaaaaatgtcagtatctaccatgccaaagaaagtattggtcttatttttactacatgctttatatttttatgtttcattagctcagtcccacatgagaccagtgcctgccctgatttctggaatgctgccccaattcttttctcctaggccttgttgccagggttgcagctgcacaactaattcttattaaaatgtaagtctttgaaatgcaggtctacggaaagggatataaaggatttcattatcttttctcaaaactcacaatgaggattaaactcccacccttcccaagccataccactacttgtgcccttctctaccaagtcacacaccaaatataatgaagacagcagctcacccttaaatatccaaataaaaacagccatgaaggagagagctgcacagtaatgaaccttcaggtctggcaaaagttattaaaaaatgacttctaatactcataatgtagtcacaggctacagctggatattcatacagtgatgtgattttagaaataatacttct

SEQ ID NO: 272007 - DNA, 519 bp, Homo sapiens
cagaatatttgctgaatcagatttagaggtttgactatccggtagtgccagtcctgcccatccccatccttttctcatcactcctctttttaataaatttgttttctttccccatataaattttaggatcaatgataacatctagttagaaaacctgttgccatttttatggcatcaagttaaatttctaaattaaattagggcagtgttgacatctttaagatgttggtgattccgccccaaaacatgaatgtatttttccatttgctcacgttttgttttgtcgttgtgtaaaattttctttataaaggccttgcaggtttcttgttaagttgtagtaattttttgttgttgtatctcttggattttccagatatagaactctttcaaatagtagtaattttacttatacctttccaattatcatgtttctgatttcttctctaattctgtagggtggaaattataatacaatattaaagaatatttgtgtgcataataaacataagtaatataaaa

SEQ ID NO: 272008 - DNA, 397 bp, Homo sapiens
tctctgagctgctagagtagccaggcacccgccgaccgccacctacatcttcagatgagaccctgaggagggcaggcaggtcttcaggtgccactctcgggcagggctggaatctcccaactttgcatacgttggttggcaggggcagcaggcagcaggtggggaactgagacacctgagagaggctctgggaggtgtcggcaggttccctggaggggtgtgagaccctgacatggggagtccaggtccccagccacatgacacattcacacacacattcacagatcccacactcatcaatcctataccacacacattcacagatcacactcataaaccctacatgcacacaccttcacagatcacactcaaaccctacatgcacacacattcacaa

SEQ ID NO: 272009 - DNA, 260 bp, Homo sapiens
cacagccatccctggaacataacaaatgaggctgtggaacactgagcgaaagacgaatttggctcagagtgcagatctgccattgctctcaatgctggctgcaaggaagcggaacccaaggctccatgtcctttttttgatgaaattggtgtatgtaaagacaagcaaatacgaaagaagaatttgaaggacagacaaactgcaacatcaacatagattacaacatcaaaataaacattatctttgtagtagttttaaaa

SEQ ID NO: 272010 - DNA, 409 bp, Homo sapiens
gagtggcgggtcaggctggatgtgtgagtgcagtgccagcccctcgcagggagtggcgggtcaggctgggtgtgtgagtgcagtgccagcccatcgcagggggcagcaggtcaggctgggtgtgtgagcacagtgccagcccatcacagggagcggcaggtcaggctgaggttcagggaggccccaggaggagcaagtgccccagatcctgaaggatgggaaggtgggcagagagagttgacattcactgagtcccccatgcacaagaaggatcgcactaatgcaactaacatttgtatgcagcaactcacaaagcacttttctgatactttattacctctgcttgattttattaaattcacccagtgacctgacaaggtagaattcttattagctctattcttaggtg

SEQ ID NO: 272011 - DNA, 495 bp, Homo sapiens
ggaaagccatccatcctccttaggtttctttaatatttctcccgctcagaaacagacactacggggctatctccccggcagatgctgcccttctcaaaaagcagtttatttcctgggcctccagactttcccctggaccaacaggaccgggatttagagtaccagtcacccagaggcagcaattgtcaggataagccaggagccaacataggttgtgacacagaggactagacaggccctttgcatattttaaaatgggtccctcagtgtgggaagtacacacctcttagttagctggaacttaatcccttaaactgtcttaatatagaattcatctcgtgcattaatcttacatcatgttaaattgcacttatttctctcataaataaatatagaacaattagatgtgttataataatgtcatgtatcttattttccctcataaaatatataggtatgaaataaattcaatatattaaagtagtaatacacaaa

SEQ ID NO: 272012 - DNA, 613 bp, Homo sapiens
tgctttggaagctttgttcttttgctcttcacaataaatcttgctgctgctcactctttgggtctgtgccacctttaagagctgtgacattcactgcaaaggtccacagcttcatttttgaagtcagcaagatcacgaacccaccagaaggaacaaactccgaacacatcctgggggcttgttggggatttcaccacatggaggaaaactagtgtttctgctactgcttcagtgagcgcaactaatctgatcagcatggtccagggacagttgagagttcttgggcaagaggggaatctgctgctgcatcgagcttctaatgaagacaacaggcaccagtgaagtcagcgtttgcttggcgatgagtagaggcacagtttgttttcagattaataccaggcactctgcggggcagcctggagccacctcctttgtcttcccatgttatgcacaggtactttggacactatacaatctgtgcagttgacataaggtatggaccccaaccgacttccttaagattaaaaacgctgacaacttcttaaatacttacattgactacagaaaaatattttgaagaagaataaataccagttttaacttgcctttttta

SEQ ID NO: 272013 - DNA, 1275 bp, Homo sapiens
tgctttggaagctttgttcttttgctcttcacaataaatcttgctgctgctcactctttgggtctgtgccacctttaagagctgtgacattcactgcaaaggtccacagcttcatttttgaagtcagcaagatcacgaacccaccagaaggaacaaactccgaacacatcctgggggcttgttggggatttcaccacatggaggaaaactagtgtttctgctactgcttcagtgagcgcaactaatctgatcagcatggtccagggacagttgagagttcttgggcaagaggggaatctgctgctgcatcgggcagcccatccagtatgctcgctccacctgcgaggccggcgtgggtgagctccacatccaggatgccctgccggaggaccatggcacctacacctgcctggctgagaatgccttggggcaggtgtcctgtagcgcccgggtcaccgtccgtgaacctcagaggatccagaacggcagctggtccttgctgggctgttcctgtccatgtgcctggtcacggtgctggggaacctgatcatcatcctggacgtcagccctgactcccacctccccacccccatgtacttcttcctctccaacctgtccttgcctgacatcggtttcacctccaccacggtccccaagatgattgtggacatccaatctcacagcagagtcatcttctatgcaggccgcctgactcagatgtctctctttgccatttttggaggcatggaagagagacacgctcctgagtgtgatggcctatgaccggtttgtagccatctgtcaccctctatgtcattcagccagcatgaacccgtgtttctgtggctttctagttttgttgtcttttttttttctcagtcttttagacacccagctgcacaacttgattgccttacaaatgacctgcttcaaggatgtggaaattcttaatttcttctgtgacccttctcaactcccccatcttgcatgttgtgacaccttcaccaataacataatcatgtatttccctgctgccatatttggttttcttcagatctcggggacccttttctcttactataaaattgtttcctccattctgagggtttcatcatcaggtgggaactataaagccttctccacctgtgggtctcacctgtcagttgtttgctgattttatggaacaggcgttggagggtacctcagttcagatgtgtcatcttccccgagaaagggtgcagtggcctcagtgatgtacacggtggtcacccccat

SEQ ID NO: 272014 - DNA, 444 bp, Homo sapiens
cccaaagtgctggaattacaggcgtgagccaccacgtttggcctaaaggcacatatttttacatctcagatacctggggttaaaatgtgacctatgaccacaagacgggccagaataaaatagaggaacatggaagaaaatgccaggggaaagccaggcatatctgtaggcccagcttccactctccccagaacaccctaagctgggagactcatcttggacacccccggccgtcccaccttcccctttgtgggaaatgttctctcccatccttcagccggcaacttaggctcagtactgcaagcctcggctcacccatcccattccagaagcctcccgacctttagacgaggccagaccccctggctgtgctcatggtacccttctgggcttcccctttctctgtgctactgtgaccacttgttttaaaattctgtctcaaaa

SEQ ID NO: 272015 - DNA, 451 bp, Homo sapiens
aggagcgctcacattttccatgccaggtgccaggcatctctctcctctcccaccccaggggcagccaggtttaggtcacctggcatggaggcagacagttgatagcccggtccctaaatttggggcctttgaagccctggtgttgcctttcagttcccctccaagggtgaaatgggaactggctcaccggcaacttttatgcctaagcaagaagcctgctgaggaattcctggtctccagaagctcaccctcaggcccaggattctctggtccaacagcctccactgttggtcggtcaaacaaacgccctgggattcccaggaacatcctgctgccttcatcgtccgcatactaaatcatcaatccaacgaggcagccactcgccacacagggccatttaaggttacattaaattgatatttatagtatataatataaatttctattaata

SEQ ID NO: 272016 - DNA, 1211 bp, Homo sapiens
atcctggtttaaagacataaagtttgatgacagtgacacagaacagatagctgaagaaggtgacgataatttggctagtgagtttaactttctaacattttagttttgatgggtcattgctgtgtatgtatgataaaatgattatcttgtttgttgaaataattcagctttataatttatggctccaactaaatggaaacatctgatagcagtctttgtcttagatacagtattttcttaaaccaacttgttaggttgacatttctagattttaccatagtctatagtttgtagcagcttaaaaataactgaactaataatatggcagcagacaactttctcatctcttcactataatatcagactttctctctgcagaacctccaatatatttcttcattttaaaaattgattttatatttaacttgttcaaattttattaagtctacacagaagtacatgaaaatactgtatccattttggtattgcacattgggcttgtatattaaaaaaacatttttctcctttcctccaataccctgataaaacccatttttactcccctcctctccctatatttctttccccttcccaacactaaaagattctgccagtcctagcaagcgcacatcagtcagcagtttccagtccacagtggacagtgactcagccgcttctatcagcctgaacgtggagctggacaacgtgaacttccatatcaagaagccctccaagtacccacatgtgccccctcaccctgctgaccaaaaaggtaggaggtagtcaccatctggaatccaaacacaggctggacagctgggccataggatctcatgccagcctgtccttctggcttcctctgtcccacgtggctgagggtatttggtgtgggttttgttctaccctttctcatttctcccacacctcctccccatacctttttggttgattccttttatttcttgttttctccctcagcaccaccatgcccagtgtaaagcttgtagtctttaaaaggaactacatctgactgctcttcccataatgtgcaacttccaaggtggcatttctttgcatttataacatggatgttctgctctattcttttctctttcttcatttaacattttaaagcctatttgcctttgccgttacccagtaacataatatttcactaaacccattaagatgcttgaactagattgggggaa

SEQ ID NO: 272017 - DNA, 208 bp, Homo sapiens
tgaatggtctctcttgtctgtgcaattagtatgtaagagcacgtgaactggtgcctgggacctctacctgttttagtatgatagcaccacagtaaagggcctggactttgtatgagcttgggaaaatcatgtcacctctgcaagtcttggtttccctgggtgttaaatgtcaatttaagtaaaatgctatctactttgttttggagac

SEQ ID NO: 272018 - DNA, 353 bp, Homo sapiens
agaaggagccttcacatatgaatgcctgtaacaggttttattacaagaaattcctgcatgtcttacatgtacccttgtaacagaccttatcatgggaaatttctccaaccagataagctacttgcacaaggacacttgccttgcagtggctgtctccaccactgaactgatgtcagcttctgcaacaagcccctctagccaatggtcttgtttagcttatgtggacttgttttttgtctttaaaagtttcccgttttcccctaaccctcttggatgtacctatagtctgcttatggcaggtttatcctggacttcagtcctctgctattcctgaataaactctttgctttgga

SEQ ID NO: 272019 - DNA, 434 bp, Homo sapiens
ccacagcacctggccaaaattagttttattataagagatgcaactcaggaccagccaaatgaagagacagtgaagaagtaatgctgatggatcacacctggtgggggaaggcggacagctggggccaggagcaggagggacacctgcagggctggaagggcaggggaggtgggcctccatggtttgtgtttattgcataaccatttttattgtctacagtgagcaaagttatcctataaacaagtgtcagggaccattgcactaaagaaaacaaatgagagcattttggaagctctaatttcctgatcagtaatgggtagactaattcccagttatatttacctgttgtaaggtgaaaggttcttcagaggacctctgtcttggtgttatatgggcttttgaatgtactgaaattaaattccctaaaaatctgt

SEQ ID NO: 272020 - DNA, 246 bp, Homo sapiens
gaaaatccatggaaacagaaagcaggtgagtggtctcctggggatgaaagtaaagggaatgggcacaaccgcttaatgggtacagggttttatttggcagtgattaaaaggtcttgggattagatagatgtgattgtacaactgaattgttctgttttaaatgatttatgttatgtgaatttcacctccattgagaaaaaactttattctacaagcaatgggacatagtaaaaaggtttaaaagca

SEQ ID NO: 272021 - DNA, 323 bp, Homo sapiens
gcgctggatacttaggactcccacaggcgtccccctcagattggattggttctccgagactccacccgataccccaactccgctagttcaggcgcctgggaggcaagaccagcgtccatgcggaaccctgctcagtgcgtggcatgaggggtcggctgtgggctgctgcctcctcgtgtcttgttggtccagacccaactagggttgggggcttacttcccgagctgtacctgagcggaatggggctgaggctgataactggattgctctctggctacttttccccataaaccttgcaacaagtagtcccgccagtaaaaaaa

SEQ ID NO: 272022 - DNA, 378 bp, Homo sapiens
cccagatgtaggtggctaaagtgagcagggaaagctaagtacagccctccagtgaaacacagaaagtacaagagtcttgaaacaaactccagatcaccctgtggctctgggaatcaaacttcagaggtcatcaggctggcgcttctgttatggtttatgtcctggccagttatcccatgagaccacatctcttgttccatacaggcacggaccaaaggcctgggttctgcttgactccactgctcactggatgaccaagacatgttccacatctacaaactagaggtaatactggcttgctttaaagttgtaaggggagcaacttccttatggcatatatttatgatttaatactatggtctttgctataacattgtg

SEQ ID NO: 272023 - DNA, 842 bp, Homo sapiens
catagcaaaaccctgtctctgcaaaaaatacaaaaattagctgggcgtggtggtgcctgcctgtagtcccagctactcaggaggctgaggtgggaggctagcttgagcctggaggcagaggttgcagtcagccgagattgcgccaccacactccagtgtgggtgacagagtgagaccctgtctcaaaaacaaaactgtcagtgaggcctaaagaccctgataagaacctgaattcttgttcttgcctttttcactgactgcccagtgaagcttctgccagcgtcccctgcctcttttcctactgtcttcccccttgctgagtgtactctcaccatactgaccctcttcaagttccggaaatgtgtgttcttcactacccaaggtcccttccttgagcatactattctcacagctggaagcccgcaggcccaaccttagttaatgcctcttcaatcctgagctcagtgtgtgtgtctcctctttaatgacttcctaatcaccccgccccacattagaagatatcaattgtataattatttaatttgtatattatatttccccttctggaaaatagctacatgaataaaaatactctgttttattcacatttgtgtcaccaacatctagcactgtgagttgcacatagtaggtcctcaataaatattttttcaaatgaagttaagaaagagaatttaaaatagaatttctaaaaaacctcattttaggcaaagcttggtggctcatgcatgtaatgccagcactttgggaggccaaggcaggcaggtcacttgagtccaggagttcgagaccagcctgggtgacatggtgaaacccatctctac

SEQ ID NO: 272024 - DNA, 557 bp, Homo sapiens
catagcaaaaccctgtctctgcaaaaaatacaaaaattagctgggcgtggtggtgcctgcctgtagtcccagctactcaggaggctgaggtgggaggctagcttgagcctggaggcagaggttgcagtcagccgagattgcgccaccacactccagtgtgggtgacagagtgagaccctgtctcaaaaacaaaactgtcagtgaggcctaaagaccctgataagaacctgaattcttgttcttgcctttttcactgactgcccagtgaagcttctgccagcgtcccctgcctcttttcctactgtcttcccccttgctgagtgtactctcaccatactgaccctcttcaagttccggaaatgtgtgttcttcactacccaaggtcccttccttgagcatactattctcacagctggaaggagagctgataggggctggagcagcaggcccagttgaagcttctggagagtcagagtcggtctccagaggacaggcgtgccgctagtgtaacccggacaccccagtgatagctggccccccagtgtatcacgcacctc

SEQ ID NO: 272025 - DNA, 916 bp, Homo sapiens
aggcagaggaccctgcggccttccgcagtgtttgtgtccctgattacttgagattagggattggtgatgactcttaacgagcatgctgccttcaagcatctgtttaacaaagcacatcttgcaccgcccttaatccatttaaccctgagtggacacagcacatgtttcagagagcacagggttgggggtaaggtcacagatcaacaggatcccaaggcagaggaatttttcttagtgcagaacaaaatgaaaagtctcccatgtctacttctttctacacagacacggcaaccatccgatttctcaatcttttccccacctttcctgcctttctattccacaaagccgccattgtcatcctggcccattctcaatgagctgttgggcacacctcccagacggggtggtggccgggcagaggggctcctcacttcccagtaggggcggccgggcagaggcgcccctcacctcccggacggggcggctggccgggcgggggggctgaccccccccccaccggtcaggttagtctcgaactcctgacctcatgatctgctcacctaggcctcccaaagtgctgggattataggcatgagccactgcgccaggccaattttttttatatcactcttacacctgcaactttgctgaatttgtttacttgttctgacggttttgtggattccttagaatttcctacatacaagatcatgtcatatgcaaatacatatggttttatttcttcctttctaatttgtgtggcttttatttctttttcttgctaatttcctggctagaaatttaagtataatgttgaatagaggtggcaagagtgaatatccttgtcttcttcctgatcttaggagaaaaacttatagtctttcatcattaagtattacctgtggggctggatgcg

SEQ ID NO: 272026 - DNA, 365 bp, Homo sapiens
tccttgagggcagaaactgtcccctagtcttctatattttatttcacacaatgtacagaagactaaatgaataattgttagctggtttttttttttaaaggggataagatcagttacaatgtctttttcctcagtcaatcacataagtatctaaaatgacattccaaagtaaggacaggagtttaaatcctgaactatggtatctaaagtaaacttgaactttccttatttttaaaaaattttggccgggcgcggtggctcacgcctgtaatcccagcacttcagagggccgagatggaaggaaggattgcttgagcccaggagtttgagaccagcctgggcaacataacaaggccccgtcacta

SEQ ID NO: 272027 - DNA, 553 bp, Homo sapiens
tccttgagggcagaaactgtcccctagtcttctatattttatttcacacaatgtacagaagactaaatgaataattgttagctggtttttttttttaaaggggataagatcagttacaatgtctttttcctcagtcaatcacataagtatctaaaatgacattccaaagtaaggacaggagtttaaatcctgaactatggtatctaaagtaaacttgaactttccttatttttaaaaaattttggccgggcgcggtggctcacgcctgtaatcccagcactttgctgaatttgtttacttgttctgacggttttgtggattccttagaatttcctacatacaagatcatgtcatatgcaaatacatatggttttatttcttcctttctaatttgtgtggcttttatttctttttcttgctaatttcctggctagaaatttaagtataatgttgaatagaggtggcaagagtgaatatccttgtcttcttcctgatcttaggagaaaaacttatagtctttcatcattaagtattacctgtggggctggatgcg

SEQ ID NO: 272028 - DNA, 920 bp, Homo sapiens
cacagaacatggcatttctcaacctcctgcagaggggcagggatgctggaccagttccagtcaatgaaatgtggatggaagtgatcgtaaattgaaaacactatgaggacactgaggcacaggaagtcaagaaacctgcacaaagccatgcaacaaccagccagtatctgagtcatgaccaaagcccagagcccagtctgccttcttgtctgaggtcctttcgacagcctgcattgcttatcttctaggacaatctggccctagggaaggaggccacctggacagcaccatggcgacacagagggcaccagatatgggaaagtttctctctgagaccatgtttgcttctgtttctcaagccaagttaattctctcctagaacaacgccagttagaaatgggggaagctactgaaatacctttggtggcttgtcttgcatcgatattattttctcccactgaggagttagagggtttctggttatgtgctatgtaaattctttggctcattcttttttttccatccttccctccatggtccatcaggaaaatcatggttaaatgagtgagtaaaagcttatgatttgcccgtccacgtcccaacttccttcttcctttagacctttttgtgtgacatgtattttctttgaccctgattttttatttatagcttctactttattgaaagcactcttgtaagctgcctctattcctttgtggattgaaacagagtgtaaggaaataaaatattatctttttttcagaaaaagaacattttggaaaatgaaagtgtattttccgtgtttgttttgttttgtgatagaaacagaagataagggaaggattatccaattctacaagctttgtgctctggggaatacaggactgatgcttgatattaaatgtatgtgctacagtgta

SEQ ID NO: 272029 - DNA, 447 bp, Homo sapiens
tgtgaaggaaatactgtgtagtgtctgttgcctgaggggaagaagatagcaaatgtcatttgtggaataaatatatataattgcatgtcatattctgagcctgcactaaaaagctgtaggtgttattggttttcactggttgattgcctcgctagacaaaacagttgagaaggaatcttcagcttcttgttctcttcattttagaaaagaaaaaaaggatgagaatacagaaagtggctttgctaagttgcagagaacagggaggtaggatttttttccggtagtttttgatgtgttcaaatgtgatcaagatttatgtagtaactaggcgtttgacttacctctatctttttaataagccttagttacacttgtgatgactggtgatcattttatttgttctaagcattgttcaaataaattattagggaattggagcaaatactg

SEQ ID NO: 272030 - DNA, 324 bp, Homo sapiens
cgctataacataaatttgtaccatctacttggtacaggaatcccaaaccgaagaacatacatgataattgatcaggaacggaaagaaaactcccggggacattttcacagttccttggtcagtgtccagaggcaaaactgtttccaaagaagatgacctcacaattaaattacaaatcacaccaatgaaggtgaatagacacaaccagaaaatagcactgcaacaattaaggatatcatggacaagtctgaaagtgattacaaacaattatttacataatgatgtcagtaaagatatttgtaagtgtatatgaagtgtataaag

SEQ ID NO: 272031 - DNA, 552 bp, Homo sapiens
acgccctcttcagagacatcttcgtcatcctgcaagaaacaagcagcgtccatggctgttgtcatcccagatgctgtcctcaaggaggggctgagtggcgatgccctcagcagccccagtgcacctgagcccgtggtgggcatccctgataacaaactagatgctgactacatcaagagatacctgggcgatttgactccgctgcaggagagctgtctcattagacttcacgggtggctccaggagacccacaagggtgaaattccaaaagatgagcatattcttcagttcctatgtgcatgggattttaatattgacaaagccagagagatcatttgtcaatctttggcgtggaggaagcagcaccaggtagactacattcttgctacctgggccgttccacaggtccttcagaattactacacgggaggctggcatcatcacgacaaagatgggtggcccctctgtatgctcaggctggggcagatggacaccaacggcttggtgagagcactcggggaggaagccctgctgagatacgttctctccata

SEQ ID NO: 272032 - DNA, 443 bp, Homo sapiens
caaaattctgcatcttaaaaccagatttgggccaggtgtggtggctcacacctataattgcagcattttgggaggcccaaggcgggtggctcacctgaggtcgggagtttgagaccagcctgaccaacatggtgaaacctcgtctccactagaagtacaaaaattagccaggcatggtggtgcacatctgtagtcccagctactcgagaggctgaggcaggaggattgcttgaacctgggaggttgcagtgagtggagatcatgccactgcactccagcctaggcaacagagtgagactccacctcaaaaaaatttttaaaaaaatgaaaaaaacaacaacaacaaaaaacagactttcatgctccttctccaggaggggtgaggaaaatgtacccatttctctgattaaaaacttattttttgatcaagaggtggttgttta

SEQ ID NO: 272033 - DNA, 285 bp, Homo sapiens
ctgctgccccaggaagaaagtagtgaacactggaggactgtcagccctgtcagtttctggaaatgtgccctgagtttaagttctggtttcagattatgaggagcaaaattactgagtaggcctcctcctagaacaggaagctcttcccgctgtgggccagtggctctgacatatcacagagcctgctctgatgaaggcagcaggaatgatttcaaaacaagcaaaaccaaagaaaactgtttgacaatggaagtaatagaggctcattttagaaaacatagacat

SEQ ID NO: 272034 - DNA, 386 bp, Homo sapiens
acggtgggggtgctgaggccttggcgccacgcctctgtggggtgagggccatcttgagccagagcctagagtgcattccagaacctgatcttatcactccaccaaggacgctagtattctgggggattgatttgctgcaaccagtgatggatttaaaacacatgaggaagccaattcattccttcaccctgggcctgcagaaccatccgagctgcactggggcagttctgtacatctccagtgaatccagccctgcacccctctgttaacgtgcttttcaaaccaaacagtggaatgcattggtcatcacagggtttgatctgatgtgaaaagtgttataaagccattccaattaaagtgcctctggccttgtgtttcctgaaagc

SEQ ID NO: 272035 - DNA, 437 bp, Homo sapiens
ccccagaccatccgcttccagcctaccgtagaggaaaggcccctcaaaacaggcatatggtccgagctgggcctaagggcctatgtgtatcctgtgaaccccccacctcccagccctgaggctcctagccacaagaacggtggggagggggcggtgccagaggcagaggcggctcagtaccagcctgtcccagctcccaccctgggcccagcagtcatccctgaattttcccggcaccgctcctcaggccgaatagtgtatgatgcccgggacatgagacggcggcttcgggaactgacccgggaggtggaggccctgtccggctgctaccccctagcctctggatccagcactgccgaggagacaagcaagaattgggtgtaccgttccctaactgggaggtgactggaaaaaaataaaaaggagagaggaggtga

SEQ ID NO: 272036 - DNA, 224 bp, Homo sapiens
ccctgagtcatagagacaaggaggggaatgcagagtgtggggttcccccccaaaccccaaatcatagagatgaggaggggaatgcagagtgcagggtcccctctaaaccccgagtcacagagacaaggaggggaatgcagagtgcagcgtcccccataaaccccgagtcacagagatgaggaggggaatgcagagtgcagggtcccccctaaaccccgagtcac

SEQ ID NO: 272037 - DNA, 364 bp, Homo sapiens
caagcactgaacaatcttgatcatttattcaggagacaaatatttgccaagcaacaaccatgtaccaaatcctgagaaataaactaaggcagcatcggtgagcaaggtagcccgtgccttcttaaaacttctactgagaaagacagcttggcgattgacatgcagttataataaatttaatagctagacgattaagtatatgatcctatgggaccacttagtggtggtacccagtgcagtttacgggaagtagggaaggcttcctgtactaaataacctctcatgggttaagttatgcagaaaaaatgatccagaaggtgttccctgctaagagaatgttatatgttgaaagacactaaggtga

SEQ ID NO: 272038 - DNA, 473 bp, Homo sapiens
tagagttgtttattgcttaaaaaacagttcaggatgtttttgcaattttccctcccccatgcccaccccaatactttacttatccccatatagaggatatatagctgagcacattaattcctcacttaacatcaaggataggttcttagaaactgtgaccttaagggaaattatgtataaagaaaccaattttaccataggtgagttgatatcaacaggagttaagttcatgtggcatacttctggtcacgaaaacatatctaacttctacataaaggcccaaaatacttctagcattaaacattgaaataaatgtgagctgtacatacacttaagaaagatttatgggccgggcacggtggcttacgcctgtaatcccagcgctttgggaggccgaggtgggcggatcatgaggtcaggagatcgagacgatcctggctaatacggtgaaaccctgtctctactaaaactac

SEQ ID NO: 272039 - DNA, 466 bp, Homo sapiens
tgagatggagtctcactctgtcgcccaggctggaatgcaatggcacaatctcggctcactgcaacctctgactcccaggttcaagccattctccctgcctcagcttcctgagtagctgggattacagtctgggtgacagagaaagatcctgtcttaaataaataaataaatagttgtatcgcatatatggaggaaagaaatgataaagaagaaaaattacaaggttactaatgatttcttttcagctaagcttttggtaatgctcatcttttaatgttctttgggcaaacacaaatcaaacaatttttacaactgttattaatatgcctaaagcagtatagcaaaacatttttcataaaaaaagagcattataaaatccttaaatatttaggatagttatacacttcaacttctctatttaaggggtggagaagatggagattgatggaacatgcctattttctga

SEQ ID NO: 272040 - DNA, 237 bp, Homo sapiens
acaggggtgaactactgcacctagccaagtggtagtttcttaaaggttgtttgcaatggggaatctgaaaccatatcaatgaactttttgtactgttatttaaaatccattagtctatcttgcacttggaatggatcatatgtgacagaattagtctagttttgatatgtagatatgctacttgtttaattagtactttaagtgtttagccatatgccttttctgttaaatgccttc

SEQ ID NO: 272041 - DNA, 531 bp, Homo sapiens
ttagataaaagaaataagttgtttttgtgtatgattttaaaaatagtttaccatatttagataggggaaaattaaagtttttctcaattgtattccaatgttttacaaaatggtaatttattccaggaaattttattcaacaaaaaatatgagttccatcagaagattattctcagacattgaactatttaaaattgctattatagatgtatttatttactaattctgctgtatacaaagttccacaaactagctagcttgaaacagcagaaatctgttttcacactggaaacagtggaaggaggctggaagtctgaaatcaaagtatctgtaggcccacactctgtcgactagcttctggttattgccagcagtccttggtgttcctaaggagtttgcagctgcataactccagtctttgcctctgttgttaaatggttgtcttccctctctgtcttcacttccctttttatgtgtctctgtgtcttctcttgtaaggacagaaattaaaattacttgtgcattgtttga

SEQ ID NO: 272042 - DNA, 103 bp, Homo sapiens
caggaggggctggagcggtggccgggagactctgcacatcggtttggaaccgtggaggaactgtacacccacagactgaactggcgtgtgtgcaaactgaaaa

SEQ ID NO: 272043 - DNA, 415 bp, Homo sapiens
ggaagtgactccttatcagaacttaactatgctggcaccctgatcttagacttccattctccagaagtgaaggagcttagattgctgattttagactttcttcttttctaatgtaagtatttagaactatacattgccctctcagtactggtttagctaccggccacaaattttggttctgggggtacatgtgcaggtttgttacatgggtaaattgcatgtggctgggatttcatatacaaattatttcatcagaaattgccacagccaccccaaccttcagcaatagcaccctgatcagtcagcagccatgaacatcaaggcaagacccttcaccagccaaaaagattaagactcactgaagcctcagatgaacattaattttttttttgcaataaagtgtttctcaattaag

SEQ ID NO: 272044 - DNA, 407 bp, Homo sapiens
gcactctctgtagttaccctgctgtaaagctctcactcccctcctcttgcacattggtcatcttgggaggtgggtatgttttcaaggtacatacccaaatggcaaaagtccaccatactttgtagaaggcgcctagcataatgcctagagggtcacaggcattcactcagcacttgttcccaacaccatctcaatgacaacaggtagatctttgctatctttggatttccatagcccttctctgtacctcacgcaagctcttaatcagatactgtgataattaattgaaagtttagtgtgtatttccaatctccctcaattagtctttctcttgtaggtaaggatttagtattttttttttctccttacctccattccaaaaagccattccctgcctgtggtaggcc

SEQ ID NO: 272045 - DNA, 137 bp, Homo sapiens
caccaggctaaagtcctaaattcccaaatcatttattgtgttctgtaaatatcacaacactggccactagtttgagattttaaaattgaagttgaaaaatagtgttttttaaaaaaattaactgaatttaaaacgta

SEQ ID NO: 272046 - DNA, 493 bp, Homo sapiens
attcttttcacttcttttgcattctgatggggagggagagagggacagacaaaaagagaggcagagcgagacgaagaggacaatttgcatttcagctttcttctcatcccaaaaatgatttagtataagacaccactcaaaacaaagcaaacacattataggacaaaagaaaacaattcaagaaacaaggctagaagaacagaacactaccactgtaccagttaaggctcctgaatataaacaacagacatatattctagtgaatctaagtcaaaaaggaatttattggctaggtactagatagttcacaacactaagacaaggttggaaaatccagcttggacaggaatcaaggaaggcaaatcacagaagaatgtttgcctccacagccttgaatgaagactggaacttatgttactgaatcaaaggttacaggctcttttagaatttgtctaccaggctttctggtttttaccggaaagccccgctattt

SEQ ID NO: 272047 - DNA, 426 bp, Homo sapiens
atgctcataaaggtccaccaacatacaagacagctcccagaattagtcctgcctgcctccgtccactctctagatctattcactaaattcagtatcatcagaggcaggagatgatagggagaacaagcaggacaagagttcttaaatacggagatgaacagagaattcaaagacgaacaaacatttgagaaaagccaacaccgtgagaggccccaaactcggtgtattactcaaagagttagtagacaaaaaatatttcaaggagacttttaatatattatctaggggattttctttaacagaaaaacttaaggatatctagtcctcagtattgccagaaatgcatgctgctgagtcattctacaccattcagagctggttaccacttttagaagcaagctagtattatagtgtgatgctgtaaaa

SEQ ID NO: 272048 - DNA, 447 bp, Homo sapiens
caaaatccacttcacaacccagatggttcatatcacaccctctttcaaggacccagagcagccactggaagagaaggagtaggaacgctctcttaaagtccacttatcctattccttcaaattaagaccaaagtccaatgtatttaggtaaaaaataatttcttttagaaaatgctaaggtttgtcttctgaaatttaataacagaaacaaaaaaagaacactagatgtaatgaagtgagaccagaaaagacaaactaaactatccttactaggttggaatggatggggtggagttcctatcaggctagcattctggggaaagctgtattttttttttttggcggtggggggaaggtgtctcactctgtcgcccaggctggaatgcagtgggccgagatcctgccactgcactccaggctgggcgacagagcaagactccgtttcca

SEQ ID NO: 272049 - DNA, 1238 bp, Homo sapiens
caaaatccacttcacaacccagatggttcatatcacaccctctttcaaggacccagagcagccactggaagagaaggagtaggaacgctctcttaaagtccacttatcctattccttcaaattaagaccaaagtccaatgtatttaggtaaaaaataatttcttttagaaaatgctaaggtttgtcttctgaaatttaataacagaaacaaaaaaagaacactagatgtaatgaagtgagaccagaaaagacaaactaaactatccttactaggttggaatggatggggtggagttcctatcaggctagcattctggggaaagctgtattttttttttttggcggtggggggaaggtgtctcactctgtcgcccaggctggaatgcagtggcgccatctccgctcactgcaagctcagcccctcgggtttatgccattctccagccccagcctcccagtagctgggactacaggcgtccgccaccacacacggctaatttttttgtatttttagtagagacggtgtttcaccgtgttctccaggatggtctcgattcctgaattcgtgatccgcccgcctctgcctcccaaagtgctgggattacaggcgtgagccactgtgcctggccggatttctttttaagagattcatcataccttgacctgtgccccatttccctcctccacctgtctgacctggcattcctatttcgggagaccagaagtggggggaagagaagggatgactgtttctttgctttcaccattcctgcatgccatgcaaaggaaggaatattgcgcttttaaatatccgttttattaagtaagtggttactctttcaaagacaaaaaaaaatgcaaattgttacaaaactggcagtatttgtaagtgcaagcactacacgctgccttgttcttttaccaattgcatttgcattttaaggtactacttgtacagccatggtggagaacagtttggaggttcctctaaacactgaaaatagaggtgccacatgatccagcaatcccactgttggatatataccccagaaataagaaatgagtatatcgaagaaattatctgcactcccatgttggttgcaccactgttgacaatagctaagatttggaagcaacctaagtgtccatcaacagattaatgtattaaagaaaatgtggtagatacacacagtggagtattattcagccctaaaaaagaatgagattcagtcatttgc

SEQ ID NO: 272050 - DNA, 637 bp, Homo sapiens
ttttaagaaatggcatgctaggctttaagaaaactggataaatgaaaatccaaacttaaataagataaatatttggacgcaaaagttctcaaggttcattatgagaaatgtagtcatttcacataaaagctttgttttgcacatttctcaataatgtaatttgtcatgtaaaagaagaaaagtctggagtgggccaggcatggtggcttacacttgtattccccagcactttggaatgttgaggcaggaggattgctggagcccaggagttcgagaccagcctccgcaacatacatggggagaccccagccctacaaaaaatagtaataataattagctgggcatggtgacatgagcctgtggttccagccactttggaggctgaggcaggaggatcatttgaacatgggagtttgaagctatggtgagccatgatcatgccactgcattccagtttagacaacagagtgagactccgtctgtgaatgagtgaatgaatgaatgaaaaagaaaaagcttagagtgattgtaccaggcattcctgaggtacattcacattttataattaaactcaaccactctttgtactaaattttttctcgctgacattgacctaagatatattcctttcccctct

SEQ ID NO: 272051 - DNA, 466 bp, Homo sapiens
gacaataagagatgaactgcactaaggtatttggtgagttcgatttctttctcaaattatgcaaatttcctccagcgtttccccctaaacaatgggaagttgcatattctcaaagctgtaagaccttcaaagataatctcagagtgattttaaggcaaaataagtagtttaatatttatatctaactgcgtctctggtgtctcagaagtctttgacatcattggaatgactttgttagtacctttcccataaatagttagctagacaggtgaaagttcaagaaaaataatgagatcctttacgcaactcaaatagactgttcatgagattccctgttcaacaaacatctgacaaattattgggtggttgtgttgacctagacacctagagtgaggcacctagagtgagcagcagagaaagcagccgggagattacattcttatgggacattaaactggtaagccaa

SEQ ID NO: 272052 - DNA, 461 bp, Homo sapiens
gactgctgagcatgcattcccccagcccaggccttggatctctgctctgccagctactggcagggaaactgagggatggcagaactgagccccaataaggggcaggcgctttgctccacgccgtacatgcacatatcacttatatcacttattgctcacaacagtcctatggaattaccgttatccctgttttatcaaagaggaaactctcagcctggcccacggtgccatgggcaggacatgagtggcagagccagggattggaacccaggctagcctgactctttaccatgcttgggaaggcccagaaagcagaggaagagcaggagcatgagagttagaggatggttcagaccccagaggagatggaccccaaggcccctagcctccctgcctgccctgccctatgcgagcccaacactgatacggaggaaagctggccaactgcatggcctaatgtg

SEQ ID NO: 272053 - DNA, 430 bp, Homo sapiens
aaacaaggttctgggatccaggcccctaaagcagccacagaggtgcagttgtcagtggcctccatggagctcccttcgagataattcacacttggaacttgtaaggaagtagcttttctctcagataatcattcctcagacactgcattaaggcttcacaaacattgtcagcatatttactgtaaattatacaaagcttcaagggaatgaagttgagtcatcttttctgccccactgtattctctggaactttctccctttttttgagactgagtctcattctgtcatccaggttggagtgcagtggtgggatctcggctcactgcaacctctgcctcctgaggcaggagaatcgcttgaactcagggggctgtttgtggtgagctgagatctgcaccactgcactccagcccaggtgacagagtgagac

SEQ ID NO: 272054 - DNA, 373 bp, Homo sapiens
tgacaaatgtatggcatataacccaattatagtattacacagactctaattttttggtagtctaaagatatctttaaacttataaaactaaacaaaaataaaaatgttcagtcactggataacttcaagcataaaggtggtcttaattgttggtaacaaaagagtaagttgaaaacacacctactatttatatgcaattttttcatatgtggcaacattccccaccaggaaaatgtccacattaaggaacaagtcactaatcagtaacagaacatagagctctgaatatcaaagtagtattctgttaagaaatgttctgtcttgatgaaacttttaaaaacagatgcacaatatttgtattatttctcaaaac

SEQ ID NO: 272055 - DNA, 487 bp, Homo sapiens
cagatgagaaattcattcataaattatctagctctacccaaactttcaatgataatgtgtttctattccagaaatgattccaatttctatgattcaactgttatttttcttcattgaatgagacatttacaatgctattgtaaattttagtttttcatgcatgtacaagtaaaaggaagtagtgtgcatcacataattaaaggctacttttaatttgattggttaggaatttgctcaatttatgtcttttgcataccatatgcaaatacgaagtaagatttcaagtttgtttgcataccacatgcaaacaaatgttattagttttcttgatcgcgtaaattggcatagagaaatattctacaagattaaaacaccgttgacaattatgtacctaaaagtttctataaatatgtttttactatgttaaatataactgtttgaatatatgtgaggcacctttgaaataaagttgtatataaaggcagta

SEQ ID NO: 272056 - DNA, 450 bp, Homo sapiens
ttatacttccaataggtattttttggtactctactatctgcatttttctatccatgtctacacatgagtagtattaaaataaccagacactgaatctgtcactgttttcaggattttgttcctatccagctgtggtctgaatttttccatttaaaaggaccataactatacttttttgaccaagtctgttgtttcatcctctgtgggatgaacacatttcttagcccttcacagcatgcattaccagaaacaatgacagactagaaacttccaaaattctttataattctaattcccaacaggcacattgaatccattctacagtaccttgcacaagtggtgatgcacggaagctataaagaactcaatgttttgaattttgctgactcacaatcagctaaaaaagaattgtatcaatgtatcaattcttgttgtcttctttcaattaag

SEQ ID NO: 272057 - DNA, 328 bp, Homo sapiens
cctcctttcttcacccacctctaccctcagtccccaccaaaagcaatagcctaagccctagagtgtagatatagactatagggcccttaggtcatctctgagatgacttctgagactttttccctatctgtaatgacatgcccaaggtcctataaccggattgtggtagaaatgggcctaggaatcaggcattctggcccctacactatttctttccattacaccattatacccttgggacacattgtaagatcctgaaactggtggctggtagcctgcctccatgttattttttgatgaggggaattcaggacagttgctgctatta

SEQ ID NO: 272058 - DNA, 416 bp, Homo sapiens
aaatttatcatgtaaaagaacacttcttgctgtagctactggacacaggttaaaatattcttaagtgtgatccatcttagcatccaaactcaaattttaattttgtggtatgaacagactatgaacagaaccaatttattgtatgaattttaatttttgtctacttaaagaagataggaaaatttaacagattatagaacttattcctaaacatgtattctttaatatatggtttagtggttattcattatcacttcttaggcaatattttgaagctgggataaatgaagtgaaggagaattaggtgaaaatggaaggctttgctatttagaaaaataggaaagaagagtatatctggaaaaatggcataagatttttttgaataagataatttggattctaaaatggaattagga

SEQ ID NO: 272059 - DNA, 1190 bp, Homo sapiens
aacggcgtggactcaggcgggttgctggatttctctgagccttggcgtgctctacactgcagggctatacatgttcccagcttgagggcgtgctggggattgacaaatatatgaaacatataagcgcaatgattttctaaaattgtgcattcccagcgtgcccattggttctctctcgctggcccaactttgtgtgctgtccataaatccctttctgtggacggtgacagtaggattgggagtgagtgggaagattgtggaaagattgcaaagaggtcattgcaggactcagacagaccttgcagtgggtttcagagtaatactcaggttctcccatggaactttcaaagctggctctaagaaagatgaagaggacaaacccactcctggacatagtgccaacctagaactgtcagctccacacaggatcacagggaagggagcttggtaagacagcccagtagggggccctgcttttcagaagaggaaactggagccatgcaaggggctggggatcaacttagaaaagagcacaggactcacagtcctgggcctgcacgtaaagctagccccctgccccacggaaatggcaagcagtgcttccctccaggggttctacatctgtgctccatctcaaaatgcataaaagcctgagtcattcagatgggagagacagtgtttctacttcctcttagttggggttcctccagaaggagaccctgagagaggacttgaggttatgtagtttatttgagtgaagatcccggaagtagggagagaaggaagctgacggggaaggcgtgcattatcaagtaagttaccgtcatgtgcacaactggagctgaatcccactggggaaccccgagagacagagctgacaccccagagttcacccagcaaggcggggagacagctggggtatttattcaccaagtctatcacttatgaaaggctgtttctggaaacaatttctgactggccctgcacacacctgagcatacttcctaagccggggatgtccctgagctgagacaggcgttcgtgacaagcagacttcgagtggaaggcaggcatcagaaccaccctgtgagctggttcagacaaagattgcaggcccttccacccccctggccccgccaagttcctgactccctaggtctggagtggggcccgggaatttgcatttcaaa

SEQ ID NO: 272060 - DNA, 1133 bp, Homo sapiens
aacggcgtggactcaggcgggttgctggatttctctgagccttggcgtgctctacactgcagggctatacatgttcccagcttgagggcgtgctggggattgacaaatatatgaaacatataagcgcaatgattttctaaaattgtgcattcccagcgtgcccattggttctctctcgctggcccaactttgtgtgctgtccataaatccctttctgtggacggtgacagtaggattgggagtgagtgggaagattgtggaaagattgcaaagaggtcattgcaggactcagacagaccttgcagtgggtttcagagtaatactcaggttctcccatggaactttcaaagctggctctaagaaagatgaagaggacaaacccactcctggacatagtgccaacctagaactgtcagctccacacaggatcacagggaagggagcttggtaagacagcccagtagggggccctgcttttcagaagaggaaactggagccatgcaaggggctggggatcaacttagaaaagagcacaggactcacagtcctgggcctgcacgtaaagctagccccctgccccacggaaatggcaagcagtgcttccctccaggggttctacatctgtgctccatctcaaaatgcataaaagcctgagtcattcagatgggagagacagtgtttctacttcctcttagttggggttcctccagaaggagaccctgagagaggacttgaggttatgtagtttatttgagtgaagatcccggaagtagggagagaaggaagctgacggggaaggcgtgcattatcaagtaagttaccgtcatgtgcacaactggagctgaatcccactggggaaccccgagagacagagctgacaccccagagttcacccagcaaggcggggagacagctggggtatttattcaccaagtctatcacttatgaaaggctgtttctggaaacaatttctgactggccctgcacacacctgagcatacttcctaagccggggatgtccctgagctgagacaggcgttcgtgacaagcagacttcgagtggaaggcaggcatcagaaccaccctgtgcccgaaaagtacctgtggtatagggatccttagagtcaccgctg

SEQ ID NO: 272061 - DNA, 445 bp, Homo sapiens
ttggtttcaaaacttgttacaaagctgcagtgattaagacaaggtggtgctgtcataataatagacataaagatcaatggaatacaactgagagtgtagaaataaacctttacctctctgccagtttatttttgacaaggatgccaaaacaatttgatggtaaaagaatttgaaaataatttttcaagtaatagggctgggcaactgcatagacacatgcaaaaggatgaatttggactcctacctcataccatatacaaaaattaactcaaaatgaatcaaagacctaaaggtaaaacttaaaactataaaactcgccaggtgcagtggctaacaccagtaatcccagcactttgggaggctgaggtgggtggatcacctgaggtcaagagttcaagaccagcttggccaacatagtgaaactctgtctctactaaaaatacaa

SEQ ID NO: 272062 - DNA, 299 bp, Homo sapiens
taattttatacctaaatttagtttaaaacaaaaccctcccctgtttggatggcaacatgttggtgaggttagcccttttattttcagacctcgggttttgtacagtttctttttctctttcagttcatgagttggaatagggaagtattttcattcaaaaaaaggctagaatttttaaagttctaaatatagaactcgtattataaaatttaagtgaagtaaaacatctcactactttccatttatattcgaacaaattttatgttatataaaaatggtttataaacctctccttgttt

SEQ ID NO: 272063 - DNA, 405 bp, Homo sapiens
attcttctgcaggcaaacggagtcgccatatgacccagccctggtcttgcttggctttctggatgttctcaaccttgacatgactccttattctccaattcatttggacctcaagacactactactctggctacagccgccaggcattaaaaagatgacacagaaaaattacagagtcagcatatatttgaatactggataaaagggaagaggatgaaatggatttttcaaagcttctaaagaaaacagaactagctgtgtagcagactcctcttataaacctctgcgaagttctacttgaaaagctgtggtttcatttcaaaggaaaccagcaatcagggggatctctacaggaaaatctcttccctatgtcttctttagactcttcaaaaaggagagagagca

SEQ ID NO: 272064 - DNA, 796 bp, Homo sapiens
ctttaaaagaataagttaaactgagcagctgctattcagacggtttgctgtgcctgtaaagggtatgctattcagccacctagccatttaaaaaaaaacaaaaaacctagaagatgcatattctgtaagcataatgcttttcttcagtgattaaacctctattaatatgtgtgttaatcctatgaagtactatatttctacacagttaaaatgtattagtggaaaaaatataaaagggattgtgaagtgcatttattgctgtagtaaattaagtcctggttagctgattatcaaaacattatctgatttacatttctataggcttatggacatatgaacaggaaattaattttggaagtaggttcagttgggtttttaagctcagcaaatgagaaaaccacatctctgctcatattaactgctctccatacaggagatcatcaagcatttgttgacttacccagtggataaaatattaaaacttcgaaaccaagaaaccaaatatgttgtttaggtatttatcatttttatacagttaactccttatagggattactgtgaaagtggttaagattttctctagttttatgtttatttgcttaagctttgagcaagggcagctgtgtggtcatgtagccgactactactcccagccctttcctctcccattgcattcagctcactcctacattctgttctgaccaggacggtagatactgagcacctcagggtttcattcccaactcagaagaaacactgagtttttaagtccagtgacctaccataagtcatatca

SEQ ID NO: 272065 - DNA, 560 bp, Homo sapiens
tactactactaaattcgcggccgcgtcgacattaatttcctgttcatatgtccataagcctatagaaatgtaaatcagataatgttttgataatcagctaaccaggaaattaattttggaagtaggttcagttgggtttttaagctcagcaaatgagaaaaccacatctctgctcatattaactgctctccatacaggagatcatcaagcatttgttgacttacccagtggataaaatattaaaacttcgaaaccaagaaaccaaatatgttgtttaggtatttatcatttttatacagttaactccttatagggattactgtgaaagtggttaagattttctctagttttatgtttatttgcttaagctttgagcaagggcagctgtgtggtcatgtagccgactactactcccagccctttcctctcccattgcattcagctcactcctacattctgttctgaccaggacggtagatactgagcacctcagggtttcattcccaactcagaagaaacactgagtttttaagtccagtgacctaccataagtcatatca

SEQ ID NO: 272066 - DNA, 472 bp, Homo sapiens
acaactcaaattcaatgtgattaattcctaaaatcatagcactaacattcagtagtcatgtccagctcttcctttatgtcaggtacctagacatagcggaacagaaaacccttcaaaagttcagtctagtctggaaaacaaacatgaagcaaagaaggcacaacaccatatggaaaagcaagacagaaatatgtacagggcagagaggctgcactgtgtcatttaatcacgaagactctgttattagactgctcgaatacacaaagctgtgttaccttggacatgttacttcacctctctgggcttcagttgtctcattctgtaaaatggtgatattactggaactcatctcatagggttgttagtgagtgaatgtttgtaaaacaggatagtgcccagcacatactagtaacaaatgtaaaatacatgaaacaaataaatatttcctgtgtcctctgaactttaaactctc

SEQ ID NO: 272067 - DNA, 622 bp, Homo sapiens
gatggtggggaaaaatgtatttctggacattaatgaattgccctaatagatttccataaacaggttttggaactgaatattgcattgattattcagatttcttttggatttttcactggcagaagagaaactaatctgatcagtaataaaaaaataaaaagaaaacaatacaatataataaaactctgacatttcataggttcagttatccttggctaaattatgaggtatgactatttgagctttacatttattaacaaaagtggtctttaattggggtgtttttatgcttttttgttcagggtttttatgaagttctgcatggctttgtattcagaagccattcttttatcaaagtttcactagcattatctgagcttaatattctgggatgtactttgtagccagtgatgaaaggaggaaagtcagcagaaattacttacatatttgttagcatttgaaacatcttagccttctaataagaactatcacggccaggcacagtggcttatgtctgtaatcccagtgccttgggaagctgaggtaggaggatggaggatggctcaaggccaggagttccaggcaagcttgggcaacgtagccagactccatctcaaaaaaa

SEQ ID NO: 272068 - DNA, 526 bp, Homo sapiens
ctccggcacgaggcctccgactccgccaggcaaggagccacactctcccacaaggaggcagcaaacaccgcacccttggctctcggagcagcaggcgctgattttggaaaatccgctccttaagttttcacttaccacctggactagagaaggtggcaatatcttatactgggcacttacaacctgccagactcatttaattcttagaaaactcctgtgagatggatgtgggtatccccatttcacgatgaagaaaccgaagtcagaggagcccagtacttgggaacccaagtggaggtgatgccaaagctgagcattttctgttctgccactttgcctctcaggaacccatgggtgcagttcccaggaggaaggggattccagcctccagctgccatccctttttcaagaaaaaagctacggttactggcattaggataaataactttggctttaagatgatcttagaattaacgtgttcactgcatacatttggaaaaataaaaataaaagtattacccagaga

SEQ ID NO: 272069 - DNA, 379 bp, Homo sapiens
gacacaggctgttgctctgtcacccaggctggagtgcagtggcgcagtcatggctcactgcagcctcagcctggatcaactgatcctcctgtccttgcctcctaagtagctgggaccataggcatgtgacatgaagcctggctaaatttatttttttagagacgaggtctcaccatgttgcccaggctggtcttgaactcctgggcccaagtgatctccagccttggcctcccaaagtcctgggattacaggcatgagccatagtgcatactattactgcacatttaagcaggataagagccaatgggagggtgagcatggtggcttatgcctgtaatcccagcaaatcaaatatttaaagcattttgttaacgtaaaa

SEQ ID NO: 272070 - DNA, 342 bp, Homo sapiens
gacacaggctgttgctctgtcacccaggctggagtgcagtggcgcagtcatggctcactgcagcctcagcctggatcaactgatcctcctgtccttgcctcctaagtagctgggaccataggcatgtgacatgaagcctggctaaatttatttttttagagacgaggcggtcggatcgtggggtcaggaggtcgagaccagcctgatcaacatggtgaaaccccatatctactaaaaatacaatacaaacattagctgagtgtggtggtgggcgcctgtaatcccagctacttgggaggctgaggcagaggttgcagtgagccgagatcatgccattgcact

SEQ ID NO: 272071 - DNA, 353 bp, Homo sapiens
tgcatgtttttactcaaaagcgggagttgaacaataagaagacacacacacagggatgggaacatcacataccgtggcctattatggcattgggggaaaggggagcaagagcattaggacaaatacctaatgtatgcggggcttaaaacctaaatgatgggttgataggtgcagcaaaccaccatagcaaatgtatacctatgtaacaaacctgcacattcatcacatgcatcccagaacttaaagaaaaataaaaataattttaaaaagaaagaaaacctagtaaatacttttcttgacatgggttttggcaaataatttatggccaagttcctaatagcaattgcaaaaaa

SEQ ID NO: 272072 - DNA, 362 bp, Homo sapiens
ctgctaccatccttttccatacagaataaaagcagaaaaatagagggttgggttctccccctttttcaatgttataattgcaatgagtgctttcagtattcaacaattcattattttaatgttttataattggctgtgctccacaaaatgatgaggcaattctcagtaaatatatacaataaaattagaaccagtaaaaatacaaaacagaacaggaagacaagatcaggagaaaaaagtcgaatacacctctgctaagagtgtctccacagcttctcttttggctttgagattttcaatacaatgagaagggagaccctattatttacaaagctcttgttatcaaaaaccagaaaagataa

SEQ ID NO: 272073 - DNA, 374 bp, Homo sapiens
tccaattctgaaatgataaatgacagtgcatttatgtataaatgacagtgtattcatctccccaaagctggtcacaagtgccctcactgctctggagtaaaacatgggctagaaacaaggaagcaaagacttaaaaacagcatcatgtttattcactggagaaaaagacaaacagttcaactgcctgcttcactttgccttcaagtttatcaagatgaggccgagaattctcataaactcctcaaggacaccaaaaggagttcctgtagactcactcagagtcctttccctcctctccctcaagcagtgcccacctcttttcaggaagcatcttctcttttccatttgactttcataaagaagctggagtttta

SEQ ID NO: 272074 - DNA, 221 bp, Homo sapiens
tttatttacgaaacactaaaataaccaaagtaaaaacaaatgtttgaccaagccgaccacgtgtttttatactaccttttcttagtgcctcaaatgtcttcctaaatcaagtgcacctgctgcaaagatggaacattctggtgcgagagcccagagcagagcacgttttcgttccccaagctgaggcaactgcgactcgcccgcgcgaccggcaaggccac

SEQ ID NO: 272075 - DNA, 420 bp, Homo sapiens
gctgatttttaaattttttgtagagatggggtctcactacattatccaggctggtctcgaactcctgagctcaagtcaccctcctgtctttgtaatcccaaaattctggggttacaggtgtgagccactattcttaattattcttaatctctgcttttgctaatcggattttgctttccatctttcagtgtacaccgaatcattgtgtcactggccttagtgtgggggtcctcttctgctatctcacatttgtctggaattccagcgggaagcgttcactggcatctctggtcttcctcatgacatctgtggggtttgcaggtgtgatgaatcattcttgcctcagagaatttgaggcctcaaactttattgttccccagtgtttctgtcccacacctggtcaacttactgaaaattaaa

SEQ ID NO: 272076 - DNA, 473 bp, Homo sapiens
aatccttttcctccaacttggagaaaaatacatccctcctctctattgtttgtcttaccacttatacacttattatcatctattcaattgataactcctgctatttttttcatctttaaccttcctccttcagtaaatcttccatcacatactaatatgctcaaatttcccttgaaaaaagcaaaacaaactctacctaattatattcctctgccttttatttttgtagactcaaacactgagatcatgcacagttctcttatacccaccgttattgacttcccagcctccagaactgtgagaaataaatgtctgttgtgaaagccacccagtctatggtactttcttatattagcccaagtggactaagacatgccttcacccagcttcccctactattaacatcttacattagtatggcgcatttgttacaattactgacccaatattgaaatgttattattaactaaact

SEQ ID NO: 272077 - DNA, 389 bp, Homo sapiens
agcacttatctgttatactactacgttttgcctacttgtttactatctccatccagaaaaacagtgatttttgtcactgctagatccctatactatcttttctttaacatactttcctgaatgcctctccctcaagtttgagaatatccatagagttatatttcttcttgatatgtaatgtgactctgcttcccctcccaacaaagctatttcttttgacttgagtttgagcataccttctgcaactgcatctcaactaggagctccagacaaccaaggtttttttttttttttccgagtgggggaggggggcacaagctaagttgtattaaccaattcccttattcataactcataaatgaacattaaaatctgatgtcatcagtatt

SEQ ID NO: 272078 - DNA, 383 bp, Homo sapiens
cccaggcagaaggctgcaacagcactccaaaaaatgcaaatggaccagtgtgctggctcaagcctgtaatcccggcactgtgggagggcgaggttggtggatggcttgagcccaggagtttgagaccagcctgggcaacatggcataaacccaatctctactaaaaatacaaaaattagcccggcgtgctgcacacctatagtcccagctactcgggaggctgaggtgggaggattgcttgaacctgggaggcagaggttgcagggagccgagatgaaaccactgcactgagtaactactagtgcgaccctgtctcaacaacgacaaaaaagcaaatgatctgtttcaaagaagcctgggcaacaagatcgaagctccgtctc

SEQ ID NO: 272079 - DNA, 473 bp, Homo sapiens
cacgtgtgaatatgcatagaaattttcatgtagcaatttctgtgtttgtgatctgtatacagattttataaaaataatagcagggacatttctgaccttgatcattgttgttaactgatgacatttgccagttacagtttaaattaagttgaatttattatttaggtgtttcataagaaggagtgagttgcatactaggatatactcttgtattccatatcctctcctcactccggcgcttcctaacaggaagagcaaatgcattgtgaggataaacactgattggttactatctgtagagcaggattagcagctctttttagattttgagctgcaatctcttttaatagtgcttaaattgatgcaggtcagtgaattttgtgtttacaggcttttaactccctagctttgtgaatactgaatttatggaaaagcttaattttctctgtatctcagaagggatatgtacaatt

SEQ ID NO: 272080 - DNA, 1416 bp, Homo sapiens
catattggtgagaaatcctagaaatgtggagaatgtaacaaagtatttaaatggttgtcacacttgattataggtaatattcatattggaaaaatttcctacaagtaagaacaatgtggcaaagtttttaactaatacaccttattgcacagaaaatcatttatatttgagaaaaattgtagaaatatagactgtgaaaaagacgtcaatatctgctcacatcttactaaacaccagagagttcatgcttaataaaagcatgataagtgcaattactgccaaaagatctttcagaaaatattatcctttaaagtgaaggagagtatttatattaaagatgaacattacaaccataaagagggttgaagtacctttacttgtatcagatcttattgtccacattttgtactacagaaaaactctgaagaggtcactcaaactttgttcaacatcagggaatttatattggagagctgtcttgcaaatgtaataaatttgggaaaacaaattttcaaaaactacagcttagaaaacaccagagtttatacgaaaatatattttcaaaggtgtagtaaaaataaaaaaaaatttaatccaaatttgtctatgtaaataccagaatttatagtagaaatatatgaggaagcgacacttcgaatattctactaaatgagagttctgagtatagaaaataaaactaaagttggtagaaaaattatttgtatataatgttaagaggagtaaaagattttttgtagaataataactatattcagattatactttgttcttgaaaaaattacagattttttgaaaagcaaatgatgtaactcaactcattattttctgctgtttcttcattcttattcacttgtgaaagcttgtgatcatttgttgctgcatcagaggtatgagagattcttcttcattagatgggcattatttatgatcttttctatggatgagtaagaatattaaaatgtaagatgcatggtgaaaatctaagtggagaggttctttgtggttaacttatactattgagtgatgcacaaggtaggtgttaagagtaatattcttttgcattatgagaaaactagtatattattcatatattttactaattgtactttttttattatactttaagttttagggtacatgtgcacaatgtgcaggttagttacatatgtatacatgtgccatgctggtgcgctgcacccactaactcgtcatctagcattaggtatatctcccaatgctatccgtcccccctccccccaattgtacttttatataataaaatgcagtacattttaaaaaattttaaattctgtgtgaaggtaactgtttcaacatttttaacatggtaaatattattgtgcattcaataaagtgttgttatgccacaaagattaa

SEQ ID NO: 272081 - DNA, 390 bp, Homo sapiens
aaatacataaaacattctgaagagaatgtatggaacaagtatctgaggactttgaaaagtaaatagcaataaatacattggggaataagaccagaatatatagtaccacctgattggcagtgaatttgcctatttctctctctggtatccaccagcttccacccaaggtcacctgaaagctgggtgtctgcaccaactcagaggggagaaatcatctagtctagggtggaggagtgcaaaaatagtctcctttcagtgcagcagtggcagctattataaaaattctccaatgaggaaggtggaagttcggaaatgaatgaaaatatagaaagtcttaggaaagaaatagaatatatgtaaaaaagaacaaaatgggagattttagggctg

SEQ ID NO: 272082 - DNA, 1383 bp, Homo sapiens
cccagctattcaagaggttgaggcagggaaattgcttgaacctgggaggcagaagttgcagtgagccaagattgtgccattgcactccagcctggatgacagagcaagactccatctcaaataataataataaggctagtatgactaaggagctaaattttaattttgttatacttcattttaatttagatagccatgtgtggctaagggctaccatattgagaagtgctgctaaagagcaagactgatttttctctctccccgctgacaggaggttatgagggagaggggattggggcctcttggggtttttagatctgacgctggtctgaaatctctacctgagggtaggagggagagtggggctctggaggagtgtgttattcacactcagagagtctgtgattggaaggtgcctgaacacccacttgcacctctccttttgttgtcgtttgcagtcttgaggatactggctaagcctctgcctacgcagtgagtcctgttccttctcctctccaggtcttccctctttaaccaacatttccctctctgctgattcttcctttctgccttcaaatgcaagtccctgctacctccaaccaggcaacttttcaaatgaatgaactgaagcaatttctcccctttgtcacacactccctctgccacagaagacttgctttcttactcatagtgcccctttcctgaccggttcaggggctggttcagagttcatcctttttaacattcttgtcactctgaccctattaatgaggtctttgttgcaacgtctctcctcctgtagcttctgtggcggccttcttggctccatagccctcctctgccttctctgcctgaggtacttgtttcatactcctgaactgtgagtgtcttctaaggcttgtttcctgactttttcctcactctacatcatcctccttgacagtacagctatgtttatgaccttagctaccacctctccacaaatgagtcctcgacctaaatctcttattctgatccttcaccagtggaaaggatagaaactagagcatagcttccataagattatgggcaaatagtccaggcacggtggctcacgcctgtaatcacagcactttgggaggccgaggtgggcagatcacgaggtcaggagatcgagaccatcctggccaacatggtgaaaccccgtctctactaaaaatacaaaaaaatcagctgggcatggtggcgggctcctgtagtcccagctactcgggaggctgaggcaggagaattgcttgaacctgggaggtggaggttgcagtgagcagagatcatgccactgcactgcagcctggtgaccgagcaagactccgtctaaaaaaaaaaaaaaaaaaaagaaaaaga

SEQ ID NO: 272083 - DNA, 338 bp, Homo sapiens
gacagtatgttgcatcccagaagaattaatgtgctgttatgctctgacctgctcagggttattctggtgcccctatcctgcccacagcttaacaccagagagacaatctattcctagggctagtggtggtgacctccatgttttgatggacattccctttcaagtgtctgtttagctcacaagtgttaagtgttgttaaggactgacttatgcacccccaaaatccctatgttgaatccctaattcccagtacctcagaatgtgactatatttggagatagggctttcaaagaggtaattaaagtaaaatgaggccaatagagtgggccctaattcga

SEQ ID NO: 272084 - DNA, 455 bp, Homo sapiens
agacagccatgctgcctgcctggtggggtacacggtcagttgggaaagacagacctgatgacaattgtgtgaagtgttgtgaatcaggctggaggcctggcgctgggggcaggtgtggctggggatagtccatgaagtttcccctgaggaagcagtacttaaattgagacccaataatgagatcataagacagcatgcttacaggtttctggaatatttgaattgtaatgttgggtgaatgttttgccacaacattttgcttgtataagactttggaaaggaaccctgagtagtgtgaatttctatatcatgggtcagccaatgaataaacactgattgagcaccttcaaagtgtgagggcactggatgatgtgtgaggtgtctgggccaactgagaatcattttgatatttcagatatccaggactgattaaatggaagagatagacaaaagac

SEQ ID NO: 272085 - DNA, 340 bp, Homo sapiens
ctcagcctcccaaagtgctgggattacaggcgtgagccactgcctctggcctctgtgtttaaccatttgcggaactgccaaactgttttccaatttggtggcaccattcattgtagattcccaccagcaatgccccagggttctcatctctccatctcctcgttagcacttgtaattgtctacctttgattatagccaccctagtgaatgtggaatggcttctcatggtggttttgatttgcatttccctggtgtttagcatcttttcacgtgcttcttggccatttgtatatcttcttttttttggagaaatgtctattaaaatcctttgcccattttt

SEQ ID NO: 272086 - DNA, 502 bp, Homo sapiens
caaatctagtcgtgtaagtgcaaggtatctaggggatggcagtcatggaaatgcacctcttagctctcccttctggaaagaacctgctggtgagctgtaagttgtacagttagtggacagcttctagtccttaatgctttcaggatgacattagcttttgaaccacagtcatgctttattctgggacagctctctaccaagacagaacacggcaagggtgctagagcctggtcattcctgcccgatgttggacaattgcaatgggcattccttgctctcaagcttcccattggattagctgaggctttgtctttattgtgatctgaggtgccccctgcccagtgctgttttcctcacccatactcccttccttaaacatttttcagatctgcatcatattctgaaggctttcccaacccaatatttctccttcttctttttatctttcacagacattatccacaacaaaccactctcctgtttgagtaaaatgagaaagtta

SEQ ID NO: 272087 - DNA, 185 bp, Homo sapiens
ggggaaccactgtccctgggttttagtgataatttattgaaacatgcccagtgagcgccaggagcagggcctggcgcagagttgatggtaagcagacgtcattcgcctcacaacccttttcctctgacccgtaaatcaacccatttttttcaagttatagacccatttgagaaactggtttttct

SEQ ID NO: 272088 - DNA, 497 bp, Homo sapiens
agctcaacttcccttttcttctgccttatttgtccagaagccagaaacgtgaagagaagacctcgccttgatttgccagatgacccctggcctttttagtcaagttcctggagaagttagggtggagacttatttgtcctgtgtttggggcaataaaaggggaggggccgcctcctccagcctgttctaaaaagccaaaaagcaaggctatttactcagacctgggctactaagtgctggggtggcccatgttgacttaaatgagcccttgcagttaggtggggctctctggagctgttagtcatgtgaggttgccagggcaacttaatgtcttatgagttggaatgcttcaagaagtacaaagaggagactgcaagagtgcattacaacttacagtcatatgttcaataacatgtcatctttcctaatggggcttttatttttattttattttgtgggattgaaagatcagaagccggaaattatctggagaggat

SEQ ID NO: 272089 - DNA, 205 bp, Homo sapiens
agctgtcctcaaggagctggagtcgcttggtggagtttcagcctctgggtgccctggcttgcccttggcgaggtggtcctggaagtgaagtgaccaggactgggaaatggcaaagatcgaagaggggaggcagagactggagaagctaaaccaagcaacagcctgagactaagtgccaagtgtgtaaatacattctggccaaaga

SEQ ID NO: 272090 - DNA, 347 bp, Homo sapiens
ggtactgtgatttacagtttacatatctgtgaaggttgaatcaactccatcttggatgctaatctgccatgttagcttctgattaacccgttttgggaaagcctctgagatttccagtttatctgttgttcgtcgtgtaagaggactgtacttcctgcaaatcctgccctcagggcaatttcctacctattctctgtgaaacatgtatgcctctcccctagagtatataatctctgggtctggaggctattggtgccgcagggatccaccatcttgtctttccaccacccaagacacaggcatggtttctgttcctaagcccctattaaatatttcttcctaagaaa

SEQ ID NO: 272091 - DNA, 484 bp, Homo sapiens
agacagcagatttgcagaggcagacccctgatccaatagcactttttactgtgatccatttgacctgtggccatgccattctggaatagaccaaaccaatgtcaaaggtggtctctatgagagctgcatgcctccaaagtaatcgatggccgatgggagagtggaagtagagaatatacatttctggtttacacaatgagaagccttgggttccccttcaagaatattatgtcagattctatcacagtgcacttttactactattttcacatgtaaaatctgcattttgtgagtgtgtattgagtaattgagtgcttctttgttcaatttgcataacaggggcatactgacattttcatgtatatcagacgtgactgtcatactcaagactggtgcaatttcagaatatggctttatggtaataccacaaatggcattgttttttcagcagtgtgcagagttttgcaaatactccattagcagc

SEQ ID NO: 272092 - DNA, 479 bp, Homo sapiens
cctttcaactctgcctggctgtaaccaggatctctttccacaactagttttaccatgtctacttcagcctcattaaggagttaacactgaccagttgcttcctagaagcaagttttatggcaaagcatcccaaggtgggtcaccgaatttcaagctggcattagagaatcacagggctggtgcacggagagctggctctccagcaaggacgtctggcctggccgggaatgattcattgagcaaaaggacatgccagagaaaatgaggaggatgttccaacccaggagtgagccgacgggtatgcagaggctggagctgtctcctgcacatgggatcatgtccctgtgttccagctctacatggggtgcccaccagctgccccacagggcccttatcacaaacatcacaagcctatttcacaagctcttttctccttgaaatgttgagatcaatatatctccactgttatttaaaaaaaa

SEQ ID NO: 272093 - DNA, 378 bp, Homo sapiens
tttttttttacaagtggtagagattggaagtcttagataccacaccaatatcctgaacaacaccatggctatattgcattgtacaaaagaaagctgataatctacatcttaatgacatagccaatatgactttacaatacttttttttttgagacagagtctcactctgttgcccaggccggagtgccgtggcgtgatctcgggtcactgcaacctccgcctcccgagttcacgccattctcctgcctcagcctcccgagtagctgggactacagacgcccgccaccacgcccggccaattttttttttattttttagtagagacagggtttcaccgtgttagccagaatggtgtcgatctcctgaccttgtgatctg

SEQ ID NO: 272094 - DNA, 387 bp, Homo sapiens
actcaccaaccatctgctgccttcaggagactcacctaacacataaggactcacataaacatcaagtaaaggagtggaaaaaggcagtttgtgcaaatggacaccaagcaggggtagctatttttatattagacaaaaacaaactttaaagcaaaagcagttaaaagagacaaaggacattatataatgataaaaggccttgtccaacgagaaatatcacaatcctaaacatttatgcacctaacactggagctcccaaatttataaaacaattactaatagacctaagaaatgagatagacagcaacacaataatagtggaggacttcaatactacactgacagcactagacaggtcatcaagacagaaagtcaacaaagaaaaaa

SEQ ID NO: 272095 - DNA, 360 bp, Homo sapiens
gtcagatccacgaacacagagtgcagttgggaaggatgtgggcagtaatgaaggtggtgctttttgctcctgtgggtgctatggacaggtgagggttcaaggatattaacaacaaattttaagccataccttacactacattggagcttaatcaaattctctgttcacagtatgcctaaattggccaatggaacggaaaaaaaaaaaaaaagcaacccacccccaagagttatttatgtcatgtagacaaaacctgggttcgttgactgattatttccactctctagtgatggtcgttgcattttcactctgagttgaattgctgcatttttccataaatatatctgctcctctggaaga

SEQ ID NO: 272096 - DNA, 377 bp, Homo sapiens
gtcatcggggatactgttgttctgtaaagacatcatgtagtttactcttaagagtcagtttgagtcatgctataaagttttattaaatttgttcattaaaagtttttttccagctgggcgtggtggctcatgcctgtaatcccagcactttgggaggctgaggcgggcggatcacctgaggtcgggagttcaagacaaccagcctgaccaacatggagaaaccctgtctctactaaaaatacaaaattagctgggtgtggtggcgcatgcctgtaaccccagctactcgggaggctgaggcaggagaatcatttgaacccagaggcagaggttgcaggagaatcacttgaacccagaggcagaggttgcagtgagct

SEQ ID NO: 272097 - DNA, 869 bp, Homo sapiens
cttttcccctcaaatgctaaggatactgcctacactggtactccacttttcatttcaccaagatttaaatctcttaacatttccgcaacttcattagtatctccatgctcaaaatattcctgtatgattggtgttaaagtcttctcaagtgccctttcatccaaaggcaaaactacagtttcataaacacagttctcctttgaggggaaaagaccctgcagggtcttttcccctcaaagtctgtatttcttccaagttgcttttttgttttgcttaattcccaccacccacctttgatgctggatgctttcctcaaataactggtaatccttgggtatttgcttatgattaagactgggggtctagagctaggtgcactggctcaggcctgtaattccagcactttgggagctaccaaatataaaggattatccacaactaacagtattacaggtaatcactgtcgagttctaaatttccttttctattagaacataactttccccacacaccgaatctgtactcaggtgtgcatttatccctagattcagtctgaggagttgaaaagtgacaaagggatggatggcttcctgactactatgaaaatgtcccctgacccacatatttcaatatagtattaagccttgttttcattacctgaaatgtatgtttgcttacaaacaggtttccttgaatctattctccccacctcctccaatcaaggagcaaagagaacaccagagaagctggagcacagtgaacaaggggaaactggcatgagccaccgtgcccggcccatcctgcttatttctgtgagtcacggcttggaatgtgttaagaaaaaggatctatgtctctctaaaggggac

SEQ ID NO: 272098 - DNA, 230 bp, Homo sapiens
catgcttgcaatcccatctctttgggtggccaagggaggaagactgcctgaggccagcagttcaagaccagtgtaggcaacatagcaagaccccatctcaaacaaaacaaaacaaaacagaacaaaattagccaggtgtcgtggctggcacctgtgttccaacaacttgagagactgaggtggcaggaggattgcttgagcctaggagttaggggctgcagtgagctgtg

SEQ ID NO: 272099 - DNA, 746 bp, Homo sapiens
ggatgggagctggcatttatgctcaagtgatgggaatatgttaaaagattttaaggaggggagtaacagttgggattaatgtgtattctgggaatctcaacaaagtaaattcatagttcgaattttcataagacttctgcacaggcagagagaaataagatcgcatctacagctgtgtggtgattttctttaaaaatactactaagtttttaaatgtgatttcaaatggtgtgtttctgtttcacattggacataagtagattgcaaggctaatggaaagtagaaaagttaactcatgaacataaaagagacatcgatttgaaaacaaaacatttattcatttacttctgctgcagttttcttgactgctgaatttcgtaagaagggattggtcagggagggtcttggggctgaagacctggagaggagctggtgctatcgctgttcaaatctgaaggtggtggagatggagccttggggaggagccggtgctgccttttaagtctatgagagtcgttgagctggaggtccagggaagagctggtgctgccactgatgtcttaggttgtggagctgaagacagtgaaggagctggtttggctgttctgtgagggtcgtggagctggagatccaggtgggagaggtgttctagtttgagggtcatgcagatggagatctgtgaggagctgatgttattttaattggtgggtcgtagagctggagaccagggaggaactggtgtggtt

SEQ ID NO: 272100 - DNA, 418 bp, Homo sapiens
accattgaaatttcctggataataggagcttcttctgttccaatggggtgactcttggtgggctcctggatgggggctggtcactagcgagaccacaccatgatgagaaacctggagcttcagccctacccccacctctgagcaggggagacgggctagctagaggcgcggttcctaatgcgccatatgcctacatgaagacgtctccgtaaaagtccctcagcagtgggggtttggagagctcccaggttggtgaacacatctctttgtggggggcgtggagcaccccagctccccagggctggcagctcctgtgctgagaacgcttctggacttcgccttacgcacccttcatctgactcctcatccctatcctttatcgtatcttttataataaacatgtttctcgccaggcgcg

SEQ ID NO: 272101 - DNA, 349 bp, Homo sapiens
gctgtttttatcagtcataagagttgtatgaaagggagcagagatcaggagcacctaacctagtggaggggatcaggaaggcgtcctgaaggaagtgacatttaagctaagggctgatcggcaagcagacgttagcagttataagtgattgccaaaataactaataaaagcagtcatgaaatcactgtcagaaatatttgttgaaggcattaattcattcacattcatatacatatatggcctactgtttgccaggaagcatcagagcagtgaatgaaacaactccctgcttacaaagagatgccagagactggatatgaacaaacctaagcctaatcttttttaaaaa

SEQ ID NO: 272102 - DNA, 477 bp, Homo sapiens
actcaaatgagttaaaaacatgtccacacaaaaccctgcacatacccttcactgcttccatgttgtagcaaccaatgaataaaattgctagaaacaatgtccttcaataggtgaatggataaaccatcgtgcatcaagacagtggaatattatccagtactaaaaaacgcaatatggaagccatgaagacatggaagaaacttaaatgcatattgctaagtaaacaaagccaatctgaaaaggctacacatgctgtatgagtccaactatgtgacatgctggaaaagacaactatggagacaggaagatgatcagtggttgccaggagttagaggggagggaaggatgactaggtggagaacagaggatttttagggcaatgaaactgtatattacagtgatggattcatggcataatacatttgtctaaacccatagaatgtacaacaccaagagtaaacgctaatacaaactgtg

SEQ ID NO: 272103 - DNA, 523 bp, Homo sapiens
gcccaaaaagtataaatgaatgaaagtaatccttatcctcactcttagaaacaatataattcaaagtgtgtttcctaccttccaggtattgttataataatttatgtatatagaggctaacatagtaatgttttcaatgggtgggagcattacaaagctttttgtttgaattttgcctacagagcagtgggtgtacagcacttagccaagtaatgaaaaacatcattttaaactgcacagaggccaacaggttacaaagcattatctcatttaatcttcacagtgaccttacagcacagcaggtattgtcattctacattcacagatggagagactgaagcccaggaggtgaagcaatacagcatgactcacactaaatgccagtgccaggacttgagcctcaaggttacgccaccccacagcatttgtcctccaaaaggccaggctatcttctcacaatggctgtcagtgtgttcattttcaaaacctaaactagctaagtcttaacagatgaaaacaaaaa

SEQ ID NO: 272104 - DNA, 630 bp, Homo sapiens
tgctttgacaattatctgcagcatgtagtgaaccttgtttcatcttcatcctattcactaatcccctccaatccctctgccccttgcattattttgaagcaaatttaagacattatattgtttcatctgtaaatactaatgtctagggataaatttttaaagttgcataatatatgccacagggctaactggtgatggaattatttaagcaaaagtgactcttatataagtttccagagccagcaaaacataattacctcaaatataccatggccaaagtactaattgtatgaaaagatgtcactaagtcaataccctaaaacttaaagggagagacactcttttatacatttgtacatttatatataattctacccatctcgattatggcttctcagctccagtaatgaaaaggcactgtaagaaatgaggccgctggacttaattatgttcaaacaccagcaccagcaccatctgactctgcctcatacccttgggggggtccagcattgctagtgcataatgtcacagttggtcataatgatgaccctggcgcatcaagaaaagggtatactttgtttaggaaaacattttaaggggacaaagaagtatatgacatttagattccca

SEQ ID NO: 272105 - DNA, 904 bp, Homo sapiens
tcacgtgataccccccagtgtacctttcctgcagcgtgttacgtggcgcacagagaacgtcgcttccagaggaccgttttttcgtaactggaagtagtaatctggcggttgacactctcgttgcctgtataggctgatggcccactcacctttttagctgggctcctgacctgtccggccagaaagttgccactgggaaacctggacccctactgaatggatctgctggcacctagacctcagagaagggggaactgaagactgaagtctgaccactgttctttgttgaaaatttctttctcaggggcttggagggatcacatctacaatcctgagctaatattctcttctgctgtccccaaaatttaaacgaagcttctcttaacccattgcaaatgagaaaaatctttgaatctacctatgactataagcccttatttcaagatatcctgcctttttaggccagaaccaaagtgtaacctccatctattgatttacaattttgcctgtaactttggctttcctgaaatttaccccagccttaaaaaaaaaaaagaacagaaaaagaaaactgcaaggcatcagggaggtcagaattggggcatgagctgcctgatcctccttgcttggcatctttgcaaatagatgccttcagctgtgcatgatggctcacacctctcatcccagcactttgggaggccaaggcgggaggatggctccatcccaggagttcgagatcaggggcaaaatgccgaaaccctgtctctacaaaaaattaacaaattagctgggcatgatggtgccacttctgtagtcccagctacttgggaggctgaggcagggggaatgcttgagcccaagaggttgaggctacatgagccatcatcgtgccactgcactccag

SEQ ID NO: 272106 - DNA, 844 bp, Homo sapiens
cggccgcttgggcctcagttcctctttcctgcccaagtatctccccagctctgacgaaacaggcaacttccagactgtggcgttagctcagcgactgcactgagccgccgggaagatcctggtcccgtcagccagctgacccacatgcgttgcggaggcgctgaccaccccgcttcgctggctggtggggggtcacgtgaggacctcggggtcacgtgaggtcctcgggcgccgcagggagggcggcatccaagtctttccgcgcgtgcgcgagcgtccgctgtcactcaggtagaacagtctcaaatcgcaccgttagtaccggccccctttgcctttctaccttgcccctccgagtcccgacccaagatcccaagtaatcgtcttccccctgcaccagggccgggaccaggcagccaagaaacgcggagacagactactgggactgcgacgtctcctctcctgttcgctgcgatatgccggcgtcgtgttgagcgggctgcggacacagacagcctgcccggccccactgagtgtttgatccccatcctcgcagctctctagaggaccagagttggcggtgcagcccagcggagcttcgaagcgacatgtcctccaacattttagcccagcaagtcttgtggcccctgaggatataacccagagagggctgctttctgggatttctcggctgtggttcaagtggagtacacacagttgagaccctgtctgccctgggcagctttcttgacccttgggggaccagctcacaataaatcctaggcttctgttgctccttgctgcctatccataagcaataaacctgcttcagctcattcactca

SEQ ID NO: 272107 - DNA, 1308 bp, Homo sapiens
cggccgcttgggcctcagttcctctttcctgcccaagtatctccccagctctgacgaaacaggcaacttccagactgtggcgttagctcagcgactgcactgagccgccgggaagatcctggtcccgtcagccagctgacccacatgcgttgcggaggcgctgaccaccccgcttcgctggctggtggggggtcacgtgaggacctcggggtcacgtgaggtcctcgggcgccgcagggagggcggcatccaagtctttccgcgcgtgcgcgagcgtccgctgtcactcaggtagaacagtctcaaatcgcaccgttagtaccggccccctttgcctttctaccttgcccctccgagtcccgacccaagatcccaagtaatcgtcttccccctgcaccagggccgggaccaggcagccaagaaacgcggagacagactactgggactgcgacgtctcctctcctgttcgctgcgatatgccggcgtcgtgttgagcgggctgcggacacagacagcctgcccggccccactgagtgtttgatccccatcctcgcagctctctagaggaccagagttggcggtgcagcccagcggagcttcgaaacctggacccctactgaatggatctgctggcacctagacctcagagaagggggaactgaagactgaagtctgaccactgttctttgttgaaaatttctttctcaggggcttggagggatcacatctacaatcctgagctaatattctcttctgctgtccccaaaatttaaacgaagcttctcttaacccattgcaaatgagaaaaatctttgaatctacctatgactataagcccttatttcaagatatcctgcctttttaggccagaaccaaagtgtaacctccatctattgatttacaattttgcctgtaactttggctttcctgaaatttaccccagccttaaaaaaaaaaaagaacagaaaaagaaaactgcaaggcatcagggaggtcagaattggggcatgagctgcctgatcctccttgcttggcatctttgcaaatagatgccttcagctgtgcatgatggctcacacctctcatcccagcactttgggaggccaaggcgggaggatggctccatcccaggagttcgagatcaggggcaaaatgccgaaaccctgtctctacaaaaaattaacaaattagctgggcatgatggtgccacttctgtagtcccagctacttgggaggctgaggcagggggaatgcttgagcccaagaggttgaggctacatgagccatcatcgtgccactgcactccag

SEQ ID NO: 272108 - DNA, 895 bp, Homo sapiens
ctctgacgtcacggctcggtgggactcccggagcccggatgcgcgctgggactcggtgcagtccagctccacggtcgcgcgtcccacagctcccttcacgtccgttcctccgtttccccaccttgggagggccaggacttccgaggctttagggggcaggaagctgcgagaaggtggcgcttgcttagaaacctggacccctactgaatggatctgctggcacctagacctcagagaagggggaactgaagactgaagtctgaccactgttctttgttgaaaatttctttctcaggggcttggagggatcacatctacaatcctgagctaatattctcttctgctgtccccaaaatttaaacgaagcttctcttaacccattgcaaatgagaaaaatctttgaatctacctatgactataagcccttatttcaagatatcctgcctttttaggccagaaccaaagtgtaacctccatctattgatttacaattttgcctgtaactttggctttcctgaaatttaccccagccttaaaaaaaaaaaagaacagaaaaagaaaactgcaaggcatcagggaggtcagaattggggcatgagctgcctgatcctccttgcttggcatctttgcaaatagatgccttcagctgtgcatgatggctcacacctctcatcccagcactttgggaggccaaggcgggaggatggctccatcccaggagttcgagatcaggggcaaaatgccgaaaccctgtctctacaaaaaattaacaaattagctgggcatgatggtgccacttctgtagtcccagctacttgggaggctgaggcagggggaatgcttgagcccaagaggttgaggctacatgagccatcatcgtgccactgcactccag

SEQ ID NO: 272109 - DNA, 507 bp, Homo sapiens
cagctttgcccaaaaggcagcaaaagctgaaaaatgtaatcgcatgtgcattagggtctcctggaacggctaacattaaaagattgacagtagcaagtgctgacaaggatggggagcaactggaactctcatccactgcaggtgggcatgcaaaatgggacagccactttagaaaacagctggtggtttcttataaactaaaataacacatttaccatgtgacctagcaacccaatgcctagatattcacataagaaaaaagaaaacatgttcacacaaagacttacacaagaatgttcagagcagctttattcccaatagccaaaaactggaaactttgatgtccatcaactgatgaatggataaactgtaatatatccacagaatgaaatactacttagccatgagaaagaatgaattgatacatgagcaacatgggttatgcagagtgaaagaagccagacacaacaaagtatagtatataataaaatgataattttattataa

SEQ ID NO: 272110 - DNA, 831 bp, Homo sapiens
aaaatgttagagggctggtcaaatagatattttagttcagtaaattggggtatggagaggtaatataattagatttgtgtttttagatacttttgaagtattataaatatataaacataccaaatgtcaaaatgttttaaatcagctggtcacggtggctcgtggctataatcccagcactttgggaggacaggacaaagtgagcatattgcttgagtccaagagtttgtgaccagcctgggcaacatagtgagaccttgtctacaaaaaaataataataattaaccgagtgtggtggcacaggcctgtagtcccagctactcaggctgaggtgggcagagttgcttgagcccaggaggtcgtggctgcaatgagacttgatcttgccaccctacactctaacttggggaacagtgagaccctgtctcaaaaaaaaaaaaaaaatatcgaggaagaagttcaagaaaaaaaagaatttttctgagaaattcaagaaaacatttgctgtaaatatttaacagagaatattatgtacattacatacattatgtatgtacatatggtttagctcagttgaatagtttccagccattaaccatgacagtaataatctagaataggctgggtgcagtggttcacgcctgttatctcaacactttgggaggctggggaaggcgggaaggatcacttgagtccaggagtttaagaacagcgtagtcaacataaaccccatctctacaaaaagtttaaaaaaatagccaggtgcagtggtgcatgcttgtagtctcagctactcaggaagctgaggtgggaagatcacttgaacctggg

SEQ ID NO: 272111 - DNA, 399 bp, Homo sapiens
ggagggtgcttcctgggcttatgtctcagatacaacagcagcagcagcagacaggctcccacatcccatgtgattgtggggaggtgatcatggtgagggcgcccgccaggacgtgagcatgcctttgctggatgcagttgtctctcttggtgcttgagcaacttagcctttgcattctggccttctggaggtcatcttccctcttgcagtggtagcaagtgttcacgtttaaaactgcacactacttttgacagtaggagtccactgcagtgaacataagagaattcacacacgtttcctgtaagcatttaataaccaccacttttttgtatgcaaccctcttcaagagatacggagatgaaaaggaaatgggccttgtcatctggcagatggtagaga

SEQ ID NO: 272112 - DNA, 554 bp, Homo sapiens
atctttctagttaccaggtgaatttaggataaactgtgccaaatggtgctgtcaaattttcctacttgagggctactaatattaatcttgacaacacatatgttttataactcaaaccagactgtgatgtttaaacactacatgttttgcttctgatgcacatcacattctggtttgagttataaaacaattttatctctcttctacctttgtggggaggcattctaggttgggaggcaatgttgttttaattatatttcccaagcactgttcagaattacaagatcaaatataaacataaaaggtaccgatcaggtttcatactagaagggactttggcagatacccatcaaattttctttcaggctttcttcccccaagccacaattgttcagtgaagatcttgcctgccctcaaaatgtgaatgcagtatgatcttgctgcctattttgggctctgcagtttcatctggggcatagttagaaaagatttgtaataaaataacctcataaagtggcaatcatccgttccagccctgtctttcaatgtacctg

SEQ ID NO: 272113 - DNA, 584 bp, Homo sapiens
cacatttccccctttttttctttaacatcttttggagaaagcattttaaaaggaatatgtgttcctggcctcagttcgctttttcctccttttttgagctggtttcttgtcgctaggatggtttattccaggaaattcaggtctcacgttactaggaaggctcattcctaggaagtcatgttccatgttgctaggaaggctcattcctagaagtcatgtcccacaaagattaaaaaataaattgggggaggaaagagggaaaaaggaaggaaaggagatgattctgagggctccagacttaaaggagaaaagggtcctatctcttttctcttaatgttaaatgttattttgtttgtggaatgttcactctataatatatatgttgattaagtataccattatgcatgatttgcaatattgattgacctgtggagtgccttgagcctgtgtgtccaagactctgagtgctgagtgagtgggaagtactaaggagaattgctttcttggaaactccatgtagttcgtggcttttgtgattgaaatagcatcagtaaaagtctggcattgtggaaaaacaaaaaaaa

SEQ ID NO: 272114 - DNA, 413 bp, Homo sapiens
ttaaaaaaaaaaaaaaaaagcctttagggaggtgcaaatggaaggccacatacaattggtatgtttgtattcataccaatacacacacaatagaataggtaaaataaaacattccagtcctgcgtggtggctcacgcctgtaatcccagcacttcaggaggctgaggcgggtggatcacaaggtcaggagttcgagaccagcctggccaagatgatgaaaccccgtcactactaaaaatacaaaaattagccaggcgcagtggcaggcacctgtaatcccagctactcaggaggctgaagcaggagaatcacttgaaccccggaggcagagggtgcagcaagccaagatcgtgccactgcactctagcctggtcaacagagcaagactacatctcaaaacaaaacaatacaaa

SEQ ID NO: 272115 - DNA, 362 bp, Homo sapiens
ttggcagcctctgctgggcacagggtggtggccacatctgctgcctaaaagggctgccccggagcatccctgggggtgctgtatctgcacctccagcactgcaggcccctcacagtgtcccagccctgttgccgggtggctgctcccctgcccttggggctagggcatccaggtcctttgggggctctgctggcggtgcccagacctgtgggagctgagcccctcctgatccagcctccctgctgggtgccctcccctgggcctgcagggcgggagcccccggggctgcttctcctggggcctgggccgttacagggtgaacacgaagcgagggcgcactaaacacgctccgtaactacctg

SEQ ID NO: 272116 - DNA, 252 bp, Homo sapiens
tttttttgtagtgacatgctttgatttctttcccatttccttttggttatattctatagatatcttacttgaagttaccaatgagatcacataacatgtcttaaagttataacaatctagtttaacaacttcagttgcatacaaaaacctctacttctttactactccactgcaatttatattatcaatgtcttaaaagttagatctttatatactgtatacccataacttgttttgttttttgagacagag

SEQ ID NO: 272117 - DNA, 336 bp, Homo sapiens
caacatctctcatttcaaggttgccatctctaaattgaaccgtgtttgtatttacaccggtgaaaatgagtatactgtcattaaaatagaactctttaagaataattgtggtctcttgtggatcaaggaataaactgcttacagcaaaagagtagcaaggtcttcctggcaagatgatgcctttctggtgttcttcctaccaacagagtaacctcctgatctctagaaggaatcctgaagcatgtgccagagacgcagttcctaaagtctttttttctctatggttagagtgactggccaacatccccacaaatctattaaagcaggtttttgtgt

SEQ ID NO: 272118 - DNA, 437 bp, Homo sapiens
atataactgattcatttcaatgcacaatcccattatctttgaaagctaaacaggcagtttaaaccacattattgtttttaaattaaagtgttgctcaattaaaaactaaagtggaaataaacaatttcccatactagaaattattcctccaggctgggtgctgtggcccatgcctataatcccagcactctgggaggccgaggcaggcggatcacctgaggttgggagttcaagaccagcctgaccaacatggagaaaccctgtctctactaaaaatacaaaattagccgggcgtggtggtgcatgcctgtaatcccagctactcaggaggctgaggaaagagaattgcttgcacccgggagatggaggttgccgtgagccgagatcacaccactgcaatccagcctgggcagcaagagtgaaactccgtctcaaga

SEQ ID NO: 272119 - DNA, 472 bp, Homo sapiens
tcctcaaacctcccttctaaattctgggatcccttgtgttctcacttcaatccaggagcattccattcttccagatgcaggatacccatgctccctcctctacctgcagaactccaattctataggaacaaattcccttatatcttcttcctttccaaggcattccactgttcagctggaagcctgtttcgctttttttgaaactcctcacctaagcagactactctgattctttactaagaatacagatgctattagctacaaggtcttttcaagtcttgtcagagagcttctctatatctttaccaatgcttgacttccttcctccattggtgaaggtcatgcctcctgtcactcattcatgtcatacccggagggcacctgccccgagctgggttttctaggcactggtggtacagaagtaaacaagctagacaaggtcctgctaacagcttatgttctagtgggtggg

SEQ ID NO: 272120 - DNA, 436 bp, Homo sapiens
ataggattagcttactgcttatatttaactgatatgaaattggcaagcaaagacaattatgcactccacacaagagtgagtgatgtaaataacatttggaattctgcacacccttccaccatccttggtcccagagggagacgcggtcatcatcagtctcccaggattcccagcattgagagctgctctggtgtctgagtgtggcttccagcattaagaaaaataggtatccttgggccgggtgcggtggctcacacctgtaatctcagctctttgggaggccaaggtgggtggattgcttgaggtcaggggttcgagaccagcctggccaacatggtgaaaccccgtctctactaaaaatacaaaaattagccaggcacgctggctcacgcctgtaatctcagcactttgggagactgaggcggccagatcatga

SEQ ID NO: 272121 - DNA, 448 bp, Homo sapiens
caaaaatttaaatttaaatctaaaatcaaccaagactatttattaattcagtaatttctaaattaccaaacgtaatttagaaatttccaatgtaagtgtgctgttgaggtcagttttgttctgtgttttctgtttgtaaaggcatgtaagtatgccataaaatctatttttggtcttaaagttatgtagtattaaatttcgagagttcatatgtgaataatgattgtgggtgtgtgtttacagatatatgtctaagtggatatcatgtgaatgaaagattgtagatacaatgactataaatttattatatctttatatttaaaattgactttaggccaggtgtggtggcttatgcctgtaatcactttgggtggtgaagcgggaggatcgcttgagcccaggagtttgagactagcttgggcaacatagggagaccctatctctaccc

SEQ ID NO: 272122 - DNA, 736 bp, Homo sapiens
  misc_feature (2)..(2): n is a, c, g, or t
cncacctaataccactggttatattgtacaagtttctttattgcaggacttctgagtacctttagtttcctaccactgtaaatcctcaggaagagatacagtatctagcatttcccaacgtattgactgtgaaaacttttttcatacaccatctgaggagccacaacattccgtagaaaactgctttaaggcaccacatcagctctcagaactcatcttcttgctcattgtaatggccatcctggtttatcagacccagcttgcctctaagttgaagcaaatatggtgttttctatgacccttgctattttcacttgggataaaaatgtgaagaagatacattgtgaaactatcggaattcaaatttctatgacttgagtcacaactcttgccctattagcattgatgcctttagaaaaaaagaaagaaagaaagaaagaaaaggattcccagatgagcactaggagaaacagcagcttctgcagttgagttgggccacataggattgagggtgaaggtttcttcagtgaatgtgaacacctgtctctcttctgttttgatgtaggtattaacaatcttttctgcctccaactactatgaagttggcagcaacagaggggcctatgtcaaactggggccagccctgaccccacatatcgtgcagtatcaagctaacaaggtgacccacacactcaccatgaggcaaaggcaagacttttcaatgagtgattttcag

SEQ ID NO: 272123 - DNA, 2164 bp, Homo sapiens
gaattccggatttgaagggggcctgatctgactgacgtcagggggtgcctactccttcgaggcaagaagcctgaactttccttcctgtcactgtgaatacttggccagggctgtgaatgtcaccattgcttttcaggaagaagacatggcagactagggctgcaccttctttatggctctgtaggtctgaagaatcagatcagcctgggatcctcagccaactctgaagacaggatgggatcacgcctgcatgttaaagagatttctgccttgttgtgtctcatgtaaataaaaaacccagcaaagaagcaaacagctcactgtcctctggatctgctgcgtcctgcaggagcattgcgcttaaactatgggaagcggcacctccacccaacatcattttgctttccagaatgcagagagagccttcaaggcagcagccctgatccagagatggtaccggcgctacgtggcccgcctggagatgaggcggcgttgcacctggagcatcttccagtctatagaatatgctgggcagcaagaccaagtcaagctccatgacttcttcagctatctcatggatcacttcatccccagcagccacaacgacagggacttcctgacccgcatattcactgaggacagattcgcccaggactccgagatgaagaaatgcagtgactatgaatccatagaggtacccgacagttacacggggccaagcctctccttcccactcctgcctgaccatgcaactgccctggtagaagcattcagactgaaacaacagctccatgctcgctacgtcttgaaccttttgtatgaaaccaagaaacatctggtacagctgccaaacatcaaccgggtctcaacctgttacagcgaggagatcacagtgtgtggagacttacatggccaattggatgacttaatctttatattttataagaatggcctcccatcgccagaacggtcatatgtgttcaacggtgactttgtggatcgaggcaaggattcagtagagatcctgatgattctttttgccttcatgctggtttaccccaaagagttccatcttaacagaggaaaccatgaggaccatatggtgaacttacgatatggcttcaccaaggaagtgatgaataaatacaaggtacacgggaaggaaatactaagaaccctgcaagatgttttctgttggcttccactggccactctgatagatgagaaagttctaattcttcatggtggggtgtcagacataactgatctggagcttttggacaaaatagagaggagcaagatagtttccaccatgaggtgcaaaacgagacagaagagtgagaagcagatggaggagaagagaagagccaaccagaagagctctgcacagggacccatcccatggtttctccccgaaagccgctctcttccctcttcgccccttcggcttggctcctacaaggcccagaaaaccagcaggtcctccagcatcccctgcagcggttccctggacgggcgggagctctcccggcaggtgcggagctccgtggaactggagctagagcggtgccggcagcaagcaggcctcctggtgaccggagagaaagaggagccctcccgctcagcctcagaagcagactctgaagccggagagctgcggaagcccactcaggaggagtggaggcaggttgtagatatcctgtggagtgatcccatggctcaagagggctgcaaggccaacactattcgaggaggaggctgttattttgggcctgatgtgacacaacagttgctacaaaaatacaacctgcaattcctgatccgttcacatgaatgcaaacctgaaggctatgaattctgtcacaaccgcaaggtattaacaatcttttctgcctccaactactatgaagttggcagcaacagaggggcctatgtcaaactggggccagccctgaccccacatatcgtgcagtatcaagctaacaaggtgacccacacactcaccatgaggcaaaggattagcagagtggaggagtcggctctgagagctctgagggagaagctgtttgctcattcttcagatcttctcagtgaatttaagaagcatgatgcagataaagtcggcctagcttccagccaactctgctactatcaacaaaaatag

SEQ ID NO: 272124 - DNA, 3421 bp, Homo sapiens
gaattccggatttgaagggggcctgatctgactgacgtcagggggtgcctactccttcgaggcaagaagcctgaactttccttcctgtcactgtgaatacttggccagggctgtgaatgtcaccattgcttttcaggaagaagacatggcagactagggctgcaccttctttatggctctgtaggtctgaagaatcagatcagcctgggatcctcagccaactctgaagacaggatgggatcacgcctgcatgttaaagagatttctgccttgttgtgtctcatgtaaataaaaaacccagcaaagaagcaaacagctcactgtcctctggatctgctgcgtcctgcaggagcattgcgcttaaactatgggaagcggcacctccacccaacatcattttgctttccagaatgcagagagagccttcaaggcagcagccctgatccagagatggtaccggcgctacgtggcccgcctggagatgaggcggcgttgcacctggagcatcttccagtctatagaatatgctgggcagcaagaccaagtcaagctccatgacttcttcagctatctcatggatcacttcatccccagcagccacaacgacagggacttcctgacccgcatattcactgaggacagattcgcccaggactccgagatgaagaaatgcagtgactatgaatccatagaggtacccgacagttacacggggccaagcctctccttcccactcctgcctgaccatgcaactgccctggtagaagcattcagactgaaacaacagctccatgctcgctacgtcttgaaccttttgtatgaaaccaagaaacatctggtacagctgccaaacatcaaccgggtctcaacctgttacagcgaggagatcacagtgtgtggagacttacatggccaattggatgacttaatctttatattttataagaatggcctcccatcgccagaacggtcatatgtgttcaacggtgactttgtggatcgaggcaaggattcagtagagatcctgatgattctttttgccttcatgctggtttaccccaaagagttccatcttaacagaggaaaccatgaggaccatatggtgaacttacgatatggcttcaccaaggaagtgatgaataaatacaaggtacacgggaaggaaatactaagaaccctgcaagatgttttctgttggcttccactggccactctgatagatgagaaagttctaattcttcatggtggggtgtcagacataactgatctggagcttttggacaaaatagagaggagcaagatagtttccaccatgaggtgcaaaacgagacagaagagtgagaagcagatggaggagaagagaagagccaaccagaagagctctgcacagggacccatcccatggtttctccccgaaagccgctctcttccctcttcgccccttcggcttggctcctacaaggcccagaaaaccagcaggtcctccagcatcccctgcagcggttccctggacgggcgggagctctcccggcaggtgcggagctccgtggaactggagctagagcggtgccggcagcaagcaggcctcctggtgaccggagagaaagaggagccctcccgctcagcctcagaagcagactctgaagccggagagctgcggaagcccactcaggaggagtggaggcaggttgtagatatcctgtggagtgatcccatggctcaagagggctgcaaggccaacactattcgaggaggaggctgttattttgggcctgatgtgacacaacagttgctacaaaaatacaacctgcaattcctgatccgttcacatgaatgcaaacctgaaggctatgaattctgtcacaaccgcaaggtattaacaatcttttctgcctccaactactatgaagttggcagcaacagaggggcctatgtcaaactggggccagccctgaccccacatatcgtgcagtatcaagctaacaaggtgacccacacactcaccatgaggcaaaggattagcagagtggaggagtcggctctgagagctctgagggagaagctgtttgctcattcttcagatcttctcagtgaatttaagaagcatgatgcagataaagtcggtttaatcaccttgagtgactgggcagcagcggtggagtctgtgttgcacctaggactgccatggcggatgctgaggccacagctggtgaacagctcagcagacaacatgctggagtacaagtcttggctgaagaacttggccaaggaacaactgagtcgcgagaacatacaatcaagtttgctggaaacattgtatcgaaaccgatccaacctagagaccatttttaggatcatagacagtgatcattcagggttcatctcactggacgagttcaggcagacctggaagctgttcagctctcacatgaatatcgacattacagatgactgcatctgtgaccttgctcggagcattgatttcaacaaagatggccacattgatatcaatgagttcctggaggccttccgccttgtggagaaatcctgcccagagggcgatgcctcagaatgcccacaagctacaaatgctaaagacagtggctgcagcagtccaggtgcacactaagaacagcctggtcttcatcacccaaagtgcctcataggcaatgctcagcttctcactagactatctcccttattctccatgtgaaactttatgctgaaaatttacctatccatatgcatcagaatcacctgtgtatttcagtgtggaggggtgggttggggtgttgtgtatgtatgtgttttaagtatatgagtgccccaaccccacctcacaatcttcacaaagtagaacttaggtatagtgttttcaaattctaaagtccacttcagttaagaaccactgacaatgtaactctctcattgttttcattttatacgtttttttgagatggagtttctctcttgttgcccaggctggagtgcattggcgcgatctcggctcaccgcaaagtccgcctcccaggcgattctcctgcctcagcctcctgagtagctgggattacaggcatgcaccaccacaccaggataattttgtatttttagtagacacagggtttctccatgttggtcaggctggtcttgaactcccaacctcaggtgatccaccctcctcagcctcccaaagtgctgggattacaggcatgagccaccgcacccagcctattttatactttttatttattgtctttaacaatgtctattggtaaagcaaagttatttttaaaaattgtattgtaattccatgacccaagcatatggattttcttcattatttactttttcttacttgttactgtagtgtttatataattttatgttctacttttaaaaaaataaattaatatctaattgt

SEQ ID NO: 272125 - DNA, 2853 bp, Homo sapiens
gaattccggatttgaagggggcctgatctgactgacgtcagggggtgcctactccttcgaggcaagaagcctgaactttccttcctgtcactgtgaatacttggccagggctgtgaatgtcaccattgcttttcaggaagaagacatggcagactagggctgcaccttctttatggctctgtaggtctgaagaatcagatcagcctgggatcctcagccaactctgaagacaggatgggatcacgcctgcatgttaaagagatttctgccttgttgtgtctcatgtaaataaaaaacccagcaaagaagcaaacagctcactgtcctctggatctgctgcgtcctgcaggagcattgcgcttaaactatgggaagcggcacctccacccaacatcattttgctttccagaatgcagagagagccttcaaggcagcagccctgatccagagatggtaccggcgctacgtggcccgcctggagatgaggcggcgttgcacctggagcatcttccagtctatagaatatgctgggcagcaagaccaagtcaagctccatgacttcttcagctatctcatggatcacttcatccccagcagccacaacgacagggacttcctgacccgcatattcactgaggacagattcgcccaggactccgagatgaagaaatgcagtgactatgaatccatagaggtacccgacagttacacggggccaagcctctccttcccactcctgcctgaccatgcaactgccctggtagaagcattcagactgaaacaaagtctcgctctgtcatccaggctggagtacagtggcgcgatctcggctcactgcaacatccgcttcctgggttcaagcgactctcctgcctcagcctcctgacagctccatgctcgctacgtcttgaaccttttgtatgaaaccaagaaacatctggtacagctgccaaacatcaaccgggtctcaacctgttacagcgaggagatcacagtgtgtggagacttacatggccaattggatgacttaatctttatattttataagaatggcctcccatcgccagaacggtcatatgtgttcaacggtgactttgtggatcgaggcaaggattcagtagagatcctgatgattctttttgccttcatgctggtttaccccaaagagttccatcttaacagaggaaaccatgaggaccatatggtgaacttacgatatggcttcaccaaggaagtgatgaataaatacaaggtacacgggaaggaaatactaagaaccctgcaagatgttttctgttggcttccactggccactctgatagatgagaaagttctaattcttcatggtggggtgtcagacataactgatctggagcttttggacaaaatagagaggagcaagatagtttccaccatgaggtgcaaaacgagacagaagagtgagaagcagatggaggagaagagaagagccaaccagaagagctctgcacagggacccatcccatggtttctccccgaaagccgctctcttccctcttcgccccttcggcttggctcctacaaggcccagaaaaccagcaggtcctccagcatcccctgcagcggttccctggacgggcgggagctctcccggcaggtgcggagctccgtggaactggagctagagcggtgccggcagcaagcaggcctcctggtgaccggagagaaagaggagccctcccgctcagcctcagaagcagactctgaagccggagagctgcggaagcccactcaggaggagtggaggcaggttgtagatatcctgtggagtgatcccatggctcaagagggctgcaaggccaacactattcgaggaggaggctgttattttgggcctgatgtgacacaacagttgctacaaaaatacaacctgcaattcctgatccgttcacatgaatgcaaacctgaaggctatgaattctgtcacaaccgcaaggtattaacaatcttttctgcctccaactactatgaagttggcagcaacagaggggcctatgtcaaactggggccagccctgaccccacatatcgtgcagtatcaagctaacaaggtgacccacacactcaccatgaggcaaaggattagcagagtggaggagtcggctctgagagctctgagggagaagctgtttgctcattcttcagatcttctcagtgaatttaagaagcatgatgcagataaagtcggtttaatcaccttgagtgactgggcagcagcggtggagtctgtgttgcacctaggactgccatggcggatgctgaggccacagctggtgaacagctcagcagacaacatgctggagtacaagtcttggctgaagaacttggccaaggaacaactgagtcgcgagaacatacaatcaagtttgctggaaacattgtatcgaaaccgatccaacctagagaccatttttaggatcatagacagtgatcattcaggtaaaggcactcattattctatcacttttgaagcactgcaagtattttaccttaaacccttaatctccttcctgattcatcctcattcatctccactcaggcatttggagagcaaggtaagaagattagtgcttataaatgacagaaactaggaaagtacttgagtagtatcagcagcccatagagaaagaagtggggcagagaagaatgaagacaaactgaatgagagcttcttataggaagaataattattagaagatgtgatatcctctggacatggtggctcctgccttaatcccagcactttgggaggctgaggcaggtgaatcacctgaagtcaggagttcgagaccagtctggccaacatgaagaaacc

SEQ ID NO: 272126 - DNA, 392 bp, Homo sapiens
gtgtgtgttttaaattgcggtaaaatgtacgtaacatgaaatttaccattttagctctgtaagcatacaggtccgtggcattcggtacattcacattcctgtgtggccatgaccaccatccatttccggggcttctgcatgatcccgaacagaagcttgcacgccctgcgccacgccccctcccatgtcaacccccgtaaccgctggtcttcgtctctatgaattaaactattccaggtacctcccatcagtggaatcataaaatatatgttcttttgcatctggcttatctgacttagcataatcagacgaccccgtcttaacagacaagtaaactgaggcacagagaggctatgggactcgccccagctgtgtgccccttctcaccgcct

SEQ ID NO: 272127 - DNA, 478 bp, Homo sapiens
gcccagcaatggggaaagtgattgttttaatttatttgagactggattttatcactcggagctaaaccctatgaacatgtgcagtgaagagtcagagagaccagcaaaaagattgaaaatgggcattgccgtccctgaatcctttatgaatgaagtttctgtaaataacctgggtgtggactttgaaaatcacacacatcacatcaccagtgccaaaatggctgtttctgtggctgactttggcagtctctctgccaacgagaccaatggtttcatcagtgcccatgctctgcatcagcacgcggccctacactctgagtgacctgagtgaggatcccggaactgcgtgtgcagcaccagtaaacttgaggggagctatcaggtttgcatagtctttcactggaagtttgaacctttctcactatgacatcagtgatgtcagtatgtatagaactatatcttgatttatcaagagtat

SEQ ID NO: 272128 - DNA, 441 bp, Homo sapiens
atctcatctggacagagaaagaactaatgcattccaacagaatgaacaatatgtaaaaaaaagaaaaagaaaaatccctcatcagttactccaaaggtgctgggtcatcttccctcagcctatcaaagaataagttccacccaacctttgtggcagttcagcctgaccagagtattccatagtgtcagactgccccagaggtaaggcagattctcccattttgtgaagctaactcagtatagcagtgttccttatcagttactaaggttgtatacgactgattcactctccatttcacttgaacaatcaaacacagctgtgcaatatttaacctaacacttacattgttctaaacgtatttctttatatttataagcatgaatttaatgaagcatctagtgatcttctaaattcattattcttgcctggtacattgagcca

SEQ ID NO: 272129 - DNA, 419 bp, Homo sapiens
agtgaaagcaaaaagagacaagcaggattgcatcaaacccaaaagcctctgtgcagcaaaggaggcaacgagcagagtgaaaaggtgacctatggacttggagaaagtgtctgcaaaccatgtgatatggtttggctgtgtccccacccaaatctcatcttgaattcccacctgttgtgggagggatctgttgggaggtaattgaatcatgggggtgggtctttctgtgctattcttgtgatagtgaatgagtctcatgagatctgatggttttataaaaatgggagtttccctgcacaagctctcttctcttgtctgctgccatgtgagatgtgcctttcaccttccaccatgattgtgaggcctccccagccatgtggaactgtaagtccaataaacctctttcttttgtaaatgcc

SEQ ID NO: 272130 - DNA, 435 bp, Homo sapiens
gccccaactatggcagcaagaggcaggggagcctggctccagagccaacactatttttgcagtaaagagcctttcctaatgagccaatctgtctctacttctattggcatcctgggaaccagggtgcagcagagataatttgcttcacacaccccccgcccaaacaaagcaccattacctccaaaccattacattagcctttatcagccttggaagctctcagtcatcctccatgagctgcagtaatttcagctaatttcttaagtgttctaagagcctctgatgtgttatgagcctagtaattgttgactggttccttttctgttgtggcttgatttcataccttgtatctgagctgatgcgtgctttgggtactttattataatgaggctttttgcaaagactcacattaaaaaataacattaaatactgagg

SEQ ID NO: 272131 - DNA, 360 bp, Homo sapiens
atatcttgcaagccaagagggccagctgcctttgctatttaatacacttaatagtcactcttctccatttacagctgtgctactacttgtcactttgggatcccttgcaattatcttaacaagtctaattgatttgataaactatatttttttcacgggttcattatggtctatattattaatgataggaatactaaggcggagataccaggaacccaatctatctataccttataaggtaaaattggatttctaattcttttctgtgtgaaataacagatattgagtataactgtatttaagattataatcagagcatctataagtagatcttctgaatactcagttactgtgaaacac

SEQ ID NO: 272132 - DNA, 371 bp, Homo sapiens
gaattttgtatgtttaatgtattttgtcactttatccattttataaaaatgagacctttgcactactgtgagttaacctttgtgatacattttgtaataaagccaggagaaaccagtagaactgtgtgccacacacggcttgctggttgtctgcggcaaactcatgtaagagggttgaaggctgagcctcggaggcaccggcctgtggtgggaacgggacgccccagcaaacactccccagtaaaataaaccttcagtgtaaaatagacatctgagctgtgtgtgagaaaatgtgtgtgcttgaaaagcgaaaacaaaaaacagccagctgtggcacattttgaaaatgaatatttggaaatagtttcatt

SEQ ID NO: 272133 - DNA, 406 bp, Homo sapiens
aatgtatttagggaagccaggcatgtatgcatgaaatagaaagtcaccatacaaggcagtggggcacctgccatttgctgcagaggacgcagctgaagataaggactacagccattcaaggccccaggggaggccagggcaggactgggaccagagcctcaccaaagacatggagatcctaggataagaaggctgaagggttagtttctggatcatctgaaatttgatattttaaaagctttctttaaaagacgcttttataattctctcttaaaaaattcagcccattttgtcctttgccatttttgaattgggttataggtcttgtacttattgatttataaaagctctttcattttagaaacattaataataaatattttacctagttaagaaaatttagctg

SEQ ID NO: 272134 - DNA, 479 bp, Homo sapiens
acggggttttccctgttgcccaggttggtcttgaactcctgggctgtagcgatccacctgcttcggcctctgacagcgttaggattacaggtgtgaactaccgcaaccagccagacaacaaataaaaatgaatgctatatatttatagtttgtaataaaatgttacattgtgaaatggttaaatcaagctaattaatatattcattacttcacgtaccatttttgttgtgagaacatttaagaggtactcttagcagttttcaagtatacaatgcattattattaactgtagtcaccatgctgtacaatagatctactgaacttatgcatcctaactgaaactttgtaccctttgaccatctctcagcccctgggaggctgaggtgggaggatcacttgagcccaggaggtggaggttgcaatgagccaagattgcaccattgcactccagcctgggtgacagattgacacccagtctc

SEQ ID NO: 272135 - DNA, 190 bp, Homo sapiens
ctgtggctgaattgattttatattttgttccattatattccctcccttgtgatttgaaatttatatgtctatttatattcttctagtggttacacttatatttttaacaattttaacaattctgtcgacagctataacatctatatcctcctcttacataagaataaaaaatttagtattcttacacttc

SEQ ID NO: 272136 - DNA, 333 bp, Homo sapiens
tcaggtgagcatcaggtcacaaagctcagaggcttcgtggccagcttctttcttgtgtcacctttccctggcatcagatccactccttccaaaaagaacaatgtgggtgcctgtcctaggggcacaggctgtgctctgtaacccgtggccctgccacgtggaaatcatcaggttatttttaagctcattctttgcagcaagcctggtgggtaaattcaagactgaggaacaagagttagtttacctcacaaatggaagtaattttgtaagctttgaggactgagatctatgatgtagtggtatgccctgcatatcactgtatatatgggagag

SEQ ID NO: 272137 - DNA, 802 bp, Homo sapiens
aggaaccagagaggatcgtcagaggagaatcctgactcgggctgcgggttcatgaatgggaagagctttggtctgtggcgttcccaattcctctttccttctgttaaaaatttatgggagtcatcaccaaaatattaaagaatttaattaaagaatgattctaaaattgtagagcacccagttatggggtgtagcttgttatccatgggacgggcttgaaggaaagactttcataagatgcatgatgcaaaaacccaaattcagtaatcggttaggtacagttacatagtttctaaatttgcaccttgagcgtacaaattttctggttatgtaatcagagcttaataggcagtttatagtttgttacgcctaaattttgttttccttaatgtagtaatttacaaaaaaatacatttgagttacatttttttttaaagtaggaatccaggcatcgcagccacgtacctcgaattgcctgtcacttaactattttcacactccacaggagactgatcttctgcatttttttttcatgtttctcaaacggggtctcaagtctacccctcaacccccattcctccagcctaactctggcttgcagtaaaatactaaatttccagtttcttctgattatcccaaatgccaactttccctctctaattcacattattatctgtttgtcctttagggtacatttttgatactgtattttaattatttttttacaaaccattgggtgggacatttaaaaagatttgttttctgtttgtaaatatcgcccatgaaaataaaccaaaactaa

SEQ ID NO: 272138 - DNA, 242 bp, Homo sapiens
agtactattattatccccattgcacaaataaggaaactgagctactgacatattaaatccaaatgttgtgtgcattattgagagaataaatataatgttatttctaatctttataatattcttgagaggcaggtcttatgataataagatcattttaaaaatgaaaataaaagaaacctatgatttagaaaagttaacatttccaaacatggtcagctgggatttctacttctggtcatgag

SEQ ID NO: 272139 - DNA, 738 bp, Homo sapiens
gacttgtcatcctagaggtcaaggtgctaggccctgagtatcccatcctggccctcgtcggggaggaggtggagttcccgtgccacctatggccacagctggatgcccagcaaatggagatccgctggttccggagtcagaccttcaatgtggtacacctgtaccaggagcagcaggagctccctggcaggcagatgccggcgttccggaacaggaccaagttggtcaaggacgacatcgcctatggcagcgtggtcctgcagcttcacagcatcatcccctctgacaagggcacatatggctgccgcttccactccgacaacttctctggcgaagctctctgggaactggaggtagcagggctgggctcagaccctcacctctcccttgagggcttcaaggaaggaggcattcagctgaggctcagatccagtggctggtaccccaagcctaaggttcagtggagagaccaccagggacagtgcctgcctccagagtttgaagccatcgtctgggatgcccaggacctgttcagtctggaaacatctgtggttgtccgagcgggagccctcagcaatgtgtccgtctccatccagaatctcctcttgagccagaagaaagagttggtggtccagatagcaggtcagtggctgttagctcacacccatcttcctagtcctcatgtgtacatacacattgggcccaaaggcagtctataaagacacaatggtactgcgc

SEQ ID NO: 272140 - DNA, 434 bp, Homo sapiens
gtatttgatgatgttagggaattattgtttattttggtaagtgtgataatggtcctgtggtgttttgttttgtttttaaaaaacatgaccttttccttcacagtaagaaaaaggataaaaaatgatatggacaggatattaggtaatagtattgtgttgatgtttaattttttgaatttggtcattgttttctgtgtaagagaatgttcttatatgctgaagtgtttaggggtaaatggagatgaggtccgcaactgacttcaaaatgggtcaggaaaataagttgtagaaaagtgtttgggggataattgaaagatgattggcagagtattttggtaatggttgaagctgcacgttgggtatggtagctcattatactgctctctcaactgttgtgtatattacacagttttcaaaataaaatgtaaaatgaa

SEQ ID NO: 272141 - DNA, 380 bp, Homo sapiens
atgtatctttaatctttatgagcatgttcttatgtgtaaaacagagatgagatttattaagggctgatatatcatccattgagtttgaacttccaatttgcctatgctaggttcagaatgctgaagtgactatttagaaaatgcatagctgggaggccgaggcaggcagatcacaaggtcaggagatcaagaccatcttggctaacatggtgaaaccttgtctctactaaaaatacaaaagaaaaaattagccaggtgtggtggcgagcacctgtagtcccagctactcgggaggctgaggcaggagaatggcgtgaacccgggaggcggatcttgcagtgagcctagatcgcgccactgcactccagcctgggcggcag

SEQ ID NO: 272142 - DNA, 196 bp, Homo sapiens
actgttttttcatctacctctggtctctgtgcagataaccagaagattctacctgtggatcagaaactagaccctcaccagacaccaaatctgctggagtatggacttcctagcttctagaactcttggaaagtgtgcttctgcaacatggcagtcgagccccacatcaaagaagcaaaatatagaataacagcat

SEQ ID NO: 272143 - DNA, 845 bp, Homo sapiens
cagaggcctctgtctcctaatcttttccataggctactgttttctttcttttctcatgaggaaaaatgataaaagcaaaataaacaaattagctaccacttatgaaaatccccaggaaattccttttccagagttctcacttactaatttggctaacattaccaatggtaacagaccccacgtatccgccacaattgctgtgagttgcagaggaaaaagactgggaggaaatcttcacttttcttctgcaacagcaaccaacagaaatgaaagagccaggggattttgcaaaatatcaactcctgagaactaagaatgagagcctttcctgccaagcccattctgtgccagtcatcataaaatactatgacccttccttccagaagaacaatgcgctgtgatctttggctactcaagctttacatcatccatattaccctgcagcaggaacagattgatgggtattttcactgcccccagagagttaccctctaatccttcatttgctgctccagcacaattgcacggaagcaatagcagggatagttagagtgcatacaattgattccaatccatccatcacttaaactactgtctaggacatcaggaggccacaaaaaaaaaaaaaagaaagaaaaaaagaaaaacttttgaatcaagaaatgctttgtccattccaggtcaaggaaaatcatgatgcaatttggttggatactttgactttagaaaagtttctcacttctcagtagagaaagtttaatgtttgcaaacatgcagtaatgaggtaacagttgcagtaataagcatttttaaactgcatttgtggaagagcagcttctacctac

SEQ ID NO: 272144 - DNA, 595 bp, Homo sapiens
cagaggcctctgtctcctaatcttttccataggctactgttttctttcttttctcatgaggaaaaatgataaaagcaaaataaacaaattagctaccacttatgaaaatccccaggaaattccttttccagagttctcacttactaatttggctaacattaccaatggtaacagaccccacgtatccgccacaattgctgtgagttgcagaggaaaaagactgggaggaaatcttcacttttcttctgcaacagcaaccaacagaaatgaaagagccaggggattttgcaaaatatcaactcctgagaactaagaatgagagcctttcctgccaagcccattctgtgccagtcatcataaaatactccagaagattctacctgtggatcagaaactagaccctcaccagacaccaaatctgctggagtatggacttcctagcttctagaactgtaaaagagaaatttccgttgtttataaactacccaatttgtggtattttgttatagcagcctggatggactaagacaacatattctattttaaaatcaactttgttgggggtataataaaatttgtaaattttaaatataaa

SEQ ID NO: 272145 - DNA, 369 bp, Homo sapiens
atgaagtcaccatttactgagatggtaatgactgggaggttgagctggaagaactgagaatcaaatatctggttttgaatctgttctttttgagatgcatattcaacttccatatggaggtgtcaaggaggatttagatctagaattttggagctcaagggaaagggttgagctgtagacataaattctagagatgccggaatatagattgtgatccttctttatcagcacagaaatgacttgactttgtccaaactaagcaatcatactgtacatgttagcaacacattttacaggccaatttggccttttgcaatgttctgtggtttctaagataaataaacatattatatgtttccctctggatgc

SEQ ID NO: 272146 - DNA, 622 bp, Homo sapiens
aaagacttcctaagcagctctgacagagggagtgagcaagaggacctggaggactcagggagcatggactgctctgctccttctgtgatccaaggtgacagctccaagagggcagacaaagatgaaatacccaccatttccagttacgtagacaaaaacacaaaggacaggttcccagtgttctcacacagaatatggaacctaccatattatcacccatctagttaagttacttacaactagaggggtttttatgaacaccttagaactcctaatattaagaataagaaaaagtgatgtgacttcaagtttttctttgttacaaggtcagtatcctgtggatgtagcctatgttttaaatagtgttctttttttaaccactctaaacatgctatgttttcattgaatagtatgcttttaactaaaatgtttcctaagtattttgaaaaaatgtttgcagtattttcttatacctcaaacccacctcacaggaactaaagcaactttagtatgaagtctgacaaattctgtacaaaacttagatattaaccttgacttttattctacaatgaagctacgtatagaattaaataaattattaatacgaatcctatctttacaa

SEQ ID NO: 272147 - DNA, 379 bp, Homo sapiens
tagtatttttggtaacaggaaataaatgtaattctcatctataacaactcttattctaagtttctgaatttctctactcaattgcctttttaaagtattttaactgtcttgtgctagatgttttaatattatctttggacttaaatcctgaggaatagaaaatacatatctttaaatttataaatagataaatctagacgagtaaacccttaccaataagaatgtcaacttacgccgggcatggtggctcacgcctgtaatcccagctatttgggaggctgagagagaagaatggtatgaacctgggaggtggagcttgcagtgagctgagattgtgccactgcactccagcctgggcgacagtgcgagactctgtctc

SEQ ID NO: 272148 - DNA, 384 bp, Homo sapiens
ccagatagcgcctgcgattgtttgttaccgttttaatcctattaattaaaacgttaacctgattgggtagaaagcgctgtcccaacaggcgagtcttcttcataataacctactcagagataatgatgtaaaagactcccccgtctgtggcggcggctgtttgatgggtccggaaatctcttgaaggtgaatccaagcaagataaacggtgcggagaggaggcgcggggctgggctcagagcggcggcggcggcggctccactccctccgcgcccaccctcccaccatgcggggccgcggcccatggtgagccccagcagccagcaccatcggctggagacgaagaagaagaagaagaggaggcggcgagcgcgggggaaggcg

SEQ ID NO: 272149 - DNA, 682 bp, Homo sapiens
agatatcttctgcaagcctatagccagattcaaaagtaaaagacgcctgctaacattgagataatttaactttgttttgggaattcttgccagtgtaatccaacaagaaaaggtaatacaacatctacacatttcgaaaaaaggcataacagatgatctgtttgtctttcagggaaatttaagacaagtaattgaaaagctattagaggtaataagagaactgaaatagacaaaaatcaatagctttctttttttcaacaataacattagcaatgccaattctccaaaaattgtatataaatttaaatttaatgccaataaaaatgaatgcaggaattcatagcttgtcaaaattatagccttaagttaaatcagaaaaatgaatgagaaagaataatgaagaaaatcttttaaaaaagaactgaaactgtatcattaaactggagtaattaatttatgtggttctatgcaggaaaagacagagtccagaaataggcccatgattatgtgggaattgagtaagtgataaggaaggcaattcaaatcagtaagaaaaatggcttttaaaaaatttattatctaatatttgatttgtcaagtcattaaataattatctataccctaaagatatcctgtattttttctaaaagatttaattttcacctttgatttacaattaata

SEQ ID NO: 272150 - DNA, 564 bp, Homo sapiens
  misc_feature (37)..(37): n is a, c, g, or t
tgtgtgtgtctgtgcgtgcatgtgcacgtagcggcgngttgagaaatcaagaggtaaaatagcagatatgtgctcatttttctgcccaataccccctgcacccttcttctgggacagccatccctcatttgggggaaacggacatcccatactccatgtggttctagaagggctgctggtcttcttatcccacctcataaatgggccgcatgaatgcgcatgagcccaagcttgatcttttatcctgatcatagtcataagctcagggaaagaatgtgactaattagaaaccagtggtttgttcggatgggaggaagaggggctctctttacatttgaagtgggagataatgacgttagcagaaagagttaggagaaagatgcggaatcagaggagaaatctttttcttatcttaactctgtcaccacaggttaatcagcacaatcttgaatttcaggacgctaagccaccctacaacacaggaatcctctgggtatcaaataagacactttgtgtttaaatgcttgatgaattctaaagcactgttcaaatgttaactaaatc

SEQ ID NO: 272151 - DNA, 725 bp, Homo sapiens
ttgttttctaacagcataacaataaacgtatttatttctccgagctttcaaaggcatcaacagaagggaatcactaaaaatgtaggggaaaagaaacactcggctggagctttggtttctaagcagatccttctggaaagacgcttagggagagtctagggagcagctctgacgtcagtagctgccatcggaagtcaggtcatgttctacaaaaagcagtgacgcacgcccgacagcacccgcggggccggacagcggcttcaccagccccgcgggtccgaatcgcacgcggccgggtccgctctcccgggaggagagcccggcgtggaccagcgtgacgaccccagcgtgctgcggcctctccccgagggcccctccacaagggtccctgcgcgggccgggctcggccgttgccactcgggacagccatcccctcgagttcgcgctcgccgtccccgccttcacctcccgggttgggaggcgggcgactgcgcgcgaggtaaaggaacttgcgttccccggcgccgaggcggcagcagcgcagtgcacagcggcttctgaaggcggcgtcgacggggagctgcgcgtggctcccggtttcctggttacgtgcgcgccggcagagccaaaacctgcagccgaaactcccgcttctccgtaaggattaaagggcgggcgcactaccgggagacgtgtcaaactcagcgcgcctcatggcggccgca

SEQ ID NO: 272152 - DNA, 772 bp, Homo sapiens
ttgttttctaacagcataacaataaacgtatttatttctccgagctttcaaaggcatcaacagaagggaatcactaaaaatgtaggggaaaagaaacactcggctggagctttggtttctaagcagatccttctggaaagacgcttagggagagtctagggagcagctctgacgtcagtagctgccatcggaagtcaggtcatgttctacaaaaagcagtgacgcacgcccgacagcacccgcggggccggacagcggcttcaccagccccgcgggtccgaatcgcacgcggccgggtccgctctcccgggaggagagcccggcgtggaccagcgtgacgaccccagcgtgctgcggcctctccccgagggcccctccacaagggtccctgcgcgggccgggctcggccgttgccactcgggacagccatcccctcgagttcgcgctcgccgtccccgccttcacctcccgggttgggaggcgggcgactgcgcgcgaggtaaaggaacttgcgttccccggcgccgaggcggcagcagcgcagtgcacagcggcttctgaaggcggcgtcgacggggagctgcgcgtggctcccggtttcctggttacgtgcgcgccggcagagccaaaacctgcagccgaaactcccgcttctccggcagctgcgcattcttgacctgtcggggtgcggcgagtgtctcacctctctgcacttccaaggactctgtcatctgcttaggcggaatgctgttgtggtgggaccccgagtgtg

SEQ ID NO: 272153 - DNA, 461 bp, Homo sapiens
aattgagatggattctctacttaccaccagttttactaccacattttcatttttgagtgtttcattttaattaacttcttattgggttggatcattttttgaatcacttttgtttttatgtttaaaaatgaggatcatttaagttttacatgatgtcatatttgtaaaataaagtaaaaaaaagacttaatttggtcttttgatgatttttcattggaagtctaggcattccattgagttagttatacttaaaaacactgtataggtacttttgtgaaaacgctactgtattttcgagtacgaaaaaacccaaagattaaaaattacttttgtaattttgagaaatatcaaacttaatagcaaagaagcaaagtataatactgctacatgccattatttttgcttttatcaaactttctcaagtaactactttgtgtgataaacccaaatgtaaagggcaa

SEQ ID NO: 272154 - DNA, 886 bp, Homo sapiens
cccagcatggctatttcctgctaccagcaggctgggggcctggttctttcactagagctaccatgcactgagccagcatctgatatgtgttaactcattccattctcaaaagccactgatatcatcttgcaggatggatttgggacctagcaagactgacttatccaaggtcacattgccgataagaggaacaactggggttcaaaccaaggcagctgggtccagagcctacgtgcttaaccactaccctcttgtcgcctctcttagtggcaaatgataaaaacccacttcctaagagttaaggcagacaggaaaatgtgtacatcatggagccaaattggagaagaaatacagctgggtgggccttaaagttagttgaaacctggaacataaacgctgccaggaccgtatccctggcccttaacgctgtcaggaccgtatccctggcccttggctttctgtgcatgtaggttcggctcccagaccaaccctctccaccaagctcaggataccatctagtttcacatttcccggcatcatctgctgctgcctgaacccgaactcaccattggaggctttggcatcaataatcccaggggagggctctgactggccccgtttggcccagatagtaatccttggaccaatcagtgaggcccaggcaggagggggtctcccacaggcccggcttgtcttcagtctctggcacggagggtggggtcacgtgacaacacggaagtagccctcgcccccgcaatgaggcagtgtggtgggtggggagatggtttttcagaggaagggaggatttggactggccagaaaaaaaaattgcggtctacctaccctgcccagcctgtgagaatcacacaggcccagcagaggggaa

SEQ ID NO: 272155 - DNA, 456 bp, Homo sapiens
caagagtatagaaattgcatgagcggaaaatcatttcagggatggatccagctgcttttgcacatgtgagaatggccatgccaacttagggtaccccctcaaagagggggtgaaggaagggcacctgagccccactgcctgtccctccccatcctgtgtcctctccaggacatgctgattgccactgtctcttcaccccggcagctaaagaaagttgcatgggacgtggtggggaaggaaatcaaaagtctagaacccacacggaatgctggtcattcttcatctctcatttgtcgctctaacaacatgtcatttcacggctcaagtgaagccacgtttcactgtagtttattctctcagaagctgaagccccacgctctggtttctatcccacgtactgtatttaattttagcaaaatcctagtaaataaaataatttggaaaaataaaaaaaaa

SEQ ID NO: 272156 - DNA, 363 bp, Homo sapiens
tataatgtgggaaatgagatggttgcattttgagctgttttcctgatcagcaagcaggaggtttaaaaaagacatggtacagggccgggcacagtggctcatgcctgtaatcccagcgctttgggaggctgaggcgggtggatcacttgaggtcaggcgttcaagaccagcctggccaacatagtgaaacccctgtctctactaaaaacacaaaaattagccaggtgtggtagtgcgtgcctgtaatcccagctactaggaaggatgaggcaggagaattgcttgaacccagggggcggaggtttcaatgagccaagatcgtgccactacactccagcctgggtagcagagtgagactgtctc

SEQ ID NO: 272157 - DNA, 864 bp, Homo sapiens
tttttttgagacagaatttcactcttgttgcccaggctggagtgcaatggcgtgatcttggctcaccgcacactcttgttgcccaggctgctgagtgttaggggtgagggagagagctacgagaagttagactggcaagtggagattgactctaagggccttgaaagtcatggggacaactctggcttttgcttgcttgggttgggaactatggttggcaggataatggctcccaaaagggtccacatgcttatcctcagaaccctaaatatggtactttacaaaaaatgggaaaaataattctgccaatgtaattaagtttaaggaccttgagatggagagattaacccggattatctgggggggcctactgtcatcacatgacccttaaaggtagagaacctttcccagatgtgggcagagaaagtcatgatgatgtaagggttggagagatactatgttgctggccttgatcatggaggaagggaccatgagcaaggaatgcaggtggcctcaacaggctggaaaaggcaaggaaccagcccatgggctcactgggcaacaccttgattttagcccactgtgcccatgtgggctttctgacctaccgaaatgtaaaatcggtggctcatgcctgtaattctagcattttgggaggctgaggtgggaggaccagtctaggcaacatagcaagaacctgtctctaataaataaataaataaatgaataaagagaattcggatttagcaacatgaaggtcataggtgactcagcggagagggaacaaggttgggagagaatgtggaggtgaggaggaagcggaagcagcaatcacaaagtctttgatgtttatcataagggaga

SEQ ID NO: 272158 - DNA, 386 bp, Homo sapiens
catattaggaatacaaggctgactgaccatttgaaatacattcaatgtgattcaacgtattaacagacttaagaaaaagccacataatcacatcaatagatacagaaaatgcattagataaaacttggcatccattcatgataaaaactctcaataaactaggaagagaaagaaactttcttaacctgataaggactatctactaaaaacctatagcaaaccatacttaatggtaagggacagacagactgctttcgtcctaacattgattacatggaaggcaagatgtcctctctcatcattcctattcaataatgtacaagatgtaacagccccttcagtgaggcaagaaaaataaataaatagtagatagactggaaaggagt

SEQ ID NO: 272159 - DNA, 245 bp, Homo sapiens
catgctcagaacacttacataagcctgcagttgggaaaaatcatctaacatagaggctattttataataaagtgttggatatctcatgtaatttattgaatcttgcatgaaagtgaaaaacagaatggttgtatggtttctactaaatgcatatcacttttgcactatcataaaataaaaaatgataagttgaaccattgtaagtcttgggccatctgtagcagtttcaattatccaaactagag

SEQ ID NO: 272160 - DNA, 219 bp, Homo sapiens
aactccactgaaaatacacccccggcccagtcatttcttggccagctcggggcaggtgccaggtaaataaacttgcccagccctataccaagtcactgcagaccccatatctcagtctggcatcttcagtcaccaagagaaggtccaaacaagcagaggcggtgggtgggagaagaatgctcatttacttaaaccagtttggggagccctgagaataaa

SEQ ID NO: 272161 - DNA, 436 bp, Homo sapiens
gcagctccttgtgtggctgcccagttgtgtagtggagctgcattccatacaggtggggggttgggtctgaaaagtccacacagcaccaattacccatagtcaaaatcacacagagaatccttgtcggagacccacagagccagttgtcttcagcattggaacagaatgctgtttcttaaaagcagggatggcaaatgggccaaatccagttggcggtctgtttttataaataaagttttgttggaacacagccatacccatttagttacatattgttggtgctgctttcttaccaaagtggcagagttgaatatttgcaacagattgtatggcccacgaagtccattgtttcgtatgttgcccttcaaggaaagtttgctgccctctgctttggagcaaatgaaggaattcgttttatattcaggtactacgttgt

SEQ ID NO: 272162 - DNA, 534 bp, Homo sapiens
aaagtgtcagtacttatgaaattataaaacatttccttcctgatgaaactggattttaagagtaaaggatcacatcaatgttttatttccatagacggcccatgtttgtcttataccccaacaaatggctttattttctggctaaaatcctttgctttcatttgcggtgatttaaaaacactcaaatctaacgtgtgatttagagatgtgcttctcaaaatggaatgagctttgggggttctgttaaaatgcagattctggccgggcacagtggctcacgcctgtaatcccaacattttgggaggctgaggcaggcggatcaccctgaggtcaggaattccacaccagcctggccacatggtgaaaccccgtctctactaaaaatacaaaaattagccaggcatggtggtgcaaacctgtaatcccagctactcgggaggcaggagaatctcttgaacccaggaggtggaggttgcagtgagccaagatcgcgtcactgcattccagcctaggtgacggagtgagacactctct

SEQ ID NO: 272163 - DNA, 543 bp, Homo sapiens
gctttgtagttctcatatcttttcgaatgcaaatacttagtactttgacgaaatgcaatatacttagtattttgacctttggtcttaacttgtaaacttaaaatgaagaggaggagagaaatatttatttgcaaaggtgagaaccctggcttcagcttccacaaatcaaattactggtagtaagctgttctgccacattttcaacacagttttctgtagctgggcctaacttaggcattaaaaaattccaatattctggccaggggtggtggctcacgcctgtaatcccagcactttgggaggccaaggcaggtggatcacctgaggtcaggagttcaagaccagcctggccaacatggtgaaaccttgcctctacaaaaatacaaaaaaatagccaggcatgatggtgggtgcctgtaatcctagctacttgagaggctaagctggcagaatcacttgaacccgggaggcagaggttgcagtgagccgagatcgcaactactgtactctagcctgggtgacagagtgagactctgtctcaaa

SEQ ID NO: 272164 - DNA, 418 bp, Homo sapiens
tcaagaactatgaaagaacccatttctgttggtgaaggctccccgtctgtggtcccctgtcctggcagccctaggaacctgacctctggtccctctgcatccctggcatcactctgcctccctctctttttctccagtgaatccaacacactctcagtgagacagccaggtggcaaggggttctcggagaaactccagccggcctgctcgctgggcatgtacactggagtggagccacagaagttcacggtgtttgcagcagggaggagcctggccactcctcttcctggttggaacctggaatttattttgtgaggcgggaagcctatactggggagactcttgctctgctgagtccccattccccctttattttcctttttgcccaataaatcctattattctcagtcttcaaatt

SEQ ID NO: 272165 - DNA, 303 bp, Homo sapiens
tcagtgcagcaggtccccttctggcccaaggtgggtttagaaatgccgtccaagagctagggcctgggatgggaggctttaggaatcttcttggtgtttattttaccaggttgcaagacaaagtcctctttacttttccttctcctttcctcaagcagaagtctctccctatggccattatcactctaggctcagggcagctaccgcttggctgccactgatgtttattcaaggcccaagggctttttagtcaccactggtgagtcctgcgaggcctgtatctctcccttctgtcgtcttctc

SEQ ID NO: 272166 - DNA, 339 bp, Homo sapiens
agactatgtgagtgggaaacggggggagctgctgttttattccctgctcttggaatgttgaagaatttaaaaaatgcttttaaaaagatagtttcatttttggaaaagtaggaaacagccttagggggagataaagacttgaaaagcccaggctctcggcagagaagacagcggggataggggtgggagggctggagccaggcgtgaagagcttgctgggctctgccaggattgttctggatcctctccacccaaactaaaagtcctccaaccctccaggttaaaaatgggggttacaagagctctgccacacaaatggagggttcctgctgcattcat

SEQ ID NO: 272167 - DNA, 387 bp, Homo sapiens
tgaagaatgatgtagtcctgtattagtttgtcaaggctgccataagaaagtcccacaactgagtggcctaaataaccaaaatttattgtcttatagttatggaggctggaagtctgagaacaaggcatctacagagttggttccttctcaaggctgtgggggagacttccacacctcctggcttctggtggtttgccagcatgcttgggcattctttggcttgtaaatgcatcaccccaatctctgtcttgatggttatgtggtgttctccctgcacatgtgtctgtgtccacatttccttttttttttttttttttttttttttttgagactgaatcttgctctgtcgcccaggctggaatgcagtggcccgatcttggctcactg

SEQ ID NO: 272168 - DNA, 858 bp, Homo sapiens
catgtcacaaccttacatgaggctttttgaacatctcctcctggcccagctggggtgagagcaagtcctcgaaggcactgcctttgagccttgctcagcccatctgaactatcccaactctagaattgactgctttcgaattgtgtgaccttgggaatgttatctggcttcaaccacaatgccctacccccagctcctctcccaaatgatcctagatacagggctgcttccccccgaccctaccccacctcgggacacaggctcatggcctcatggcacttcaccaccagaagtggtgctcagagttcctatttccacatctaaccccctaattcctgggaaagtctgaggcctggtccccccagtgctttccctggctggcctctccacattttcatctgatggtggagtgagatcaggaaaaataggacaggagctttgccttgggggagaagagagttaagtgtggaaaggggtgagttataggaggttaagcagtccaagatttctctctctgtgtaggaggccatttcctgatgtgaggggtctgaacccaattatgatgggacagggttgggcattgacttcccatctcttctctctgtttttctcccactatctgtagcccaaaactcttatggaggactttgatctttagtataggctattggtcagggccataggaactaaccccgatcctcactccaccaggatctaccacatcccctacacacaaacacatgctgtggggagggagttttcccctgggtcaagttgaggatccttagatcaccttgtgctcctgtggactggtgtgtgcgtgtgtgtgtgtgtgtgtgtgtgtgtgtgtgtgtgtgt

SEQ ID NO: 272169 - DNA, 416 bp, Homo sapiens
gaattcaagctggctacagaaatttgcctaaataacaagaagccaaatgttattacagtagccaaaacaatggcaaaatttttcttgggcgtatcagagacttccatggcagcccttctcatcacagacccagcagcctctgagggaaaaatggtttcatgggctgggcctagggccccgttactctgggcaacctcaggacttggtgccctgtgtcccagctgctgctactccagctccagccgtggctaaaaggagccaatgtacagctcatctgttgattcagagggtgcaagccccaagccttggaggattccatatggtgttgggcctgagggtacacagaagtcaagaattcaggtgtggaaacctctgcctagatttcataggttgtatggaaatgccaggatgtccag

SEQ ID NO: 272170 - DNA, 223 bp, Homo sapiens
tgtgtgggtggaaaacatggtcttcagaaagaaattatgagtgcaagacaggaggaaatccatcagaggccccagctgaggactgaccacggcttgttatttctcttgccttgcctctggcaatcacagcctcacagagcctgcaatccttgctttgtgagtttatagctcagtccagagaatggctaagaaagtttaggattctttcaacacccactccaca

SEQ ID NO: 272171 - DNA, 120 bp, Homo sapiens
gtaaaaacaaatcaaaaaaataaaaaacaaactgttttatagtcaacatgtagagattattaaatggagttttagtttaggtctaaataaagtaaggtttcttgcctgttctacagtgtt

SEQ ID NO: 272172 - DNA, 553 bp, Homo sapiens
tggcttgagtacccagataaatgggatgccagtctctgatttaggtaacacagaggcagactcacttgggaggtaactggtgattcagttttaaacatgtctagctcaacatgcctgtgaaacatacacatgacaatgtccagatacatggcaattggatgaatgattctgaaactcaaaaagagaggtctgagatggattctttgcatacttacaaaaaaaaagtttatgttatattgaaatgatctgttttgtgcctgtctccactattatacagggctggttcttaatgacctttgatgctccaacacctaacaccatgcctggtacaaactgcacactcaattagtatttgttgttgaactgaactccttttgagacatgatgcgtctaacaaagtaatagtagtagcctctgaggagggaaactagcaggtcagagtgaaaaagaaattttctttttgttgaatatattttagttctttttgccttttcctccaatgtatttctatttcctgagaaataaaaagatgacataaaaagtgttctattag

SEQ ID NO: 272173 - DNA, 469 bp, Homo sapiens
agaaaaagaactcaaagggcagcaataccagcaagaaggaaaccagttaggagataattgtagtaatccagggaaagaaagatggcagtttatactggggcattgccagtatggattctttgcatacttacaaaaaaaaagtttatgttatattgaaatgatctgttttgtgcctgtctccactattatacagggctggttcttaatgacctttgatgctccaacacctaacaccatgcctggtacaaactgcacactcaattagtatttgttgttgaactgaactccttttgagacatgatgcgtctaacaaagtaatagtagtagcctctgaggagggaaactagcaggtcagagtgaaaaagaaattttctttttgttgaatatattttagttctttttgccttttcctccaatgtatttctatttcctgagaaataaaaagatgacataaaaagtgttctattag

SEQ ID NO: 272174 - DNA, 430 bp, Homo sapiens
gcaataattaggaaactcacctcaggatattatcaaaatgacccacccaaacccaagtccatatggtttgaaatagctaatgagtcagttaatgtgctatgtccaggagtaatgggtactcaatatggatagcatgaaggtataatttaccaacgttctgactgattaagggtttcaagtggacattttacaacctaaacagggtatgaagtattaacacttttgatggttgagacaaaaggaagaaacagtgtttaaaagtcagggacattggaacttgaacaatttctttcaatcatattttccaggcttacaaagttaatactatataaaatggaatgaagatgtaggtttcggtagccaattgtgataatgtggaaaggtatgggggatgctactggctgagtcctttgcataacagaaaaataaa

SEQ ID NO: 272175 - DNA, 556 bp, Homo sapiens
ggaggaaggttcagaagtgacaagtttctaatgactaatatctcggcaggaagtgaaaatctcaaaagatgttatcaactttgcagcagctgtccaagttggggggtgggcaggggttggaggtgacctggcagcccagccggtcccctgcccacccgcacctgacaaaatcctctctgtccagccacacttgcctccaatgccttcctcaaacccctccgctggcaatgatcacttcctcagcaatcagtgccccaggcccctctctcgtgtccctgcctgagtcccacacagggaactgagatcctcagggtccccagggcagatgctggaacatgctcacctctgaatccccccagggctctgcacagtgtggcccacagcagatgcctgccagctgctggctaaatggaactggctgcggggaggaaggctctggtgagaacagaggctttttgggacctccaactaaacgcaccctcccccatctacagtgtaaagaacactttatttcgaacagcaataaatcagcatgctgcataaaccaggaaaaaaa

SEQ ID NO: 272176 - DNA, 336 bp, Homo sapiens
taatgaatgtcttcatcattcccgtcactgatgacagaatgttaatatgaaattgtaggaatgattttgcagccattgactggttgctgttgtccctatgctgaggtcatttttgttttattattaaaatagatgaaatgcctacagcacgtgtgcagagccctgagtgctgaggcaagtgatgcagggtgactgactcagggagggcgtttcaggcaatgagagctgaactgcaggaaagggagtgtcagatgtcacgctgaggtagacctccatctgcctggaagaggcttttttggctttgagaaggccatttctggctgagttaaatccact

SEQ ID NO: 272177 - DNA, 502 bp, Homo sapiens
tggtgtcagggaggaataggattgtagagctggaagagtcctggggaggtggggcccaggcaggtgatgtggctttgtccatggccgcagagcaggttcatgggcaggcaggacttgagcccaagcttcctgccctcacgtgcactcaatctgccagcagaattcgggcccctggcagacaagttggcatatggagatgcacagaaatgaaatgcccgagcttgttgccaggtcctcctccgtcaggcacgcccctggagaccacctcagcgccgaccctccctgcctctccccttggctagcacagcctcttgctcaggtgtctaaggggctttgctcctagcatatctcctgacctttttgagacaagagagatctagcatttgattcaaaactgtaaagaaatctattctccacaaagtaatgtatggactgaatacattactcctgccaaatggatcccatcaaataaaatatcagaggaacttttgaaaaggttaaa

SEQ ID NO: 272178 - DNA, 624 bp, Homo sapiens
ttgcttccacctccgcctcccaagtagctggggctataggtgcacgccacccatgtccaccagctctgttgctaatgctttcattgctagtttgatatgaatttcatcaagttccttaagtgtaatgagcaacatacattgttttcaaatcattcccactggtctttcttggatttgcttgtaatacaagtttgctgtataaataataaagattacatttgaaattgtagtaatttctggactatttgttatctagaacattctggacaaatattcaatatgtaagggcagtatagaccttcctgaggataaagttttgaagaacactcacctgggaataggaattcacattaatatataatttacagcaaggaccccaggtcacttcctagacttgagggtagaggagctaatgcctaaatttcactcctctttaggtgactctactaactgatgaaatggctataacagaagcgactgatcgatgtgctacttaaaaacagctagaggctgggtgtggtggctgtctgtaatcctagcactctgggaggccgaggcgggaagatcacctgaggtcaggcattcgagactggcctgggcaacatagtgatagctagtctgtat

SEQ ID NO: 272179 - DNA, 441 bp, Homo sapiens
atcagaaagaatgtttgaagaaataatggttgaaaaactcccaaatttgatgaaagaggtgaatctacatatccaagaagctcaatgaactctaaagagacccacactgagacgtgttatagtcaaactgtcaaaagccaaagacaatgaaaacaacaagagagaaacaactcatcacatacaagagagccttaataaaattactagctgatttcttataaaaaaccatggagaccagaaaataagaatgtcgatcaagaattctatatctgacaaaactattcctaaagaaattctcagataaacaaaagctacagaatttactagtagacctgccctacaagaaatgctaaagagaatctctcagattgaaattaaaggacatcagacagtaacttgaagccatatgaaaaaataaagagcaattgtgaaaaatctgtc

SEQ ID NO: 272180 - DNA, 433 bp, Homo sapiens
gcgggacctttagcctgtcactgctcagtcttctggattcagtccctttttccaggggtacgtatgggggtctacgtacccctttgccagagttgcagctgcttttgccaagaagcctgggtgtctaagtttcttggggctctgcatgtgcctgagtggctgctctgctgagactccacataattctgtgtgtcagactgaagacccttgtggagtgagttcatgaagtgacctcagagtgaccttggaagctacatgctgaaatgctgaagatggcagaggttcagtgagacaggatccttgaagatttaataaagcagagccctacctgccaagacttctcttttgcagaacccattacgtgtttgggcctatttgttattgtagcctagcctgaaataattaatactaataataaataaatgacttctaa

SEQ ID NO: 272181 - DNA, 448 bp, Homo sapiens
ggattcagtccctttttccaggggtacgtatgggggtctacgtacccctttgccagagttgcagctgcttttgccaagaagcctgggtgtctaagtttcttggggctctgcatgtgcctgagtggctgctctgctgagactccacataattctgtgtgtcagactgaagacccttgtggagtgagttcatgaagaaggcagaagaaatcagagagaaggatggagtggggaaaagaagagggaggctgacagagaagcttaaagaaatgctttcagatggcaacaaaagccaaaatagacaaatgggatttaattaaacgaaagagtttctgcacagcaaaataaactatcatcagcgtgaacaggcaacctaccgaatgggagaaaattctcacaatctacccatttgacaaaaggctaatatccagaatctacaaagaacttaaac

SEQ ID NO: 272182 - DNA, 437 bp, Homo sapiens
gaaagaaaaaagacaaattcgctctcttctggagctgggacatttatcttctcctgcccttaaacatcagaactccaggttctcagctcttcagtcttcaacccggcttccctggttctccatgtcacagacagcatatcatggaacttcttggcctccagaatcacataaaccagttcccataataaatcccctcttatatatctatatatacactatcagttctgtttctctgaagaatcttgattaatacaacctacattcacctgaacaagaaaaagaaactaatgtgttaagacactgaaacttacaggcttatttgttgcagcagctggtcttgtcccgactaatccaaacaccatttgtggaaccaaggggcaaaaagaatgagagagaaagtgtagcaagatgtcaaggtctagagtttctaaagcttt

SEQ ID NO: 272183 - DNA, 129 bp, Homo sapiens
cctaaggctgggcctgtgttgggggttgggggaggcccctacatgtctgcaaggagtgggagagaaaggattggcagtcagtgggggaggggcctcctcctccaaccataaatacaaattttattcaag

SEQ ID NO: 272184 - DNA, 789 bp, Homo sapiens
cacttaccacatcagagtattgatccctgataatgtacttaaccatctttcctgaaataacaaggtggctatgtccctcagttttcaaacagaattacttaggtaacagtagagatcatgggacctgcagcatagctcagtgaagtgtgaaatgttactaaagattgtaggtgagtagattctgtccttttcccccgagtccttgacattctggcttgatgaaagatcttagctaaggccggatgctgtggctcactcctgtaagaaggccgaggcgggcgaatcacgaggccaggagtttgagaccagcctgaccaacatggtgaaaccccgtctctactaaaaatacaataattagctaggcgtaatggcgggcacctataatcccagctattcaggaggcagaggcaggagaatcgcttgaacccgggaggcagaggcagcagtgagctgagatcacaccactgcactccagcctgggcaacaatgtgaaactccatctaaaaaaaaaaagaagaagaaggatcttaactaaatcataataaaaccaaagctgtacctctgaagattgattagtgtgtagcgcaatggtgccccctgtggaagatctccctatcctggatctaagaagattatgctaacctgtatctttaattgattcctaagatttgtgtgcagctgtcagaaaaatgggtagacctttctatgtgctgtactttctttaagatgcatgccattgtatgcgtgctttgcagcgtacactgtttaagacacacactaaacacctta

SEQ ID NO: 272185 - DNA, 491 bp, Homo sapiens
actttttcccaataaaaaccagactaaacaaaattaaaacgtaagtgacaaacaagggagggaaaacatttacaactgactattaatatcccatattcagagaaatccaactcattggaagaaaatgacagacaataccctaaagggataaagaatacttataggcaaaaaagaagtacacacggcaaataaatctgtgaaaagatgctcaaccacggtattgattaaaggaataaggaagtgaataacaacaaaatagtttttgccaaatctgattgtcaacatgtcatatattgttaacattgattgctgtcgaggctgtgaaaaactaggcagcttcataattgttggcaggaacaaccaactgctacaaacattttgggggcaatttggaattatctaataaaatatatttgcataccctttggccatgccatttcacttttacggatctaacaaaaaataaaataaaaacattataaaggtaaaag

SEQ ID NO: 272186 - DNA, 164 bp, Homo sapiens
ggaacatggacctttcatatgtgacatctataaccccacagtataagtacagttgaatatttgatgagtgcaatatttacaatacatgaaagttaaaaatcttttatatttctctttgaattgataacagtagaaaatagagtctcctaggatttaaaacaagt

SEQ ID NO: 272187 - DNA, 551 bp, Homo sapiens
tgctaactgttcccccactgagtgctcagaacctttgttcacacctcctttactgtatttatatgataacaacttgtatttgtttgtaagtctgtctttcaggaatgtgaggctccagagagcaagagctaggtcttattcatctagcacagtatgtgactcacggtaccactagagaagtgattgttgaataaataagattgtatttgagctaggccttaaataaataggaattacagcaaatctctggatggccttttaaatatgaatgttaacctgttagtgttatacattaacccatcagaaatctctagaattaattatcaaggattagcctttaagatgagctgacaggcaggaccaaagtgagtcaaaatttcattagggaaagctggaggtggatgcatggatgaatgaaaggaccctggagcccaggcaagcagctcaggaaacaggtacagggcttccttaggttagccaggagcacttggtggtatgatggtgagggaagggaatcactttaagagtaaataagagattcaaggatagac

SEQ ID NO: 272188 - DNA, 378 bp, Homo sapiens
agctctgtggaagtgttaacaattagggcttacttcctataatttcagaaatttgtggaagacagcagttccctccctttctcagaacccattaccatcaaaacagctaacgattactgagcatttccaaagtgcccaagtcctgtaactaaccattttatataaattatcttataagagggagggattaattattcctctttagtaggtaagagatcaaggatcagagaagtgtttacccagctggctagaggaatcaataggtttacaacccaagagggtctgactgtattgcctgtgctcttaaccattgcatttgttgcctcccacaaactagtttccatgcttgtaaactagtgggaaaattgcatgctgtat

SEQ ID NO: 272189 - DNA, 1009 bp, Homo sapiens
ctaaatagtgaaatattactaagaaccttcatcccaaggggttgagtggtagaaccactgagaatattgttgctgctcttttggagacaacaaactgcattaataaaagtctgagaacaagaaagttgagttttcaagtaatgtcctttgcatattgctacatagggctcatctgagtctgtgatgttctactttgttgatgaaagaaaacaagtggaaattctgctcccccacacatcctgcactgcaaaaagataacaagtagcaggagatactcaattatgatgcagttcaacaaagaaaacaaattaaaataaagagatcctgggtggttaaatacagagtctcctttgtaaacagcaatggatgatgatgatgactgttaccagggctctgtatgatcattttcccaattctttggagtacttttttcaaaagcactcttgtagaattaactggaaacatagactacccttcactcattacatgggaaatgggattgaattctcttcttggcaatggaaaatacttgatgcatgcaaataagaaaactcttactttttccttctctccttgcagggggagcacgcgtcctaagcttgccaggaagccctgctctcctgccctgggcacctccgttccacttgaccttttccacctgtactccctgcattttggtctcttgctctggtctttagccttcgcattttcctgatgcagcccaaaccagtcacctctctcctagattcattctctgtgctcagaccatctctttcctttagttcctgtgacgaaagaaaatgtatttggccattggaggtataagcaacaaagaatccaacccacacagctttatatatgcaggttctctatatgctcttcttgtgaacagcgtggggagaggaaaatagacttggcaagaggactaagaacagaatcggacagttatctgatggctttcctaaggttcaggaaagaacagtggtccctttgttgggcctttctgttg

SEQ ID NO: 272190 - DNA, 458 bp, Homo sapiens
tttattttagccaaatgcttttatattttcacagcatgctctcctctggctgactttttttttcctttgcactttctggtggttttctagtggtttgggaacttatataaaaagtaaacaatctgggggcaaaaatggccctttctcttcctcctccaaaatatccttttttagcaacttttagactcgaacctcatcactgtctttatgcaggcgggaatggggttacaaattctaggcaacagagaaaaagaagaaacatctatcgggtttagtaggtggtttcaaaaatagcctggagtaaaacacttattaggcagactctaaaaaaaaaaaaaatagaagaccaaacttctgccgcagagttgggggacctatgaatttggataccagggaaatgctttgctgctggttctttatgcctctgaccttgtctcactgagtattactcagggctt

SEQ ID NO: 272191 - DNA, 404 bp, Homo sapiens
agaggccatgctctctatagaaggcaagttttatactaatggaaattgggaagcttaggaatgggcttttgggaataaatgtcgtattggttttatctaaaatcaatgggctgtgtgtgatggctcacacctgtaatcccagcactttgggaggccatcacaggaagaaggtttgagtctaggaatctgagatcagcctggacaacacgcaaaaactgcatctctacagaaaaataaaaaattagcccggtgtggtgatgtgcacttgtagtctcagttactcgggaggccgaggtgggaggattgcttcagcccaggagttctaggctgcattgagctatgattgcgccactacaccccagcctgggtgacagagtgagaccctgtctttaaaaaaaaaaaaa

SEQ ID NO: 272192 - DNA, 421 bp, Homo sapiens
ttttcttctttctaaacgttctatctttttacttcaggccttacgttattggctaatatctcaaatatgttaaacagtagaggttattattgtttttagacttcaaagaaccaacattttggctttctctattgtgtgttatttcactgactttttgtcttttattatttcgttgctcttctttttccagctacttgaaaatagtttaggtaattgactttcagccttgcttcttttctaatgtatgcatgtaaatctataaattttcctccacgcactgcttcagctgcaacacactttttggtatgtcatattattcacttgaaaatatttttaaatttgttttattctttgacccagggactatcaagaaatctattacataatttcagagtagttgcgggtttctctaatcatcttt

SEQ ID NO: 272193 - DNA, 260 bp, Homo sapiens
ttttaaatccttgcagtagcccaataaggtaggtattgttgttatccccattttacaggtaaggaaactgaggcacagagagtaatttgcacaaggcttatggctttttagtggaggagccaagagtcaaattaagagtggttgagtcaggcatggtggcccctgcctatagtcccagctacttgaaagagtgaggtaggaggattgcttgagcccaggagttcaatgctacagagcaagacctcaactctttaaaaaaa

SEQ ID NO: 272194 - DNA, 344 bp, Homo sapiens
ttgtatgtctgtactgatctatactgggtgctgggcaaacgggcattcttaaacactcctagtagggaagaaattggtacaacctttccggaggacaatttaactgatttatttaaagcccgaaaaatgtacatacctttaactcagcagtttcgttactgatttatcttaaggaagtaatttagaatctgtgcctaactgtttacaataactcatagatgaaaaaggcaaaacaaaacacaagtaacctcaaatctccccatgtaacagtttgcttaaacactatagcgttattttacgcaagctacagaagcattgttgaaacatatatttattaggacaga

SEQ ID NO: 272195 - DNA, 780 bp, Homo sapiens
agtgtaaagagccagtaggagtgcaatcaaaacacgtaatcaaagtcactggacaatgaatgtttgtgctgaggaccgagaccagctgtgtcaatgttaactgctggttccaggatactctttcccaggtggatgagggtgaaaacaataaagaatgtcactcattgcttcagggaattcctgaaaaccaattatccaggttctaccctggagagtgttccatatgcacttgagattattatgtattctgctgtgttggatggactgttctatagttgtctattaagtctagttgttttgtaatgtaatttaagtcgtttatatctatgtttatttaccatttctatatgtttttatgtagttactatatttgatgtttttgttttctttattcagagtcacatctttagtatgattttctatctgagaagtgttctttattattttctatagtgtgtgtctgcaggtcatgaatagtgcaagtatatttatggttaaaaccattttattttgccttcccttctgaaagatattttcactgagtaaagaattcagaattgacagttttttttaatttaaagaacatgttttactgatacattataattgtatatgtttatggggtacacgtgctattttgatgcatgaatacagtatgtaaggatcgaattagtgtttaggatatccatcaccttgagcatttgtcatttctatatgttgggaatatttcaaatcttctatgtattttgaaatgtacaataaattatgttaactatgttc

SEQ ID NO: 272196 - DNA, 297 bp, Homo sapiens
gaaaaagaaagctaataggttcttatccatctgctttccaaacaacttaaccgcatgttagataattgtatccttaggttttattagtcttataaggaaacatattataaagcaaaagaacttccttctgggcaccagagcctacaaaaacagaaatctggtatctgctttgaaaaggtcagtttaaccctcttagcattagcaggcttaatgccattgtggttgtctacaatgaaggacagccatgagctctcttcctacattcttaatattcattgaagagaagcctctcaggaa

SEQ ID NO: 272197 - DNA, 446 bp, Homo sapiens
tataatatgattgtatcattttgtacaataatataattatatataataaaattacatcataattataataaaattttattacacattttataggaatatattttcaataatttctacaatctaaaattgattttcagataattggaacacaggtgtttacaagcatgttctttttgagattagccatcagctgtcacttactggaccaattccaggtgaaattacagactttcatttaaattcatccttttggtgcagtggaatgtgatacttttttcaagtgatagttgatattagatttattaatctgccaaaaaatacccttcatttcatggtatacataagaggggactaagcttttggtatttatgagtagaattctttacagtcttctgattcagagctgtatgtccaaaagaaggaaaaaataagaaagaactaagtga

SEQ ID NO: 272198 - DNA, 380 bp, Homo sapiens
cctcctagtattatttacgagacaccttgaaaaaaaacactgctagtctgcttaagaacttaagtgagtatatgcactcaacccatcagctttaagctatgagaacatactttaagatacataatgtttcaggtcacaacaaaatgcaagctacatgctgaaagtctctgggtcatggcgttggtagttgccatagattctgggatcaactttgccatttaccatctgcattttctttttcttccaagactatgtttctcttgcttttgactgaccagttgcataaatacttttggaataagcttctgattaaatacctacatgtaaaactgctaatgtgatttgcaaagccaataaaatacccaagaaatagtcagaac

SEQ ID NO: 272199 - DNA, 213 bp, Homo sapiens
aaccatcggtataaactttctttagtcatgagtaatccctccttattggcttctgcatgataaacacaaatcttttccatgtttattagtaaaccaaaagggaaaataatgtttttaaagaaaccctgaaacgtagataaatgtcaaaagagaattgctctacccagtctctctctcagtaagaaaagtaattgtttatttttttgttactct

SEQ ID NO: 272200 - DNA, 461 bp, Homo sapiens
gaggctgagacagcagaatcgcttgaacctgggaggcagaggttgtactgagccgagatggcaccactgcactccagcctgggtgacaaagtgagactctgtttcaaaagaaaaaaaaagaatgctactaggaaaccaagtaaggtcttcaattacatttaacttcaaaatggagactgaaaagtattgatactgccaatatgattttgagaagattgtttcaccttaactacctcagaacttctaaagctgcttcagttgtattaacttgcattgagcagaccaatgatagtgttaaactactgaggctttggtttctattttctgacaattcagaccagttttctcactactgtggaggcttagggagtgtcacacaatctatagatggaccaggatttttcaaattgagagtgaaaccagcatcaaattggtgggttacaaccagcattaaaaaaaaa

SEQ ID NO: 272201 - DNA, 393 bp, Homo sapiens
accatcatatgtctaatacataatgatgcttcataagttactgagacctccctcgatctctgggatagttggagtaatggctgaatataaactatcagaaaaattgaatctgtaattctgtcaataagtgagaaaatattctaagattctttaaattttaattctggggttttgaacacattgatatgtaaaatataacaaaataaggtggacactgtttaactgcagttggtatcaattcttatgtactgaatttaaggagagagatgttatcaccgtaggaaattataccaactaatgactgcataccattaatatattttctgaagtttgaattttcagttaatgcactttcaatgatattaaagagcactttattaacagctatttgaa

SEQ ID NO: 272202 - DNA, 423 bp, Homo sapiens
ccgccggtagctcctgcctggccctgggaaacatcttcccacttcagccccgagcatccacccgtctgccgcgctggatcaggcctcagcgctgtgttccagcctcattcctcatcctctcgctgaaacgctcccgggatttcagcgcagcccctcaaaacacaacccagaatttcttggttaatggaaggatcaggaaatggatggcctggttaacggagcttagaaactcttcttggaagttttctgcaaacgtattattagtccagcaccttcagtggtggccaacatgagactctatttcaaatccttgaatacagtggatccctgaagaaagggcagaggccctcacagctttgggacaagatgatgaccatgtttgatttgacagaaacagccctgtacattttggacttgcaggga

SEQ ID NO: 272203 - DNA, 437 bp, Homo sapiens
gtacaaatagtacagggtgatctcacactctgaactagtagacacagttgacaggcccagataccagaggaagcagcagataaaatctttctggagagaaggtctcattctgatctttatctgtggttttcaaaccactgcttccttgggtcatgggtgggtcatttgcacccaaccaccatggttcccaaatggcagccacaacaggcctcaccccgggtgcttatagatgaactagcaaactgtgggcactctaggacacccactgtcctcacctgtgcccctccatttctgtgtcactcatattatcctgtctccttagctgcttctgtccctggcccagactccaagggagtgtgcccacaggcatggccaaggggccaggacttggtagatttcacaaaagagcagaatcaaggactgagccagccagaagg

SEQ ID NO: 272204 - DNA, 288 bp, Homo sapiens
gaacatcgtaggacttcggcaaatgtcggtccctttcccccacactccaaaggtgacgttccctgagacatcttagtctgggcaagtgtgttgttgtagcttggggggtggcctggtcccttggcctgtcctgctcagccagcagcccttggctggctcagtatgggaggttcagacacggtctcagttcttgacaagctcctagccagaggaaaggcgatttcattccggtgtgatgagcactagtagaagagatgttagaacggagggactgcacggaccaggtgg

SEQ ID NO: 272205 - DNA, 262 bp, Homo sapiens
ggaggataaggatgggcattcccaggacaaaaaggtttcctaacatgtgaccttgccttccagccacatctgactgaactagagactgctgctcacactggatggccagaatgaatcagatcatgctttgtgtgtatcatagctcaggtgcttatataagcaaaccaattaggtgttcataggatctggaattaagggtaagaatcacggtcaaattgatcacaatggcaggtctaaatcctgaagatgaatgatgaggcag

SEQ ID NO: 272206 - DNA, 539 bp, Homo sapiens
ttttgtaaatgtagaaatccattacagctatattaagactaatattcaaaggaaagaagcaagatacaggggaaatgtgacaagtatgcctaataaaagcttattatatagaacatttttatcacttctctatgttctaagatggtaacagtgagactacaagtaaataatccatagagataaattgttactcgaagaaaactgatagtaagttttcacatgggaaaatgttgtcttaccagcaatccaaaaaatgagaattaaggcaacttgaacacaaaaagtaggctaaaacatatagttagcaatactgtgcatagagacgtttaaacattactggttgctaggcatatcaagcccatttttctataaatcagtcgggatatttaacaaaatgcaaaattgctgtacttttaaattctacctctaaaattttatcacaaagataatccaccccagaatttaaattgtggctaaacaaattataacagtgctattattaacataagaatccaaataaaaagatgcaaaaaaaaaaa

SEQ ID NO: 272207 - DNA, 365 bp, Homo sapiens
gaaaacgaggcagaacaggacgtgattttaaacatttgctgggctgtgccacattcctctggcagttagctcagaggaagctcccttcgctctggggaacggttctgtgtctctttggttcatttctcttgagctcttcggcagtcaaatttgcttttttgaaaacttaagctgggggcgcttgcaagtagtaaatagaggagttggggtgggggggggcgttcattatctaggtttgttaggggcctcacggttttcgggtcggagaatccactgcgtgctcctcctcttcccctggcccggactcccagcttcattgtgtcatcccgcctgggggaaagcacccaccgggatcgtcagcccac

SEQ ID NO: 272208 - DNA, 376 bp, Homo sapiens
tagcaaccaagtggggttagggtgatggtggacactccttctggagtagcagtgcaagtttcctatccaacatgggtccatggacctcacaaagttggtttatggttggactttagaaaggtccataacttcccaatattgtatgcacaatttgttccccatgtggatttctttgaggtgacagtcaaatactttcattagattctcaagggatccaggacctaaagatatttaaaccatggtaatatcaccaatgatacagtgacttacgttgatgccatatgctgaattaactcctttgagaagttttgtcctcatttgagttaagatgggacatggtagataagctagaataaagatacattcatttaagaag

SEQ ID NO: 272209 - DNA, 392 bp, Homo sapiens
aagctgagttccaagagccttagtatgatagtagtaaattgagtagttagaatgaagattgatcatattttcttagccaggagaaccaattagaaggctatttaagatatttagggagggccaggtgcagtagctcatgcctgtaatcccagcactttgggaggctgaggcaggcttatcacttgaggtcaggagttcaagaccctcctggccaatatggtgaaaccccatctctactaaaaattcaaaaagttagccagacagggtggcaggcgcctgtagtcccagctacttgggaagctgaggcacgagaattgcttgaacccaggaggcagaagttacagtgagctgagattgtgccattgcactccagcttggacaacagagtgaga

SEQ ID NO: 272210 - DNA, 497 bp, Homo sapiens
agtggtaggtaagactatatagtggtagtttaaattagattgatagaggccatattttttagtacgttgggtactagacttttcctgttggcacttgaggtgttttgaatcacaagtgatataatgataaatgatccttactatatgttgaatgaattaatttgttagacgttttcatttttgtacaaagtatgaagactctcaggaggcaaagtaattccccaccgtctagtttatccctagactccttactcagctcatctgagtgttcggtttttctataatttctatcattctcaatttaaaaaaaaacaacatcaaggataggtaacgcaggaagtgcattaacaattttgattcttattgactgctctcttttctttctctttccccaactcagaagaaggttacagggccaggaatggttctttttttttttttttttcaagtgtttaacatgttttgaaatatgtatacattgtggaatgggtatattg

SEQ ID NO: 272211 - DNA, 633 bp, Homo sapiens
ctgatatttgacgtttttgttgttccaggcactgtaccggacactttgcatacaaaaactaatctaatcctcaaaacaatcatttagggcactgtcaaccctcttgactagcatgtgaaagttctgtgtttggaaaatagaatttacgtggcagggtcagcccctcacaactgaagttaaaaatatctgacactagctctcccagcctcccttgctattgtggtagagcatacacattccactagtcagatacacatgccccagagtgggaatcagaagcttgtgatatgaaagaggagaggcctttcaaatccatcgcagtgatggtggtggggatatatatccagaatactggataaaagcaactcagctggttttgtagattgtcttaattcttaagcaaattaatagcggtaattacatcagaaggggcagggttcaactatgttgaagagaaagctattttcaaaagtttagtagaatatatttgcatcaaataacttgtctaatgataaaaatagcttagtttaataaactttccagcaatagggaaatactgggtatcagttctaaatgtttccatactttcaaaatcaacacaattttatttcttaataaaattctcaaaatctg

SEQ ID NO: 272212 - DNA, 464 bp, Homo sapiens
gacttgactgaatttttcaatgtagtgctgtctttgcataggtgtatgtctttgcacagatggtgactagtagaatgtggattccgcttctcatcccatcatacttgtttagtttttccgggtgaatatatagccaagttttaaaagcaatgctctgagattcttactccacatcttgttaaatggcgattgtgaaccagtagatctggagtagggtttgagagtctgcatttctaacaaacccaaaggtgatgttatgctctcagcaaggttctagactgctaaatttcctatatagacttagttgttgcgatgtctttattcaaaaagaactgctttgttcttggtcttataattgtaagatattttgttaggtgagtcccatatattttttctcacttaatcttcacaacacccctgcaagactgtaatacatgttcattatggaaaattcagataagcaa

SEQ ID NO: 272213 - DNA, 287 bp, Homo sapiens
aaaaattaggcacggtggtgtatacctgtggttccagttacttggcagcctgaagtaggagatccgcttgagcccaggaggtcgaggctgcggtgagttttgatcacaccactgcactccaacctgggtgacccagcgagaccctgactcaaaaacaaaacaaaaaaaggatggtgggagcggctggaggataccaatggaagagtgatgggaccttgttcacatcccttgggccactgtgcagagaacggattgtagggttaagagccaggtggggataccagtga

SEQ ID NO: 272214 - DNA, 552 bp, Homo sapiens
gcagagcttttctttactgagaggaccccttggttccaccaattcccccaaatccccgtggctcccgatctctcatccagggggactagaagaaaagattttctcagcactagaagaatacttggagcagcaaaggtgcccgtggtgtctttctaccattcaaggggtgtcctcctgaaggcgtctgagagggcctctggcggttccaaggctgtgcagccggggaggaaggtgaggaatatcgtgggtaagaagaggcaccaaaatcacagaatagagaggaaaattattgaggaaatgtacttgcctgtgagggtgaagctggcatttcgaggtagaaggggactagccttttttgatatctaatagtttagcattatacgtaatggactcactttagcactttcatgggaggaaaaaccaatctgagctctataaatgtggctcttggcttctcactgtgcatgcttttatgtagaaccagagtccatccttagatatttattcagcttgctggcactgaagcaacaataaaaagatgcctctaacaaa

SEQ ID NO: 272215 - DNA, 761 bp, Homo sapiens
atgggttttaagctccatacagtaaaacctagcatatgaaaacagttctggctgatgggttggtagaagtgatagatatagatacatacatacacatatatgcacagtaatagatataggtaaagaccttgatatatgtacatatattgtatgatacatatccatgcatatacgtgggtgtacacacacaggtacacacaaatatatatgtgcctttggacaagaaaaaatccccaggacagtctcatttggcttttaaaatgctgcagttgaataggaccgtagaggtggcctaaggcagccttccattcagggcacgcagatttggttcctcagctcccttcttctctatttctgagtcacgtgggctgcacctatctgtcagaagcccactgcccacccagagcccctgactctgaatggtggcccagtgctttctgaagacagaggtgggacctggtgctggagacaatccattcctttcacaaagactgtaagccttacccaagcattaattttgctgcataggcggcctgttctcccacaaagcactgagtaagaagaaaaggggcccggataaaccagcagggcctggcagacaacttctggctcccttgccatttaaggtcccgaggaatgtggagacattggtgggggccagggtgggtttggaaggacggattttttcctctttgtctctatctctctttctctctgtctttttctctttctctcatagttaatgctatgattttgtaaaa

SEQ ID NO: 272216 - DNA, 445 bp, Homo sapiens
ttttaaacattctctgttagcaatcacttttaaaagactagaaaatcatttttggttttccaaaccacctccacccagtgagtcagttagtaaaagggctgggtctcaccgtttctcattgatggcatgaagcccaggaacccaagaggcagctgttgcaaatttatgggggaaaaaatacacgaaacaggaagggtgactgaagatacgcgcaacagcgaatacaattttgcaaaaccggcttctaggtatggtaggatcatttaaatccgtcagtgatgtggagaaagaacatggaggcatggctagtcctctgcacggacaggtaggtagccaaccaccagtgaggactgaaagacagtcctcactgaaaaggactgaaagtttgcagtggccaaaattatctcttttacctattcagtgcttgaaactctttccttgcctg

SEQ ID NO: 272217 - DNA, 429 bp, Homo sapiens
aaaagtaatgatccaggaaaaggaaaagaatgatccaggctttgtgtcccatctggcttgtagagcgatcatatgacagctagttaagagtgactcccctaacgtcagttcaaacttttaggcatagaaaagttatttagaagtggacttaaagatccttggattttatggctgggcatgatggctcacacctgtaatcccagcactttgggaggccgaggtgggtggctcccttgaggccaggagttgagaccagcctagccaacatggtgaaaacccatctctactaaaaatacaaaaattagctgggttggtggtgcacacctatagtcccagctacttgggaggctaacgctgaggcacaagaatcacttgaacctgggaggtggagattacagtgagccaagattgcgctgctgcactccaacc

SEQ ID NO: 272218 - DNA, 408 bp, Homo sapiens
cgacagcagcctctcgcatggctgggttttcctttacttgttttatttctgtcattcatccattgtctccgcagccatctagcaaaaaccgaaatggttattccaggctgggcatggcccctcggaggctcccaagccccacgcggcgcgcggccgggtctcctcgcgtgtcctgggggcttcgtcctgcacggccctcctttcaggcgtttcctgggtctccagtccgccccgcgttgatactggattatctgcattttaaaaacccacctaactttttcctgtggccaattacgctgtcatcctatattcgagcttcatttgttaaatgaagacgtgagtgaatggagagaaaggaaataccccaaacaattccaaaaagggttgaagaaatctgtaagtacgcaa

SEQ ID NO: 272219 - DNA, 450 bp, Homo sapiens
aaacataatagttttattatttgttactgaaaaatattttctgatttctgggtgggaagttatcttttaatgttttcacatttggactatctcaaatacagcaaagatgtataattttttttttcagagatagaatcttgctttgttgctcaggctggagtatagtggtacaattatggctcactctaacctccaactactgagctcaagggatcctttccactcagcctctcgagtagctgggactataggtatgcaccactacaaatagctaatttttctttaatttttttatagagacaaggtctcactatgttgcccatgctggtgttgaattcctcaagtgatcctcccgccttggccttctgaagtgtttagattacaggggtgagccaccgtgcctggccccaaaatatttaaaaataaaaatgttcttgaaaaaaatcttaa

SEQ ID NO: 272220 - DNA, 359 bp, Homo sapiens
ccacctgctgactctacagaacagccttctaagtctttaaatagaatggtctctccatccttacaacaaagtactgaaagtaacttgtgtacacttccactctgcctgctggtttgcattaacagctttaaccatcagagccactgatgtaagagtttcgttaactctagcatacacttgtaagaaagaagactcagaggctgggtgcggcggctcacgcctgtaatcccagcactttgggaggccgaggcaggcagatcacttgaggtcaggagttcgagaccagcctgaccaatatggtgaaaccccatctctactaaaaataaaaaaattagttgggcagggtggcgggggcctgt

SEQ ID NO: 272221 - DNA, 262 bp, Homo sapiens
tcaggattgctttgaatgcagcccaacacaaattcacaaactttcttaaaacattatgagtttttttgtgatttttttttttagtagctcataagctatggttagtggtagtgtattttatgtgtgtgtcccaagacaattcttcttccagtgtggcacagggaagccaaaagattgtacacccatgaattagaaagaacaagcatcaggaactgattaaatcattatacaacataggtatgcattaaaacacagcataaaa

SEQ ID NO: 272222 - DNA, 447 bp, Homo sapiens
gaaactgaagaagacacaaataaattaaaacatattctgtgtgttcatgttctggaagaattaatactgttaaaagatctatactacccaaagtgatctacagatttaatgcaattcatgtgaaaatctcaatgtcacttttcgtagctgtagaaaaagcaaatttggcagggtgtggtggttcatgactgtgatctcagcattttgggaggccaaggcaggcagatcacttgatgtcaggagttcaaaatcagcctgggcaatatggtaaaaccccatctccactaaaaatacaaaaattagctgggcatggtggcacgagagtaatcccagctactctagaggctgaggcaggagaattgcttgaacccaggaggtggaggttgcagtgagctgagatcatgccactgcactccagcctgggcaacagagtggagactctgtctc

SEQ ID NO: 272223 - DNA, 213 bp, Homo sapiens
gtgttttgattttatattcacccatgattgtttcttcagagtcaggagcacatcgtatatttttggcaagaatatggcattggccatgatatgtccttggtgtgtcctatcaggacacatactgccagtgtgtcctggtgtgggtgatgctaaatttgacgaactgcttacatttctccattttaaaggcagatatttcccctctgtaattag

SEQ ID NO: 272224 - DNA, 411 bp, Homo sapiens
tcttttgctctccttggggagaaccttggggctgttttgggaccatcagtggccatgagttttccattgcttaagttctctctgaccatctctcttgctcctgtcttcgttcgttgaaccctgatgtgaaccatctgacccttcctagtccccaattcttgcctagtttttgttgactctgactgacttgtacagtttctagttctctgcctataaatataaggtgacctaatccttcgatgctctggccagccctgagtggagtttgtcttcatgtgaatacagacatcttttgccttggtagttctggcttctgctgaatgttttctccctccaggcactcgctttgttgttctgtaggcacacagtttcaagcctgggatggcttggagtgttacagatgcatcagga

SEQ ID NO: 272225 - DNA, 413 bp, Homo sapiens
cctgctttctgattatagaaggtgacttcttgctgtgcccacacatggtgaaagggactaccaactctctggagtctcttttatgagggcactaattccaattatgaagcctcttccctcatgacctaatcactgcccaaaggccccatgttctaatgccatcatcttggtggtttaggatttcaacatatgaattttggaaggacataagcattcaaccccctgcacatgtcttctttcctacttcctcaaggttctttctgtccagttgctccttcttctattgacccttttttgccttctctttctccttcactgcctcaagttacagccagaggaaaggaggaactaaaacttagcaaatctataatcacatgcaaatacacagaatggattgttacaaccaaaatgca

SEQ ID NO: 272226 - DNA, 364 bp, Homo sapiens
aatcattggtttcatgtcagtttttaactacctgatattctaagcaattttttaaattcaaagtcaacattctgtgaaattattcattttgagaatcaaaagtcatcccttgtcagacgcttggtttctcgggaaacggaatgttcaagttctttgattttgccatctttaatttcctaaagtggagcagatgttctctggatataatagatatgtgtctaagtgaatctttcctttctaaatataaacttccagaagtatttgtctttatgaacaaaaataattttgccataattgtttttcataagtatgaggatgaagctttgtcaacaaagagaaatttgattaaagatttaaagtgtta

SEQ ID NO: 272227 - DNA, 386 bp, Homo sapiens
gctacgacacaggcaaatgcactgtcattcccgtcccgtggcctggagaggtaccaacctcctctaagacttcaatctctttagagaggcctgggccacaggtgattcttattattgcatggcagaagggagcaacctgctgagctacaccagaccctggctggtatccacccaccctgttatcagtcacagaagcaaatttgcatttcctcactggaaagaagttgagagcccaggctctggacgaaggactgagcatgcatccgagctccacccacacccaatttacaaacttgagcaccttaatccatctctctaagcctcagtttccccctctgtaaaatgaggcaataatggcacctgcatggacttcctgtggttattgt

SEQ ID NO: 272228 - DNA, 441 bp, Homo sapiens
tacagctttgtgtgggtttcagtgggatagagccgctttgtaggttgggcattgtctatgatagcatattacattttgagtaacaacacttgcttttgaatttttaaaaattatcacaccactaaagagaaaagtataatttaattttaaattaatttttctctaggaagagacattaaatataaaggaataagattttgacaggtaaggttaagttagatttagaggaccagatttagatttttttcctccaagaacgagtgtttgcccccattgagcatatatactatagcagactctgctttttgtatttaaaattttccgaaatcagtttggaagtggaatggctgcttcaaaaattttgactgtaagaatagattgggaaatagtgtggtggttgtgcagtgctgggcatgtaattggcgccactgattgtacact

SEQ ID NO: 272229 - DNA, 603 bp, Homo sapiens
cttgcttttgcccttgacttatgtgctcttgagcattgtacgtccttgggctaatcgcttgccttcagatcttctgcgctaggttgaggggcttggaggagatgggcctcttggctctctgacactgaatccttcctctcaggcccagtagtctttgcggcctgttgggtctgcaagtctagaaacagcaactccatgccacgggaacgtttctgcttccattgttactcaccggccttacacggatgaccatgcgctgtacagggaatgccagggctggccaagctggctccagcagagcacaaaatagagcttgctcctgctgaggtgaggtccgttcctggaattagatgctctctgcatctaggtctatcaggaaggtgagctggcaaaagatccctaaagcctttaaacatcacttaaataggtgtgtgtgcaaaattgtcttccattaacaaatatgtcaaaacacaagcctaatgttttctttggacagtttccaaacactgagcttctttctgaactgttactggccggattattgggactattcccaggtgtttatttcacatcctcctctttttgcaagtgacatttaaaata

SEQ ID NO: 272230 - DNA, 2448 bp, Homo sapiens
  misc_feature (1373)..(1373): n is a, c, g, or t
  misc_feature (1583)..(1583): n is a, c, g, or t
  misc_feature (1775)..(1775): n is a, c, g, or t
catcaccaccaccaccaccacaaccacctgcagatagatgctcaagtgattctagaagagatctcaaggactggcgctctgctccagttatgtaacccatgggcttccctttgcacagctcctcatgtgctcatctccatgctgatcaaaccaccccacctcattccttgccttctgcaaggggaagtgcctcaggctggagtttgtcctgtctacagactgaatatgcattttgcccagtggctggagatgtgctggtggtggaatgtgctggtgattgtttctggatggagagccacagccccccagtgttctgccatgactgactcctgaccttggcaaattgcctcctctctcccagcctcctccataacaggtggcgatgagtcccatttcctccctacctcacaggaaggcacgcattataaagggcacacttatcagatgtgcccagatgtggctggaacttttggagacagatacttggttcacaaccgcaaaggtgggctttcaccagagaagaaaatctctgggctgctgagttcagtgggctccttgcaggctggtccaggaagtctggtgttcctcctgaaggtggctgctatgtccagcaggtgatcaagctgacagtaccacaagaaccaagaaacagaatctgttcccaaggaatgaatgttctatctctctgacccaaaagcaagagcaagagagagctgtcaccatcatcaccctgctcccaacacaaacacagccccccaagtccatattgctgacaagggtatctgccttgtcagggtgaatcctctggacccccaggccatccctggagtggtcagtgcccactgtgccggggttattgtggccagtccgcctgggttcgcttctctaaatttccatgggataggaactatagatcatgaagaagaaacaggaaccttgactcttcacggaggagcccaggaggtcagaaccatccaccaggagggtgagcggtagctgcccagggcatccctggaggaagtcgtcatactgaggaagaaattgccaaagccaagagctcccagacctgggcagctcaggagctgacagaaaccaccccccaagtctggagttcaagggttttcctcgtgggctgctggtctgtctctttcccttctggggcagccgtctctcctccttcagctcattcccgtgttccatctgaggggcgggaggaaggcaggagggggagatggcaggacccagacagatcctcaggactctcccagcctctgttgccatggcaacactgctatttttatcccgttgttcatgatgctcaaagctctaactttctctgttccagagaggccaggctggtttctgccctcatnctttaacacagcatcttctcccagaggcctgaggatgggaaaaagtgatggagaaaaggggaacccctaaggtcacccctcagccagggggaactgtttaacaggggtttgtctctgcccttttgagcctttggttttctacctggctcaggcacccaggtttatgttttctagatcaaaactctgcatggtctccctgagagactgganaagagctgccaatcaggatggattttttcctacacaggtatgacactgcagccacttcccttcttgggaaaattaaacttcattctgaagaatgtcctgttggtggtataagccaacccctgccctcctaaaaggggatagataattaaatttggttaattagcaatcagattcactggggaattgaaaccngtacttccctttcttctgtccctccaccaaagaaccggaacaaatggcttcatgtctttgtccagtctttctgcctaaagcaaaatagcatatattctccaggctgaaaagtagattcctcctcacccctactcaagacggccacatttcaatccaggctcttgaagacagggtctaatgaaaggatttctgttctttctctgtctgttccctctggcccagcttctagtcctctccttatgtccccacctccatggcagtggcaagagacccctgagagtcaatggtgctaacgttccccacctatatacccctatgtagtttatcgagatttgaacccagcacctgggtggctgtgttgggcggatacatttcacgtcctcaagaccacaaccctggcgacaggtctggattaattctgtaaagtagcaatctatatcatgctaaattcctgcactgaggttctacctcggctgaactgactcgtggatggttaagtttcctggggtggctggaacccatttactaagcctctaattggtttcattttggctcaagttgcatggtttcccgaatctatgcacctggagtaagcacttttctggttgccactgaaaagcatgccggcaaacgctgctctgttaattgctgtaataaacagactttattataa

SEQ ID NO: 272231 - DNA, 284 bp, Homo sapiens
attttaaagaaaatattcaatttaaatagatttaatcatgtcatattttattaattatagctctgccttctgaattgcctttggttgctattacttctaccatagctaattctcctgtgttaaattttgcagatctagatttcatcaaagtttttgtatcactctggtcactaaaaagttttgtgtgatgtgttagccatggtcaattttcgtttatggtatttctaccggtaatatacattatgaactggacaaaagccctatttatttacaaatgtacagtt

SEQ ID NO: 272232 - DNA, 388 bp, Homo sapiens
gagattttatccaaaaaaaaaaaaaaagaaaacctaagaaaatacttaactcacatcaaagccaaactctggaggcctcagatcattttcatttgtcagaatcctccctcctgccaaaccagactcattttgattcctcattttcctttcatacttaacatctcccttcagttaatccattttatttagataaattaataccactgactaggttatactacaatcaagcagagctttttgtactggggtggagaatttcaaattaatcatgtctaaaaacccttttgaatataattaagcttatgaactataagttcatttttccattatattcaagtgttttagaggcactctatcaatatctttatatatacaacctatgagtttt

SEQ ID NO: 272233 - DNA, 235 bp, Homo sapiens
ccaccttgtctaccttagacaagctactgagtctctgaggtttagtttcctcctctctaagatcagtatggcatcgctgactccccacagcactgtgatgagtattaaatatgacttaattcatgtgaagtgataacacagtctctcatgcacagcaagaaccccttcccgggcaatagcttagaacaatggttctcattcccgacttggcatcagagtcaccagtggaatttaa

SEQ ID NO: 272234 - DNA, 300 bp, Homo sapiens
aaagtagaaagacttcaaataaaaaacctaatgatgtacctcacaaaactagaaagcaaaaacaagccaaaccaaaattagtagaaggaaagaaataataaaaatcagagcagaaataaatgaaattgagaccaaaaatgcaaaagatcaacaaaacaaaaaagttgtttttttaaaaaaacaaaattggcaaacaatttaccagattcagaaaaagagaaaagacccaaataaataaaatcagagaccaaaaggagatttaaaagtgatgccacagaattacaaaagattatcacaaat

SEQ ID NO: 272235 - DNA, 295 bp, Homo sapiens
tggggagagtttccaggctgtggtgtggcacggactctggaagaccctcagagttgagaagatggaactgacagtctggagaaagaggtggctgaatttcatgaagccattctccatggctgcacgaggagggagcacgcatgccaacagccatgcaggccggactgtggtgccatcattactccactgagacatggttcacaggagtactggcgcagtacagaaacaaaaagcaaagattgaaagtaaagtaatttaaatgaattatttaataaacagtaattcccctttatgc

SEQ ID NO: 272236 - DNA, 526 bp, Homo sapiens
aggaatagaaaggaacttctttatcacaataaaaggcatttatgaaaacttacatctaacatcatacttaatgcagaaagactgatgctcttcctctaagatcaggaacaagacaagagagcctttcctcatcacttccctttaacattgttctggttctggtcttagctgtgcattaaggctagaaaaagaaatacaaggtgtacatatcaaaaagcagtaagtaaaattgtccatattcacaggcaggattatccacatagaaaatcgaagagtgattttatcaaggtcccagaattcatgttcaacatataaaaatcgtttctcgttctgtatactggcaataaaaattggaaactgaaattttaaaaatacgatttgaaatagcatccaaaatcatgaactaatttagaataaagtcaacaaaaaatatgtactgaaaactacaaagcattgtttagaataagtaaagcaaatttaaataaacaacagatagattatgttcatgaatcagaagagtcaatat

SEQ ID NO: 272237 - DNA, 319 bp, Homo sapiens
ttttttctttttaaattttaaggatgaactttgctcttttagtccatttgtctgcaggcatttgcagacatgttctaaacacacccacacttgtaaaatgtacgtacttaaaatcagccttggctttgagagaacagtataaagattttggatgatagatgggctgactgctatattcttcccggtacctggtggaattttaaagccagaggaagccttatatgttaatcaaactttttgtaactagagatagtcaggaacactattggctaaaggactcaacgtgaataagacatgagatgggtttaggttcattttc

SEQ ID NO: 272238 - DNA, 96 bp, Homo sapiens
aagccctttgctcctgtgcttgtcttctgtttgctacatccatttccccctctcttcctaattattcacatcagcatagaacacctcccattttag

SEQ ID NO: 272239 - DNA, 425 bp, Homo sapiens
cacaatgaagactcggaagtgtgggaggcagaggggttgaatagagggatattaattaataaacatagtgtttgttatttgaaaaaaaaaagaaatagatttaccaattaactgaacttagaggtaggaacaaaaggctctttctgaagtcatggagtcaaacaggataggcaagtgaactcaaagccactgacctctgtctacagggaagccacaggtctaagggccagcctagattcccttcagacaatacctttgaatctgctgtgacaggcgagccagcgggtaatcaatacctcaaagccacatgccatggaatgtggctgcaaaatgtttggctggaaaaatactccaagagactgtaaccaaacacctaccttaggtattaaaaaacatcaataaagcaaccattgaatgcctaactt

SEQ ID NO: 272240 - DNA, 387 bp, Homo sapiens
gttgttggccaagctttgctggcttttttgcagctttctgttcccgcaagttactcccccaaatcctacctattttaaaagcaactctcacaggaagaaaggcttggtagccaacagatgaccaccacattctctcccccaagacgtctgatttcagaagaaattcaagaatgaatatttactgcctatatctgacagaagaatcccatttctcatgagaaaatcaatggataatactcagcgtttcttcaaaaccaaaacttcctttatcaaaacctgtagaacacaggtttcagcaaacttcgtaaaatattcagatcaaatttgggtttgttattgattttcagggggattaatctcttttatattaaaagctcatttggtcac

SEQ ID NO: 272241 - DNA, 469 bp, Homo sapiens
tcaagatccaagtattcatttgtctctaggccatggaaagggctgtgtttcaataccttgtgataaagtcagtatggcacaagtgtgcagaaaatgataaattacttaatcggggttttatgggcatttacatttatgatatgttaagcaatatttagaatttctcaaaagataaaacaaagtcttatatgagtaggaatgctttctaagcatgactgttcagttaactacttgtagtcttcaactggcgaaatctgttcatgcctatctccacagtagcagtagttacaagtcatgatggctgctaatagctgttgaagccttcccacctgccaggtgctcccagtgcgctgcatcccttattctcacaagaagctccttagttaagcaccaatattaactctgttttacagacaaagaaactgaaacctagtgagttgaaataacacagagtcaaataatagctaaa

SEQ ID NO: 272242 - DNA, 1017 bp, Homo sapiens
gccattctcctgcctcagcctcccaagtagctgggactacaggcgcccgccactacgcccggctaattttttgtatttttagtagagacggggtttcaccgttttagtcaggatggtctcgatctcctgacctcgtgatccgcctgcctcggcctcccaaagtgctgggattacaggcgtgagccaccgcgcccggcgtaaatcaggttttttaaatgtttgccaaaccttatcactgacttttataacaaaattatttactataatcattagggaatatttaagttctgctaatacttaaaattgcagagtgctaaaaccagcagtgagtttagaatcaagctaagctttattgttgctactatttgaggcatattagttgactggtgttcatatgcaaggcagtctactgggtgcaacaagggttagaaggatatttttaaaaaactgaccctattctcaggatgaaaataatacactagtaatagtctgctctgttggttaactcctcgtaaggaggtacaattaaaatgctgtagtgttgcaagggaaggagaggaagaatcatattccttcactagcaggatcaagaaagcttttatagaaatatacaaaatcttcacttcttgaaggattggtaaaatttaatagccaacattgggcacttattcattctctgagtaaatatttattgcatgcttatcttgtatcaagcattgtgatgaaagcacaagaatgaaagaggagggagaatgtttagagaataagggctgaaacacagattttgtagggagcgtaggggagactgagaagacaggttcaggttagtaagggcgctcatattttgacactgaatgttaactatgtgcacatcatgctagctattctaaatcaggcattttcaaatggaagcaggcactgacatttttgagcaaagacgtgatgttatgagataaatatcttaggggacttttttatatttttatagcaggatatctatcctatggattgaaaaaa

SEQ ID NO: 272243 - DNA, 646 bp, Homo sapiens
tttttccttttttcaatccataggatagatatcctgctataaaaatataaaaaagtcccctaagatatttatctcataacatcacgtctttgctcaaaaatgtcagtgcctgcttccatttgaaaatgcctaatttagaatagctagcatgatgtgcacatagttaacattcagtgtcaaaatatgagcgcccttacttaccttcactagcaggatcaagaaagcttttatagaaatatacaaaatcttcacttcttgaaggattggtaaaatttaatagccaacattgggcacttattcattctctgagtaaatatttattgcatgcttatcttgtatcaagcattgtgatgaaagcacaagaatgaaagaggagggagaatgtttagagaataagggctgaaacacagattttgtagggagcgtaggggagactgagaagacaggttcaggttagtaagggcgctcatattttgacactgaatgttaactatgtgcacatcatgctagctattctaaatcaggcattttcaaatggaagcaggcactgacatttttgagcaaagacgtgatgttatgagataaatatcttaggggacttttttatatttttatagcaggatatctatcctatggattgaaaaaa

SEQ ID NO: 272244 - DNA, 128 bp, Homo sapiens
taaatgttcataggagctttatttgtaataacccaaaactgaaaacaatctagatgttcttcagtaagtgagttgccaaaaacagttaaacaaattttagtacttgcgtatcatgtaatactctcagt

SEQ ID NO: 272245 - DNA, 457 bp, Homo sapiens
aaaatcagtaaattaatatgggtgtgtttgtgtgtgtgcacgtgtgtgttcactccttgctgatttatagcccccattagaagatgtaacatgctcatatcaacccatccatatgtgagtgtggcagattattagaataaatgatacgtgactgtctggggataattttcctctcctgatctcttttatgctattcctaactacagtatctgttctaggaaaaaaaatgatgattttcagtcacttcttcgcaatcacagctctcttaatggactttagatgatgtctcctcttttatacttgtatgctatgaaagtgatacacaatagcactttgatgtatttaaactttataagggatattatattaaattctgtatgattgcattttgttcaatactatatttgtgagattcatacacattcaaagcaattaaaatgaacaaaatagagctatc

SEQ ID NO: 272246 - DNA, 449 bp, Homo sapiens
gacaccgtttaaaccgcattatccattagttatgaaatgtgctgtccggtgtaggttgcttctcaaagggtcatctgtaagctggttatctagaattcagcatatttttaaccattcatttaataaatgttggtgacctattgggtattataaaagaagacaaagataagtagtattttgaaatccaggagggacagaagttgattttatagaagtttcaaagagctgtgaaatttatatatggtgattaggaattcaaggcagctttttttcaaaaaaaaagaaaattttgcttcctctaatggccaagtaacaaatttttgttgcttgtctttcactgcttctgagcggatgcttcggtattgtcacggtggctcctgagtcaacctgagcctcatgagtggggtactgttgcagcttgtaccccagagactgcctatgcattcata

SEQ ID NO: 272247 - DNA, 398 bp, Homo sapiens
ggccagcccagaccttgacttcaccagctaccataccataaaccctggtgccctgggaggtagggcctgggtgggggcagtctcattatagaaggtgagtccctggccaggagcagtggctcatgcttgtaatcccagcactttgggtggccgaggcaggtagatcatttgaggtcctgacctcaatggtttgagaccagcctggccaacatgatgaaaccctgtttctactaaaaacacaaaaattagctgggcgtggtggcgtgcacctgtaatctcagctactcgggggtgctgaggcaggaggatagcttgaacctgggaggcagaggttgcagggagccaagactgtgttaccgcactccagcctgggtgacagagcaagattccatctcaga

SEQ ID NO: 272248 - DNA, 439 bp, Homo sapiens
gtatggctagtaattgtatgtgatggtccacaaatgggaggaaaatgccttttacctgtggggtgaggctgtagagtgtagtgtatctataggtcacttagctgttaatatgaagtggccagttacatagcccaggggtgcttctctccgtaaaatagctgctgctccagcccattacattaggctgtggcttctggggtgttcttatggggacaaggtttgacaagcgatgctggggttcactattagaaaggtttggcaattcttttgctccttgtaacactcggggctcattttctcctgtcttcttagtaagttgttgcagaattgattaagtaaaagaggccagccacataatgtactgaaagaaatgtcatactagccccacattccttttatgtgaagcccttttaaaaatgaacacaacccactctttaaa

SEQ ID NO: 272249 - DNA, 336 bp, Homo sapiens
cccataattcttcgggcctctctcaagccttcgagtggatgctgtttcatatttcatccagcctgggagttggagacctgagctgcattacctaagccactgttagcagaagccaataataataataataataatgataattcttttttgtttaacttatcttttatatcttctcttattactgctctatatattccggaagatttctccaattatattttccatatcccctacttgttcttcaccgttacctactgtaatattataacttgaagaaattttttaaaacaacaaatagagacaggatctcgcgcttttgcccaggctggagtgcaa

SEQ ID NO: 272250 - DNA, 402 bp, Homo sapiens
aagaaatgaaaaaattggccttatatcccagcatgtcaccaatctgcagagtgaagagaacagctgtgaccttcagatggggaagagacaatctccagagtgaacagatgccaccagaacaaggcattcatttatgttactcatctggatcctgtgggcacttgagtttgccatctgtgatctaaaatagcactgtccagtggaaatataacgaaaaaagaaaataagaggaaaacagccggaagtgagacggtagatggcgaaagaacagagaagaaagttgactggaacggttgaaattaaattcaaatttctgagaaattcttcaacttaaaattgcaaggaaagcaaaagagatggaggatctgtagattaaaagcgtctccagagatgtaacaatca

SEQ ID NO: 272251 - DNA, 478 bp, Homo sapiens
aatcaggccttctttttttcagactgccaattgttaaacatttacctgcacatactgggctcatcttcattattggtaaaatgagctagatgctattttccattagctcacactccaattccaatcgacctgaccatcagaagagacaaaaagggaaaatcctggccagttctcccctacctgatcaaccagtagcataatcagatttgcaagacctcaagaaaagaaacctgaaaatgccactggaggtgtgtgttttgccaaagaaaaaagaatcaaaaacaaaacctgcaggatgaggacaaacaaacaaagagcaggggctcagccatgaaccttgtgatggatgaggaaaagatattctttttctccccttacagtttctggcagccaacatggggtggctgtgacaccccactagttccagaacctgcagatgagatcctgggacaaccaataaaaaaacaacaaaaagtta

SEQ ID NO: 272252 - DNA, 392 bp, Homo sapiens
tgaaaggaatctgaacaaataggcctcgctgagttccccagattattactattagatcacactcttttgtcctccaattacacttctgcacaactgtccctaaacacacatggttttccctgggtccttggggcttcgttttctgaaggtttctgtgtcactgaaaacttacattaaatataacttttatacttttcccatttaatcttttttttttctttttatttgttataggggctcagccatgaaccttgtgatggatgaggaaaagatattctttttctccccttacagtttctggcagccaacatggggtggctgtgacaccccactagttccagaacctgcagatgagatcctgggacaaccaataaaaaaacaacaaaaagtta

SEQ ID NO: 272253 - DNA, 445 bp, Homo sapiens
ctgtccctgcaccttgattctctcacagtcccaaatagaacagtgctgccatgtaggacaggaacattcattcagctgaggccagtttgggagaccacaagccagatctgagaagtccccagataggcatgggtcttgctctctctgtcagttgagtagcttcaaaacttctgttgggccaggtggctcatgcctctatttccaacactttgggaggccaaggcaggaggatcacttgaagccaggagttccagaccagcgtgggcaacatagtgaggacccatctcaacaaaaaaattagccgagcgtaatgatgtgcacctgtagttccagctactcgggacgctaaaataggatctcttgattgagcacaggagtttgagtgagctatgatcacagctctgcactccagcctgggcaacagagcaagatcttgtctctaaaa

SEQ ID NO: 272254 - DNA, 340 bp, Homo sapiens
agaggagaatgttaagccaaaagcccatttcacttggctctgtacagacagtaagttaatttccaggatgtataactcctgattttctgtgatgacagagaaaatactgacctgatttgggtaactctgaggtttggagatcttgaatagcctcatgttcctgaacttctttaccatacatgaattacttcttaggaagaaacatttattctgtagaatttggtttcgcattttatttttattttcttagacactggtagttggaaattcaggaagaatttgactacaaaaaacatttattaaaaagagtttctaatctcacctgctaagtgctacaagg

SEQ ID NO: 272255 - DNA, 485 bp, Homo sapiens
caggggtaactttgatcagccaacaagggtcagtcctatgcttatcccttgaccaatctctgtgcccagagggcagggtactctgattggcaataccttcatcgtgggccaaccactgtggggaagggggagggattagaaaagacagccacacccaaatctcatgaagcagtcccctttattttaaaaaagtccctgtgagagcaacaggagcaaagcatggagaagaagcaatcttggagaagctggaagagaaccgacccaaagaatccaagagactaagactgtgcagggttggggaacggaagctcacacaggaggcctggacagagctgcagcagagccaggagagaagccaagtggcacagctcatcttgaagtaattataatgccactaaaattctcatttgtattaattttttttaattactggcaagataaggcaaatgtttttaaaggcctaaataaaatgatattccctgaag

SEQ ID NO: 272256 - DNA, 1422 bp, Homo sapiens
gtgaacttttctgtgaagaaaaccaattgtgacagtaggggtaaaggaaaatcaactccaaatggaatcatgttttattcaggatttgtgctgccggtggggaaggccagacccagcgacaggatgggaaagtgggacaccccaacttcaagctttgtgcgttctgccacgaagttctatgcgcttcactgagctcagctcctggggacctctaatggcccttgatagcaaacatagttaaaaattaacagactgacagaattaaatatggatgacaagcaaccactgtggacttaatctgacacagggtgttacatgcttgggtgcttttaacccaagtggcatctcaagtgaacttctgagatgtctgggcacatttcacatgcctgtttggaagcagggcttagcttgtgcttaggacagacaggaaaagagtctaagagcccaggagagaaaattctccctggaggcttttgtttcattaaacccagctttgatcaggcttaccaggatgtactcacagtcctaggaccttgtccttgtggtctagaccttgtccctgcctgggctcggacctcagtagcacctgccatcgtgactggaagatccggcaagagcacaaggccagcggggagcatggcctcctccagctaggactttcttgctcacctcttttccagctgttggggcaggtgagatggcagccttaaccaaggaccaagtcatacaaatcttgacattctgcctagatcatagcgacttaattgccctaggcaaggactattaggtgccagacaggtagtgaagaatgctgatggcgttttcatgcctgagtctgctgagaaagagtataggctgccgattctggggggcagggagaagaggagtggttcctttacaagagggcctcatttcatgcagcagcgaaattcccaaaaagtgttcttccagttttggtgagtgcttttttagaaatggaggtgagggttgctgtttaaaagaatcttgcaatcagcgctgtaaggaagacaatctttttgtattgcacatcatccctccagcctattcgatgagtttggagtttcttggaccagattatgctgggcttggcagcctctcttcagcctggcagtctctgacagagcttgctgtaatggcctaacgtgctttatttggtgatgccacccaaaagtggatcctgaggtctggagcgagtagggcagagctgatggtaggtagtcactgtgtgagtggttccctgcagttgctcagtgttgggaacgagccccacagcgaacttcagcgctccattctagggagagtcatggaaacctgcctgagaatatccatgccttcaaaacattaacccattagtttgagataacattcttgtcatttacataaaacaacttgttcaagcta

SEQ ID NO: 272257 - DNA, 97 bp, Homo sapiens
agtcaccttaaccatctctttcttcataaagcttgcctggctctccaaatgtaggttaattgctctaccgtgttggttactgctgtagagctgtgtt

SEQ ID NO: 272258 - DNA, 435 bp, Homo sapiens
cttctaccatgtgacgacgacagctagaaggtgctatctataaactggagagtgggccctcaagaatctgctggcaccctgaccttggactttccatcccctagaactgagaaataaatttctagttttataagccacccagtttatggtatttgttaaagtagcccaaatggactaagacatgtgctagtggatatagtttccaaagtgggcaactggtggtgcacatttgtggaacattgaggaatatcatggtacagtgatgcagtggcccctcaggaagctaatttctatttttagacatgtgggcataaaaatatgataggagttctgaaataaccaggaattcagatttcttatggtgagctatttcttccgtgatctttccctatacccatatgtcaaatcatgctaagggtgaggaaagaatgatga

SEQ ID NO: 272259 - DNA, 187 bp, Homo sapiens
tagtgattacagtgtttaagtaacggaggatattcctggataggaaacattacatagaaaacaagttgtgtccatttagcacctgagatacagcattcgctaattttagaaatcacaaaataattcagtctattgtcatatacaaatctgaatttatgaaatttgataggtgtcttataccatcttg

SEQ ID NO: 272260 - DNA, 145 bp, Homo sapiens
gtggggcacagaagacaagctttggaggacatctcataaatcttctaattcaattgcacttaaacaagaatcctctctacatcatatctagataaataattactcagtttttgaagacaggctctctgtggactgcttgaagtaa

SEQ ID NO: 272261 - DNA, 250 bp, Homo sapiens
cagaaacagacagtagaatgatagctgccagggactggaggctgggtaatgaggagatgctgatcaaagagtgtaaactttcaggtataagatgaacagattctgggaatcaaaggtacagcacgggtggagatggatgtgttatttcatttgattatgtcaatcattgcacaatgtgcacatacatcaagtcatcacactgtataccttgagtttatacaatctgtcaattaaatatgttcttttaatt

SEQ ID NO: 272262 - DNA, 468 bp, Homo sapiens
agtgcaatggcatcgacctcggctccctgcaacctctgcctcccaggttcaagcgattctcctgcctcagcttccctagtagctgggattacaggggtgagccacggcgcccggcctcaaatgtcttttaacaggaaaactgatcaatatattatgttatattcatattggtggaatattatagaagagtgaaaatgaatgaagtatggctacacacaacaaaatggttgaatctcaacctaatgttgattgaagttactaccaaaagactgcttatggaatgataatccttgtataaaatttaaaaacctggctgggtgtggtggctcacacctgatcccacccagtattttgggaggctgaggtgggaggattgcttgaggccaggagttcaagaccagcctgggcaacacagcgacactctgtctcaacaacaacaattagccaggtgtgatgttgtgtgcctat

SEQ ID NO: 272263 - DNA, 613 bp, Homo sapiens
cgtagcagttcccaaattattgttttgttgaagttggatttttactaattctctaaaagcaccataaaatgtagtgctgaaaggaacctgacattgtgtagcccagtttcttttcccataagtatgaccccaagcaagtgagtggcctgcccaggtctcgtggggtgtcagaggcagaacttgggctcctggcaccctgctcattattttggtcacagtgaggaccataaacctactactacgtgtaaggcagtgttgggaagggacaaacaatgtgactgtgtacattaatttctttttaaactagtcttctagaatttacacatccaaatccatgttgcttttaaaaagtagactatgcagatgctgaaaaagatgcctcagcactggtttagtctgtctgaaaatagtttcaaaacagtttgaaccaagaaaatattactgaggcctggtgcggtggctcacacctgtaatcccagcactttgggaggccgaggtgggtggatcacctgaggtcaggagttcaagaccagcctgaccaacatggcaaaaccctgtctctactaaaaatacaaaaattagccgggcctggtttcgtgtgcctgtggtccca

SEQ ID NO: 272264 - DNA, 445 bp, Homo sapiens
  misc_feature (416)..(416): n is a, c, g, or t
tgactggggcattaggatgctgaaggcaagtctcaaccatgctccgcagtagctgtgtgaactgggacatgtcactttctgtctggtcttgtgtctttaacagtaaaacagcaggttgggttcgaacatgactctgagattccatccagctctaacagtttatctaggagtatttgctgccattggcattacatgctacattataggtttccttccaaaatccttttttggactttaattttgaccattttcttccaatagaatctagtatacagacttcacttgatttctaacagtcctgtaaaaccgtgacttagtcaactggccatacagatccagctatgggagttaccctaagagatacctgtctgctcttgccctgtatgtccatgtgcctaccctttggcctgttcatnacgccttgggctttgtaataacctacctt

SEQ ID NO: 272265 - DNA, 832 bp, Homo sapiens
ccaaaatgtttcaaaaaatcagacccagttcaggtaccgtggaagacagctgtcatggagggggcattgcttcccagggtgctggggaaggcttccaggtacaatccacaccacccactctttgctgttgctcccatccttgagggtttaggaaaagagtcagtgggctctgagtagaagcctgggagcctctctccagtgacatacatgggaaggaacttcctgaactctatttcaatactttttgaggccttttctttttcttgtctgtgtttggatgagatgatatggagggtgcatgtatcttccctgttataaattctgagagggcagaggcctatgtctgcttcttcacctcttcctcggcccctaacacagtgccttcatgtgctttacatgtaccaagtcctcgataatccttggtaatggattattatttcaatgtgtgcttatctgtgctctatctcataaactaagaaagtacagactgagggcagcaggtccagcctgtacttacagagtatgccctataaatccattaggaattataggccaggcaccgtggctcattcctgtaatcccagcactttgggagaccaaggcaggtggatggattgagtccaggagttcaaggccagcctgggcaacatggcaaaatctcatctggacaaaaaattagccaggtgtggtggtgcatgcctgtagtcccagctactcaggagctacttagtggggaggatcacttgagtccaggagtttgaagcctccagtaagctgtgatctccccactgcactccagcctgggtgacagaacaagaccctgtctcaaaaa

SEQ ID NO: 272266 - DNA, 406 bp, Homo sapiens
acaaaccccaccattgcccctgtcctctctcatctctactttccacattgaaaaataataaaagaggccaggcatggtggctcaaaacagctataataccagcactaggatgccaagatgagagaatggcttgaggccaggagttcaagacctgcctgagcaacatagagagacccaccccccagtctctgcaaaagctaaaaattagctgagcatggtgggatgcacttgaagtcccagctacttggaggctaagtcaggaggatcacttgagcccagaaggttgaggctgtaatgaaccatgattgtgccactgcattccagcctgggtgacagagtgatatcctgtctctaaaaaataaataaggtaataataataaaataaatgccctccaggagtttcagt

SEQ ID NO: 272267 - DNA, 602 bp, Homo sapiens
ttttacaggtgggtcattttaattcattttagacaaagttttgcattgttctaaatgcaagtattcctccttggcttaaatgattgatcaaacctaattcttttggttcttattgatataaatcatactgttccttgattgtcaactagcattttaaggaattccctaaattccaccaatagaattctcaatcttattggtcctacatgcctcaaagaattaaactgaaagaaaaagttctttcggcaacaccaatatacaaaaatacagtgaaaacaggcaaaaagatgataccccctccccatttgcaaaaccaaggtgactattcatggtaggtgatgacaaagacagaggtgtaaagacaaaacccagaggtgttgtaatttagagggaagactattgttcaaatacaatgagacctttccaggagaccactcaccatttcacagaatatccctaagcttttttgacaaatgacctttcagaccaggtccagaaagtgtctttagctgaaatttcatataaagaatattccacctgttaaataagcatcttggtttactagtggccatcaatacaggtttcactattcaagacagcta

SEQ ID NO: 272268 - DNA, 496 bp, Homo sapiens
acagccccaaggttattagtggatttcattctaaatgattaagttattaacgtattaaattatgaatatatcttcccattgaaacaaagttatcatgggtgactcagttcctgtgtgtattttaaaatgtgtttcacattccagtggaagctcctagaacgcaagctgcttggcatcttcagaagagaagtgaaagggaaccgggatggagtcatttgtgggcacagtgcctacagacacattgtagccattcaataaaagttgaggaagtgtttctaggaatagatggttggagggagagaaggaggaaataagcctatgtttctaacatgaagctgcctgtgattgttgtaataaacatgggtttattagaacaattgcctttggtggtttaaaacagcatttcaaaattccatctgttttgttgtccaatccctgagtcccaaagtagtgaacaatttgagagtcatttgaagtgagtaattcaaaaagaaaa

SEQ ID NO: 272269 - DNA, 324 bp, Homo sapiens
aagtgaggtgctcaatagatgttagaactggactgtgtcagctgggtgtggtggtttatgactgtaatcccaagccaaggcaggtagatctcttgagcccaggagttcaagaccagcctgggcatgatagaaccccgcctctacaaaaaatccaaaaattagccaggtgtagtggcatatgcttgtagtcccagctacttgggagctggggtgagaggatcacttgagcctgggaggttgaagctgcctgggaggtttagccatgatcgtaccactgcattccagcctgggtgacagggcaagactctgtctcaaaaaaaaaaa

SEQ ID NO: 272270 - DNA, 180 bp, Homo sapiens
aaaatattctccacactatggcatggtgacatggtgatttgaatcaccactttgattacacactgcctttacctgtctatattctatgttcttcttttgtaattgaaggcactacagaaaagaaagaagagctcagaggtagaaccatcctgatgcttcattggggtgaattttagaatg

SEQ ID NO: 272271 - DNA, 548 bp, Homo sapiens
aacagaatattactttttttctttccattattggttacaccagctagttagagacttggggtaatactgtgggcatgggttggatcctgatatctgtgtcagttagtgagagttggttctatgaccctagagctctttgtgtccttcaaacgagggtgctgaaacaagacgaacatagaactgtctataccaagcaaaaaactcctgaaagcacatgcccactgcaggtgaattggtagcatagtgtggagataagtgggcagtgcttggtcctgtttctgcctcctagagagtacctctcagcatccagggatgctttagtaactcttagttaaaacgaaatgaactataattaattacctttcttttgggagggacacagagagtttcaacagcatctacaatgctttttttttttttttgaaaagaaaatatgatagaatattaagattgacagagctggggatgggttggaggctgaattatgatgtgtgttttctttatgcttgaattatttcataattaaaaacaaaacatataataacaaa

SEQ ID NO: 272272 - DNA, 401 bp, Homo sapiens
agtatcacagccacagaaaaccagtttggaacattccagaactctggggatatataaatgtgcctttcctgaggaaactaccaaaggatgatcttcatttaagcaaagaataactagtgaaactttacaaaagaactgacattgagtattccatctctttaattgtagacaaagactaaaagaaggaagagtatgctgatcagaaaaggaataaactgagtaaactggtgagatatcttgacaaaggtctgtcattggttaccatgaaaaacatctaagcaatactactggtcatcagccaaacaactgatctctaccacatcactaagaaacatagtttattatactttccctctttgatgttactgtcaaagaatagaatttatgcctaacatcttagt

SEQ ID NO: 272273 - DNA, 185 bp, Homo sapiens
atggataaagctaaatatcaactcaggattttgcattgagtaaatatatattttctgcttcacttggaaattgtaaggctaacttactctagcacccataaagtcttaatccatttcttttacatatcttaggtatcaaaaatgggtaagaaatgcagtggtgataaggagtatttgaacatctt

SEQ ID NO: 272274 - DNA, 466 bp, Homo sapiens
gaagcctgacattttccacattgctcccaccccttgctaatctttttatttaaatttttgattttgagataattgggttataagacatagagagatcccatgtacctttacttggtttcctcaatggtagcatcttgcagtactaaaatacagtatcaccaccagggtatggacagcgatacaatgaagatacaggacaattccttcactacggggatccctcatgttggccttttatagacacacgcatttacagccacttccctctgttgcccccattaccctgcctgcttacccctgccaactacttatctgttttccttttctataattttgtcacttcaagaatattgtatgaatgggatcaaacggtatgtaattttttgggattggcacttttcactcagtataattctctggagatttcatccgagtacattgagtatatcagtagttcattcattct

SEQ ID NO: 272275 - DNA, 250 bp, Homo sapiens
aataaaaacaaaaacaaaaaacaagtcctaaaacagtaatagctttcgtaatacattctttattatttcttatgactacaaaagtcatctcaattctcaattctcaaacacagatccagttgaagatatctactgaccttaataacattttaaaatttaatagctcagttgtttctgccccattcttataatgcctatagaaatttaaactatctagcacatagaacttagtttctagctgatactctaa

SEQ ID NO: 272276 - DNA, 158 bp, Homo sapiens
actcatgtgggaaccttctaaaaatatagatcctgatccagcaggtctgggatggggcctgagggtctagatttctcacaaactcccaggtcatgcagatgctgctggtcccaggagtagaaagattctagagaaaataaactcagagaatgtaactt

SEQ ID NO: 272277 - DNA, 152 bp, Homo sapiens
atatactgacaggatgccaatttgttttaagtgaattcatgttactaccctgcacaataaaataatatacaaggctgtgctttgtgaattatgagttatattagtgaatatcattttctgattgcctgcatttttcctattttatatacatg

SEQ ID NO: 272278 - DNA, 352 bp, Homo sapiens
ccattgtgaaataagggctattgcaaagaggcaactacccgactcctatacaaggtactgacctaaataaagcatcagagcaaagagaaataagtcttttttttttttttttgagactgagtcttgctctgtggcccaggctcactgcaacctctgcctcccgagttcaagcggttctcctgcctcagcctcccaagtagctgggactacaggggcgcgccaccacacctggctaattttttgtatttttaatagagacggggtttcaccatgttagccaggatggtctcgatctcctgacctcatgatccgcccacctcggcctcccaaagtgctgggattacaggtgtga

SEQ ID NO: 272279 - DNA, 524 bp, Homo sapiens
taaggtcttcaaattcttatagtacagatgtttttcatctttttcatatgtagtaagtttgtgactttgatgtaatttttggaattcggttcagggtattggtgttggaagggacctcagaggggaaaatgaggcccaggaaggacagtggggcctgtatacactagttaattgcttggtccagtgctcttctcatgacattaaactgcatctcattggcctggctggaggtctttagaaaacactaacatgttgagaaatattaaaaacaacataattcttctcagtaaaagaaactaaggtggtggaataaacttttttttatgcgtgtttttgagtgtcaaattgtatgaacacttggtttgagaagatagaatgttttgcgaatgatagagcataagaatgaagctgggaagttaactgttagcgagagcatgagtttagggtaatattcctgctctcctattgactatctttgtgattgggagcaagttagagataaccctgtcagggtcctcatctat

SEQ ID NO: 272280 - DNA, 506 bp, Homo sapiens
aaaaaactccaattaggactagagtctcccttacccctgcttataggctgacctctcctaaacaaaactatagaccaacccctgaaacacaactaggatcttcagcttcccaagggcactgatcaggtctgattatactctgtctcccaggcatgaagcacatagtaggtatacaataaatgtgggctgaatgaatagacagttgactagtagggttcactcaggtctctgttcaaatgccacgctgtcagagtccctccctgtctatcccatcagaaatagcaacccttcccaacccctcttaccctgcctgcttccctgctgtggttttcttagcacctacctcttcttgacacagtctctattactagttcatccggtccctgtccacccctccccactaaaatgaaagcaaatgagggcaggccttctgtcgtttactgctatacccccagctcctccccaagcaggcacatagcaggtgctcactagatatttgtatcaaa

SEQ ID NO: 272281 - DNA, 474 bp, Homo sapiens
agttacccatagtcccaatgtgagccctgtgtagagttactgtttttagtccttctaacctttttggcagggggagggggccaaaacagcctcagctgtactggaggagaacagctggaaataaacagccaatggatgagaaaacttgagggtcgatatcctccagttgccaagttctatcctgcttagcaaagtctctgtgctgcttcattcttcatttctaaaagtgaccttcaacttgatttccccctggccctcagtgtaaatattggcctggtcattgaggtcgtccaaagaatgatttggtctcttgtgtaaggttgccagatttagcaaataaaaatataggacacccagttaaatgaatttcagataaataacaaataatttttatttttatttttatttattaatttattttttgagacagagtttcactcttgttgcctgggctggagtgcaatggcacgatct

SEQ ID NO: 272282 - DNA, 683 bp, Homo sapiens
caactagagcatgcccagaggagagctataagaaagggaatggactacaaaacgaggtccatgaaataggaaggtccttagaagcagttccccctgagcgatcatccagcatctcccaagccacatgcctgaacccctagccctgtcctgtcccctcccgttaaaggctctgcccttttctgggtcctggagcctgggtcatagcgttggccattttcccagcacttccactcagttgactgcctcattgggtcagtttaccttcacaggatttcttatcttcatcccttctttctgagtccccacagtcaaccattcttcttgtacctttcctgagctattgcagcagattcctctctggtctccctctttctctcctacaggtgtccaaatcctaccctagagtttactaaacacagctcaggtttctctcatccccctcacctcacctttatttctgatgtgcccagtctgaaacattctctgtcctatttactaaaatccttcccttggtttatagcccatttccttcagaaaacctttctgtattctctttgaaaagagatttacttaggcacctgtagtcccagctgcttggaaggctgaggttggaagattgcttgagcccaggagtttgaggccagcctgggcaacatagtgaggccccatctctaaaaaagaaa

SEQ ID NO: 272283 - DNA, 267 bp, Homo sapiens
ggtgggggtgggagggaacagggctgtaaggggcaggaatggctcctggagctcactcattccccatctcaagtgttgcagagcaggcgagatcagtggggaggtttcgactggttctccccagaagagggaagaggatgtgtgccagtgccggcctgagtgttcccaggtgagcaggcacctgcttagggagaagtaagcactatcctccagctctggtcccccaccgtgcagatgagaggaggaagaggcctgggctggggtgag

SEQ ID NO: 272284 - DNA, 513 bp, Homo sapiens
cattaatatagattgagaattaagatgctgttttctgctgaggatggcaggagggaggtgtgttccagcccacagggtgatatggttgtcctgacagcagtgaactcctagggtaaaagcagcagtcagactggctgttagatagcaggtctctgggagctcccagggaattgggtccatattgtggtccctttttggaatcaaattctgagatgtaatctcagaaggagaaatagagttatgaaagaaggtaatgtaatagagaagaaagaatctgaagatgtgggttctaatcctggcaacatgcctaattacctatgtgacttcaggaatgtcacttaatacctctgggcctcagcttccttacctgtggaatgaggtggttggactggattagtggtacctgaccctcactatacatcagaatcaccagggaaacttttttttttgagacggagtctgcactccagcctgggtgacagagcgagactcagtctcaacaacaacaacaac

SEQ ID NO: 272285 - DNA, 492 bp, Homo sapiens
caaaggaacttgttgaaaaactaaacaataaaagaacttagtaaagtagctattaaatacaatttacataaaaatatcagtaggcttcaccagacacaagtgcatactttgattccatttcggtgaagttcaaaacagacagcatctatgtatggtgtcagaaatcagcaccctctttcagtcactacctctcttcccaaaggtaagtgctgtcaaaattaccatcaattagttttgtctgtttttgaattttatatgagtggaaccatatagtatacattatttttcaactggctttaactcagtaggactgaaagagggtacaagggagactctgcggtgctggtaatgttctgtttcatgatctaggtgctggttacgtaggtgcattcaccttatgaatatttatcaagctgtatatgatttgtgcacttttctgtatgtataattatagctcagtaaaaatgtttactaaaaagagtaacaagacta

SEQ ID NO: 272286 - DNA, 324 bp, Homo sapiens
aggtctccaactggtttatagtgttattcaaatcctctgtttccttactgatcttctgtctagcttctgtccattattgaaatctgagtattgaagtctccagttattgttgtaggactgtttatttctcccttcaaatctgtcattgtttgcttcattttggggccctgatatttggtgcatatatgaattgcatgttttaaaacttcacatatatacaaatatatgtgaagatatatatatatatatataatctcatttaggccacagcctcttataatattctttttgtgtgctgaatatatttttaggattcatccatgt

SEQ ID NO: 272287 - DNA, 382 bp, Homo sapiens
gagcacagaatgaatgataaaataaatttatttatacctatattgataagatatgaatatatacatatatattggattagtcagggtactctagaaaaacagtaccaacagtatgtggggacacacacacatacacacacaaaatggggactagcaagtatgaaatttgcagggtaggtcaacaggctggaaacccaccaaattgctgatgttgcagtcttgagtctgaaggcagtctggaggcagaatttctttttaggacctcaggttttttttttttttttggcctttaagtggttggatgagatccacccacatattgagggtaacctgctttactcaaagtctactgatctaaatgttaaacacatctaaaaaaaaa

SEQ ID NO: 272288 - DNA, 426 bp, Homo sapiens
aaaagttgtctttattaaaaggcatatgtgagagcactataagcatagcatgtgctgactatgggtaaaaacaaagaaaatgaacagtgagaaaatctgttaggccagatccgacattacaggaaacatcgcagcttcacttcaaaacatacatcgccactaatgaggtgagagccctgcatattaataaacctacagctccagtcatagccatcattacccacatcaaacataaatacaagattaacacctatgccatttcttgggaagatgtgagaatgccctggtagtaactgctgtctctttccctgaggataaaaaatagaaatgcaagggtaatgagaatagaatttagattaagaaaataaaattggcaatcattctggggccatcttacacagatgcagaagtttatagaagaaaaaa

SEQ ID NO: 272289 - DNA, 340 bp, Homo sapiens
gttccctgaccaccaggcctgggcttgtccttgattgcgcctcctctacagctttatgcctgaaagccgtcccagctgcatggagactggggtcacatatggccagaaggctggggagagcattgttctccgtgtccgggggacaggccttctgcaagtgaggtgctgaggagccctgcagccctgggtcctggcaggacagtgggaggggaagagtgagcttggggtaaggcagctagggttcaggattctcattggatcatttctagggtgagcccggatacatcactttcatacctgcagcccgcccatctatatacagtagtggcagtgatgctgc

SEQ ID NO: 272290 - DNA, 485 bp, Homo sapiens
tagggactttccccacccccattttgcatatgtatgtatgtgagccgtacagggcgtattggtgattgaggaatgtcagctcataaaatgaggcttccttgtaattctgtttaaatgacttttcctttgaaattcttatccataccttatttggcacacaaaacagatatacagttgacccttgaacaacacaggttagagctgcatatgtccacttatatgtggattttttttcaataaatagaattggccccccatatccacaggtttcacacctgcaaccaaatgcagatcaaaaatacagtattcgtgggatgcaaaacctgcagataggtaaggccaactttttgtatacttggattctgcaggttcaagtgtggggcttgagtatgcatggattttggtatctgcaggggtcctgggaaccaatgtttacaaggaattcacaactttttttaaataaaaaatgtgccttataaaaaatg

SEQ ID NO: 272291 - DNA, 417 bp, Homo sapiens
gcttttgttaattcatttcctattacctaattttttgtagcagatacattttcctatgaggtatgccagcaggtgaaaagaatgccttcatcagacagaaaacagagattgagcttgtccactaaaatcacgtatgtggaagtgatagatctaattgacactgttgcaatttttgagcagcaagactacctgcacattagaaaaaaaaaaaaaaacgttattgagaaggggagtttagtggggctcactggtgaaaactgaagttaatgtcagcattatgttcattgttctcagcatggaagcctttgattctgattagaagatttatcctttggcataagaagataattttaactcagcaatgtgtcataaagggtggataattcttcaacaatattaaaataatactgtactact

SEQ ID NO: 272292 - DNA, 429 bp, Homo sapiens
aattatccctttgaataaagtttctaccccatctctctctctccctttcccttaaggcccaaaactcctaaatttgcccttttgaggttattttctagatcttgcaggcatgttacaatttttaaattcttttatcttttatacataatcctttgattatgtataatcacagtcctttgtgtattttcaaatagcctgttttcaagattactaattatttcttatgcttgatcacgtctgctgataagaggttctgatgcattctttagtatgtcaattgtattttcatctccagaatttctgcttgattcttttaaattatatcaatctctgtaaaatttatctgataaaattccaaattccttctctgtgttatcctggattttgttgagtttcctcaaaacagctaatctgaattcattttccaaa

SEQ ID NO: 272293 - DNA, 492 bp, Homo sapiens
cataaacctgtagaggagagggcctttctaaatgtgactcaaaactcttgaaatctctcttgaccccatgtctcagtcagtttcaacacaatctttgttccctttcaaagcaatattttagttagttacatcccattctctgtttttcaaaattattaaatgtgacacatactgaagagtacaaaaaacataaaatgtacaatattcaatataaataaattacaagatgaacgcacaagtaacaacccaggtacatacattcagcattactaaaattctataggtgtatatgacaacttctgacaaccctgctagagccaactaatatcacaactttcacaactattttctaggattttattataaacatgtgagctcctaagtaatgtaattttgtttggcctgttttcaaactttatttaaatggaattacattgtttgtattcttttatgccttgcttcatttgttaataaaatctttataagattcat

SEQ ID NO: 272294 - DNA, 601 bp, Homo sapiens
cagccggtccgctaggatgcgcctattgagaactggttataaaatagaaaataaaatactggcaacggaaccagctttgaactgggtaaatacacaggcaatattaacaattctaactaaattaggacaagctgacaattgttggcttatgttaagtattttctttactgaatataagtacaatataactaaagttctaacagaaaactgcaatttgcttgaagaatttaaaacccaaggttatacagactgcatagagcatgaacaactaataaaaataaaaggaaataaagagttttgcaaagaaagacttgatacagctctattacaccagagccactgaatagagacctgaaaaccattttctttatagtaacagagctctttgttttcttcatactggacagtttagaacacagtcccatggcataaaatttggaaaatagaagagtttaaaaagaaaataaaaatcaccagcaatccaaccaccttgaagaatattgctgtattaatgttattcaactttttttttttttttttttttttgggaaaagggaattcccccccaaccccccggggggaatggcgggggggaaacccc

SEQ ID NO: 272295 - DNA, 365 bp, Homo sapiens
acaggttgaagagcttgcagaatctctgtgccacgcttgccaaggttcttgcatccctcatctgtcatagagaaagtggtggagataaaattgtgccagcagcaccttgtcaaacccctgctacaggcatccattgtgagtcatgggataaaggataagagagcagccagaggcttcagcatcatatgtctgagttctgcagaaaggaccaggcccagaagactcctggcttccacacatacccatgaatcacctgattaaggcccactctcaggattattcccctatcaatgcactgaatctactttcaaccaaggtaccaaaaacttcattgctcaatctaataaactcctttcaatgaagtc

SEQ ID NO: 272296 - DNA, 460 bp, Homo sapiens
tttgtgttaggctggcactgggttgggtgacaatcctcaggaattgtggagcctgactcccttggaagttctctgccagctcgctgaccccagtcctcgtaaacacagttctttgccaagccctttccttgctccaccgctcactgtgatacgagccccactccaaaccccagactcccgaactgatctcatgtaaacttcaggaccatccttttggggtcctgctcttgcggttgcgaaattagtttgaggaggccatgtgagtgaatttctacagcataaaagaaatcactgatcatctgaccaggcccagaagactcctggcttccacacatacccatgaatcacctgattaaggcccactctcaggattattcccctatcaatgcactgaatctactttcaaccaaggtaccaaaaacttcattgctcaatctaataaactcctttcaatgaagtc

SEQ ID NO: 272297 - DNA, 425 bp, Homo sapiens
taaatcatttccaaacccttactgctgtaattttgctttcctgcaagtgttcataattataaataacggctgtgatgatcacctttgttcatgaatgtttgtgacaatatttttatcattttcttcttttaaattcttagaagtgaacattgctgacgaaaactaaaaatatttgaagacttttactgacatcagttgttttccagtatatcgataaggactggcattcctaccagcaggcttggaatttttggccataaaaatggaaagagaaagagaccttgtggtcagcattacatttctttaaactgaacaggtcagcctatttctgtgcaagctttatattcactttctatgaacgtgtgcctccttttcactctgctatgtaagacagatgcatagataaatatctatcctttgttgca

SEQ ID NO: 272298 - DNA, 388 bp, Homo sapiens
tgcttctcctttccaaaagtcttacaagggcatctctatgggagagcttaaatcatatccaccatgttagctgcgaaggaagtctgggcaaggttatgttctactttcctgcctctctggtaataggatgtgcactagactagaagggaggtgcagaagatataaagctagcgaattcttaagaccgtgcaatatttattcctctgagcctcagatctgcaaaatagggatattatctattttgtgggacatttgtgtggattgtacaagatttatattacattatattatatattagaatttaccagctctcttgctttagtatttcactgaagatttgtcagtcctgtgatacttaaaacaaacaaagaaaacacaagagaattta

SEQ ID NO: 272299 - DNA, 430 bp, Homo sapiens
tgcatcttgagaagatcgtgtggttttagtcttcttttaatatggtgtattacattaattgattttataaagcatgttgaaccagtcttggattgctgggatcaatcttacttggtcatggtgtataatccttttagtatgttgctgattctgtcaatggcttttatttctatagtcatatgaaatattgctgtacaatcttcttttctcgtaatgtattttacttgttttagtatcaggtaatactggccacatagaatgagttggtaaatatttctctcccattttttgctagagttaatgaaagattaatgcaaattcttctgtaaatttttggtagaattcaccagtgaagccatttgatcatgaggctgagtgctgggattgcaggcagaatggcacttttatcattataaaatgttaattgttt

SEQ ID NO: 272300 - DNA, 485 bp, Homo sapiens
tgcatcttgagaagatcgtgtggttttagtcttcttttaatatggtgtattacattaattgattttataaagcatgttgaaccagtcttggattgctgggatcaatcttacttggtcatggtgtataatccttttagtatgttgctgattctgtcaatggcttttatttctatagtcatatgaaatattgctgtacaatcttcttttctcgtaatgtattttacttgttttagtatcaggtaatactggccacatagaatgagttggtaaatatttctctcccattttttgctagagttaatgaaagattaatgcaaattcttctgtaaatttttggtagaattcaccagtgaagccatttgatcatgaggctgaggcagaagaatcacttgaacctgggaggtagaggttgcagtgagctgagatcacgccactgcattccagcctgagtgacagagtgagactttgtctcacaaaaaaaaaaa

SEQ ID NO: 272301 - DNA, 1471 bp, Homo sapiens
gtgaggacatgagatttgggaggggccagagatggaatgatatggtttggctgtgtccccacccaaatctcatcttcaattcccacatgttgtgggagggacctggtgggaggtaattgaatcatgggggcagatctttcctgtgctgttcttgtgttagtgaataagtctcacaagatctgatggttttaaaaagaggagattccttgcacaagctctctgtgcctgctaccatccatgtaagatgtgacttttctccttgccttcctccctgattgtgaggcttctccagccctgtggaactgtgagttctccattaaacctcttccctccattaaacctcttccctttgtaaattgtccactctcgggtgtatctttatcagcagcatgaaaatggacgaatacacatatataaaaattttacatgtataaaaatgaagctgctctgacagaagctgttagccttgtgctttgaaattctcttgtgtagtacttttccccacctcttccttgagttacattactagaattgaacatggagatcaatttgaaaaccactttctagtctagattcttccttttctagatgaggaagctgaaacctattgagtttataattatccttttctttggttttaatctgtaaagttatctggatttagaacagagaagaaaaaaatacatctaaactaacactgattctaggacctttcagcagtgtgcaagtctgaacgtcttccctgtttttgttcatgttatcactactgttgttctgggtatcatgccaaatttagtgcaatactctcttatattagtttcctagggcttctataacacattatcataaactagtgacttaaatatattctcacacagttctggagcgcagaagtctgtaatttgtgctatgcatcctatttcaaaatcaagccgtgttccctccagtggctctaagggagattttgttccatgcttctttcagctttggtggctacaggcattccttgtcttgtggctgcataactccagttttttcctgtgtctttacatggccttctcatctctctgacctcactctgtgtattttctgtaaggacacttgtcattggatttgggatctacctggataatccagtgtcatctcatcctgagacctttaacttaattacatcttcagagactcatttttccaaataagataacaggttcatttcacctaattactctttctgcatctgtgctctcttttttccagtacaatatgtgaactgttagaccagttttcctatttactcttgttaattttttgacttcctgtattttcaacctgcaatattctgtttctcctcctgactacactttaagtttcccaaggtaaggagcatgcttcatctcctttgtccttcctcagcataaatgcctggcccatacaggtaggttgttaaataaacgttagtttaaaaaaaaaa

SEQ ID NO: 272302 - DNA, 475 bp, Homo sapiens
ggtttgtgactacaaatttatttaattgacatctagatgtatttatttatcattaagtccttaaatggctatgtgctaaagaaggcaattaaaacaggtacaatgccttttataagtaggacaccttgctgtagtgctaaagtcatagtagacatagaacaaatgcttattgattgatttgtggcactataaaggaaacgtttaagtctattatgttactgcagaaggaaaaaagagactaaattagaatcagttcaaaagcaatattaccaaattcattagttacattctattttagtcatctttagtgttacaaaatgctaattttagagataatcttgcctaacctcatcatgaaaaataatttaataacttagacgatatagctggcattgtagggtaaggttgagtcatgggagggcagattgttgcaacactgattgtttaaagaagaaaaaaattgtagaaagtaaaa

SEQ ID NO: 272303 - DNA, 441 bp, Homo sapiens
tattgtgtatagagaatggatactgttttgaaagcaaaatgttggaaactgagcatgatgctaagatgcctttataaaaacatgagccactgcacccagcttttagaaatttatctttattcatctcttgggattggtggtagtataaaagtagttgatagccgggcgtggtggctcacgcctgtaatcccggcactttgggaggctgaggcaggtggatcacctgacatcggagttcgagaccagcctggccaacatggcgaaaccccatctctaccaaaaaacacaaaaattagccaggtgtggtggcagatgcctataatcccagctactcaggaggctgaggcaggagaatcgcttgaacccaggaggaggttgcaatggaccgagatcatgccactgcactccagcctgggctacagagcaagactgcgtctgaaa

SEQ ID NO: 272304 - DNA, 169 bp, Homo sapiens
gaaatttaggggaggcacaggcattaagtccataacattggggaagtaggttctcagtggctcctctcccttgggttatatgagggtctttagtagcttcagaattccctgagttgtattcagagtcaccatttgctttggagaattctaggattgctacatagaccag

SEQ ID NO: 272305 - DNA, 426 bp, Homo sapiens
caaaaattctcaacaaaatattagtaaatcaaatccagcgatgtataaaaggaattatacaccatgactaaatgggatttatgccaggtatgcaaggctgattcaacattcaaaaataaattaatctaatccatcacaccaacagggtaaagaagaaaagtcatatgattatatcagtagatgcagaagaatcatttgataaaatataacaccctttaatgattaaaaaaaaccaactaaactaggaatagcggcaaacttcctcaacttgataaagaatatttaccaaaaaacctgcgggaaaatttatacttaaaaatgaaaactagagcctttgtaactaagatcagaaacaaggcaaaaaatgtcacctgtcaccactccttttcaacattgtggtggaagtcctagctaatgcaataaaac

SEQ ID NO: 272306 - DNA, 426 bp, Homo sapiens
gggaaatggatacttattattaatgttcttcattttggcacagaaaagtgtagaactcgggtcacttggtgtttttataatccaacagtgagataaaaactatttccaaatggccttctgaaaacataattattaaagagcagctttattattagtaatgtagtagactgtggcaggtgcggtggctcatgcctgtaattccagcattttgggaggccgaagcgggcagatcacttgaggccaggagtttgagaccagccagaccaacatggtgaattcctatctctgctaaaagtacaaaaattagccagatgtggtggtacatgcctgtgatcccagctactggggaagctgaggcaggagaatcccttgaacctaggagacagaggctgcagtgagccatgatcgcaccactgcactccagcc

SEQ ID NO: 272307 - DNA, 372 bp, Homo sapiens
ttgctttacctattgacaagttcctgagttggcaccagcaccaagcagatagaaccatcctccctcttaggaaggctgataattgacgtggatgatggcagatagtaagtaggatgttctcccagattcagtctgacttactccagtcatatcccatccacttggagcaactagctactcttgagcttgaatggcaatgggttcaggaaagttctgttttgcaaattacatccatgatacgtacagagttgttttcttcatgcagaatcagagctggcttcagacagttatgtcctctcactgtaactttcttgcttctgtgtacttctacctctcgtactgtgtctatccaaatcagtgtgctcttgatta

SEQ ID NO: 272308 - DNA, 410 bp, Homo sapiens
caactgcactctcatacattgctggtgggaatgcaaaatgacatggcctctggaaaagtttggcagtttctcacaaagttggaataaccacatagaagacccagcaatcccactcctagaaatttaccctagatacatgaaaatttgtgttcacataaaaaaattgtatgctggctggggacggtggcgcatgcctgtaatcccagtattttgggaggccttggtgggtagatcacctgaggtcaggagtttgagaccagcctggccaacatggtgaaactctgtctctactgaaaatacaagaaagttagcagggcatagtggtgcacacctgtagtcccagctgcttgggaggctgaggcatgagaatcacctgaatccaggaggcagaacagaggttgcagtgagct

SEQ ID NO: 272309 - DNA, 402 bp, Homo sapiens
atctctagtagactcactttatgctgaaattatgtcatcaaccaagtgacctacacatagcttgtgggcctcttgttggtcgtatcaactgaagaaaaaaataaatcaaacttttaaaaaatagttttattcagaaatcttactgaggactgtagaccatagactacagcatgggagctgttctgtcagactgcttcagcacaatatttcagctcatggctaataaataggtagcaggagtttagtatgtgaaaaatcataccaaagtttgggtacagtagtacatctgatttatcccatcagatgctatcttatgtgcaggaaaagtcaaggacaagggtcatttttctttcaaggaatatagtgactcaggcaagagatgtgggggtacggtgatgtgtt

SEQ ID NO: 272310 - DNA, 182 bp, Homo sapiens
cgcgtgactccttgcatttttcaaaacccatgcaagtccacagcacaaagaatgaacttcgctgtatgcaaatttttttaaatgagccaggatgtcaggggaacccaggaggaacgcggcctgtgacaacggactctaattgaattacaaatgtgtgacatcactcagggagagggagtggg

SEQ ID NO: 272311 - DNA, 482 bp, Homo sapiens
gaaaaatattctgaaaagcattcactcctacatgcatgaaaattgttttcatcattgtggcttggggagctttctgtaaccatactttaaggaactagttttattataatgttctttaacttgaaataagaagatacaaacagaagccaggcaaccaaatagtgcagatccataatcagggttttgcaagaggattggactgtctttccttctctgtggacctcattaaggaagcacataactccttccccttggtaggggaggattcatctacaaaagtggtatcagaattggagaaacaaaattccaatcatagctgtaaagaagccattcaagctgggtgtggtggtgggcccctgtagtcccagctacttgggaggctgaggcaggagaattgcttgaacccgggaggcagaggttgcagtgagccgagatcacactactgcactccagcctgggcgatagaatgagactccatctca

SEQ ID NO: 272312 - DNA, 608 bp, Homo sapiens
ccgaacatggcggcggtggtagctgctacggcgctgaagggccggggggcgagaaatgcccgcgtcctccgggggatcctctctggagccacagctaacaaggcttcccagaacaggaccagagcactgcagagccacagctcaccagaatgcaaggaggagcccgagcccctctcccctgagctagaatacattcccagaaagaggggcaagaaccccatgaaagccgtggggctagcctgggccatcggcttcccctgtggtatcctcttcttcgtcctcaccaagcaggaagtggacaaggaccgattgaagcagatgaaagctcgtcagaacatgcgggtgtccaacacgggcgagtatgagagccagaggttcagggcttcaccccaacaagcccagttccctgaggttgggtctggggcccagacctgagtgaggatcactgcaaccttgtgctagactattgactgccgtcttgtgtggccatggctcctgaggcccaccagagggcgcaggatgcccaagctgctgccagcacccaactcttccacaccgtggaaggagccaaatgcaaataaagttattaagtactgacacggaaaaaa

SEQ ID NO: 272313 - DNA, 448 bp, Homo sapiens
ggcagagggacagtgccctgtgttccaggacacacagatgcatgaggaggaggaggccagccagcagcaaggaggagagccagggcaccgagcaccgggaggcagccctccctcccgcaagctctcagaccgccgatgccctcagacctaggagcagcgcccgtaccccgccaggccccatctcctcccctccctcaaagcctcacttctccagggtccagccctgatatctctttcccaggccttccaggagctgtctgccctcctgtccccctgtcggatccccctgccctgtatattcccctaggtcccgcttctcacccatctcagtcatctatggccacataaaaccacaccccaaggccagcacagtggctcacgcctgtaatcccagcactttgggaggccaaagcaggaggatcacttgagcccaggagttacagaccag

SEQ ID NO: 272314 - DNA, 252 bp, Homo sapiens
ttttagtagagacggggtttcaccatgttggccaggctggtctcgaactcctgacctcagttgatccacccactttggcctcccaaagtgctgggattacaggtgtgagccactgcacctgaccccagacgatttcttatgcatttttatgattctccatagtgtcagaaagagttccatgattgtcagaggtgctcaatgtttatttaggaacagaatggagttaatgctatatgaaattggtaaacccag

SEQ ID NO: 272315 - DNA, 420 bp, Homo sapiens
ggaaaccataacgctcttcagtgttattgtctttgtcaataaacagtattagcatcaattctctccctcttcctctttaacagaatctctccccaatacaaccatatacctcagtagaagccaacaccattccagattgagaaacgtgattaacctaagggttatttactggtgactggttcaggaactagcctatgacccaattctggccaaaaagatgggaaagaagtttgctagaggtttttgtagaaagtttcctctatccaaaaacagtggcacaggaagagatacttttcctcttcttttggaagttgttatttatggatatgatatgatgcctggaatcaccgcaaccattttgctactagcctgaggatgaagccagtcccaaggatggcagaattgagcaatatatggcta

SEQ ID NO: 272316 - DNA, 1176 bp, Homo sapiens
gccctccacaaagctcctgggcccctcctcccttcaaggattgcgaagaactggtcgcaaatcctcctaagccaccagcatctcggtcttcagctcacaccagccttgagcccagcctgcggccaggggaccacgcacgtcccacccacccagcgactccccagccgctgcccactcttcctcactcatggggaacagcaaaagtggggccctgtccaaggagatcctggaggagctgcagctgaacaccaagttctcggaggaggagctgtgctcctgggtaccagtccttcctgaaggactgtcccaccggccgcatcacccagcagcagttccagagcatctacgccaagttcttccccgacaccgaccccaaggcctacgcccagcatgtgttccgcagcttcgattccaacctcgacggcaccctggacttcaaggagtacgtcatcgccctgcacatgaccaccgcgggcaagaccaaccagaagctggagtgggccttctccctctacgacgtggacggtaacgggaccatcagcaagaatgaagtgctggagatcgtcatggctattttcaaaatgatcactcccgaggacgtgaagctccttccagacgatgaaaacacgccggaaaagcgagccgagaagatctggaagtactttggaaagaatgatgatgataaacttacagagaaagaattcattgaggggacactggccaataaggaaattctgcgactgatccagtttgagcctcaaaaagtgaaggaaaagatgaagaacgcctgatgccaactgttcagctgtcctccctccacctaccactcacatgacacccgtgagcgcctgtgcacacacacacacatgcacacacacgcgcgcgcacacacacacacacacatccaccccagggccaagagaaaggcctgcacacaagcccacagcacagctccctgccaaactgaagcatctgtagtgacccactggttccttcttcctgggtcttcagcattccctcccatcatgcccggtcccacccctccctctgtccaccagcccatggccctgtgctaatcccaggattaggccataggagtcctaagtgtcaccccgctgtaagctcctttgtggagtgctgggtaagcagtttccaataaacgcaagctgagctggg

SEQ ID NO: 272317 - DNA, 1251 bp, Homo sapiens
gccctccacaaagctcctgggcccctcctcccttcaaggattgcgaagaactggtcgcaaatcctcctaagccaccagcatctcggtcttcagctcacaccagccttgagcccagcctgcggccaggggaccacgcacgtcccacccacccagcgactccccagccgctgcccactcttcctcactcatggggaacagcaaaagtggggccctgtccaaggagatcctggaggagctgcagctgaacaccaagttctcggaggaggagctgtgctcctgggtaccagtccttcctgaaggactgtcccaccggccgcatcacccagcagcagttccagagcatctacgccaagttcttccccgacaccgaccccaaggcctacgcccagcatgtgttccgcagcttcgattccaacctcgacggcaccctggacttcaaggagtacgtcatcgccctgcacatgaccaccgcgggcaagaccaaccagaagctggagtgggccttctccctctacgacgtggacggtaacgggaccatcagcaagaatgaagtgctggagatcgtcatggctattttcaaaatgatcactcccgaggacgtgaagctccttccagacgatgaaaacacgccggaaaagcgagccgagaagatctggaagtactttggaaagaatgatgatgataaacttacagagaaagaattcattgaggggacactggccaataaggaaattctgcgactgatccagtttgagcctcaaaaagtgaaggaaaagatgaagaacgcctgatgccaactgttcagctgtcctccctccacctaccactcacatgacacccgtgagcgcctgtgcacacacacacacatgcacacacacgcgcgcgcacacacacacacacacatccaccccagggccaagagaaaggcctgcacacaagcccacagcacagctccctgccaaactgaagcatctgtagtgacccactggttccttcttcctgggtcttcagcattccctcccatcatgcccggtcccacccctccctctgtccaccagcccatggccctgtgctaatcccaggattaggccataggagtcctaagtgtcaccccgctgtaagctcctttgtggagtgctgggtaagcagtttccaataaacgcaagctgagctgggaaaaaaaaaatttttatttttttttatggtgtaaaaatttttttgtgggccccggggggggtcccccctttcaat

SEQ ID NO: 272318 - DNA, 1068 bp, Homo sapiens
tggtgcagcctctttggaaaacagactggaatttacttcaaagattaaatatagagttaccatgtgacttagcaattccactcctaaatttatacccaagagaaatgaaaacaagcatttatatatgtacatgaatgttcatagcagcattattcataatagaaagtggagacaacccagtgttcatcagctgatgagtgagtaggcaaaatgtggcacatttgtataatgaaatgttgtttgtcaataaaaagaaataaaacactgataaatgctacaacatggatcaaccttgaaaacgtgctgggtgaaggaagccagtaacaaaggaccacatatcgtatggttccatttatgtgtgattttcagaataagcaaatctgtagagacagaaagtaaattattgatctccaagggctttagagagttggagaaaatgtggggtgactgctaatggatgtggagtttctttttggaatgatgaaaattttctaaaatcatgctaattatcgtgcaactctgaatatatactacaaggcttttggactgtacactttatatgggcgaattgcatggtgtgtgagttctatctcaataaagtttgttgtaaacaacctattgcaaatgcttatctgttaatgccaatctgtaataaaattttatatagttcatctttggaaatgttctttcacaccgatagcattgttggatgctggtatctgtccataagcatattatttcaattgggcatatccattgcttggaagtcatttatagaatttagttagattctttggatgtttgcctttcagcacactgttacgttgcagattaagaagggtttgggtggatgctcctcagttgtactgttaagtgaattttgaaatatgtatatttcttttgcatttgcattaggatctaaaaaatgctgttggaactggagtttgtgctcagaatccatatgtgtggaaaatatttgtgagaatggagatatctcttcttattttaaacttggacagcatgtgaaatatataaagcattttcacattacttgcgattcaaatatta

SEQ ID NO: 272319 - DNA, 421 bp, Homo sapiens
tacagtaaaccaggtttacaccactgcactccagtctggatgacaaagcaaaaccctcatctcacaaaagaaaagaaatgacaatcacagccactgcaacttcaaggaaggttgggagagtgatattggtcaggatgagtggtctctgacatgtttcttaagttggatatttagcttattaatttacaactcttttctaatattaatactcaagactacattttccccaaaacatttattttgccatgttttgcaaggcttggtatatggcattttcattactctttaattctaactaatttttaatttctattatgatttattatttgatctatgaatcattttgaaatttgtttttgtaaccttggatagggaaagatttcttatagaagacagtaaaagggctgagtacaaaagaaaa

SEQ ID NO: 272320 - DNA, 365 bp, Homo sapiens
ctagatggtttagcctactgcatacctaggctatacggtataacatattgctcccaggccacaaacctgtatagcatgttattctgctgaatattgtaggcagttgtaacacaatggtaagtacatatgtatgtaaacatagaaaaggtacagtaatcttatggagccatctctgaatatgtggttcattattgactgaaacattatgtggcacatgactgtacttgggcagctgctgcttctctttcagttgcaaatgcaaacctgttataatctttgactaaataaagcatcctggattctgtaagtccatagatagtaaaaacttcttaaaacacaataaagaagagagaggaaaaaaaaga

SEQ ID NO: 272321 - DNA, 151 bp, Homo sapiens
aggagacacaaacattaagtctatagcacatgacttctgttatttccaaattatgggatttccaaattatgcatgtattaaacccaaataatttcatttttaaaggcgttaaaaatgaaaagtgaagagaggtcagagcctatgttcactg

SEQ ID NO: 272322 - DNA, 879 bp, Homo sapiens
catgcatataatcccagaactgtgggaggccaaggtgggcagatcatttgaggtcacgaattcaaggccagcctggccaacgtggtgaaacggtctctactaaaaatacaaaaattagctgcgtttggtggtgcgcgcctgtaattacagctacttgggaagctgaggcagcagaattgcttgaacccaggaggcagagattgcaactgagatcgccccactgtatgccacctggggcaacagagcagactccatctcaaaaaaaaccaaaagaaagaatctgcatttaaataagcatccttagctttcattaacaccctaagcataagcataccttaactaataggtatgaaagagatggtgacttcataaaacactactaaattggacgggcacggtggatcacacctgtaatctcagcactttgggaggccaaggtgggtggatcgcctgaggtcaggagttcgagaccagcctggccaacatggtgaaacccgtctctactaaaaatacaaaaattagctgggcatggtggtgcacgcttgtaatcccagctaccaggaaggctgaggcaggagaactgcttgaacctgggaggcagaggttgcagtgagctgagattgcaccactgcattccagcctgggtgacagagtgagactctgtctcaaaaaaaaacacaaaacaaaaaccattatacacatttccttatttcatgctacataatttctttacgtggaagataggcaaaatgaactgttgccatagtgaaggacagaattctagagagaaaagatgccatctagataaaagtaacatagtgctggaacatgtggaacaaaataccgaggggaggctcagataggagtggccttaacacc

SEQ ID NO: 272323 - DNA, 737 bp, Homo sapiens
catgcatataatcccagaactgtgggaggccaaggtgggcagatcatttgaggtcacgaattcaaggccagcctggccaacgtggtgaaacggtctctactaaaaatacaaaaattagctgcgtttggtggtgcgcgcctgtaattacagctacttgggaagctgaggcagcagaattgcttgaacccaggaggcagagattgcaactgagatcgccccactgtatgccacctggggcaacagagcagactccatctcaaaaaaaaccaaaagaaagaatctgcatttaaataagcatccttagctttcattaacaccctaagcataagcataccttaactaataggtatgaaagagatggtgacttcataaaacactactaaattggacgggcacggtggatcacacctgtaatctcagcactttgggaggccaaggtgggtggatcgcctgaggtcaggagttcgagaccagcctggccaacatggtgaaacccgtctctactaaaaatacaaaaattagctgggcatggtggtgcacgcttgtaatcccagctaccaggaaggctgaggcaggagaactgcttgaacctgggaggcagaggttgcagtgagctgagattgcaccactgcattccagcctgggtgacagagtgagactctgtctcaaaaaaaaacacaaaacaaaaaccaaacaaaaaaaccatcagaacattctttcaaatgaatgaagccacg

SEQ ID NO: 272324 - DNA, 213 bp, Homo sapiens
ccccagcacaaagctgcccccaacaccgagtctcccttctgggagtatgccactgtcatccagtcagtgtcaaacagaaatcgggctgagctcattgattccccgacccacactagtcaacaggtcctgtatcctctgcctattaagtgtctcttgaatccatcacttctctgtctcctctgacacaactatggtcccaggtcaccacaacct

SEQ ID NO: 272325 - DNA, 381 bp, Homo sapiens
gaacatttgcctcgcggtagacacggggggaaatgtaatatttttttaagcgcttaaacaatttctgaaattcctcaaagaaaagcctttcagaggcaccttggcctcaagctgcagcaaatactgggaggtccggctcgcattcccaggcctgcaccaataatgacagcgtgctggatagtgcgccagtgtgtgccagatttttttttcctcttctcttttcttttataactaaagggaagacttaggctcttgcagggaacaacgcctcgcattaagataaacagaatggaaagttaaagaggaaagcaaggacgttgggaaaagccatctttcttaaaatccgtctgccccccagccgctttctccccccaacttaaa

SEQ ID NO: 272326 - DNA, 257 bp, Homo sapiens
caaaagtatttactatctggccctttagtggaagactttgctaacccctgaactatatcatactatgagaaatttctcactggctagttccccttttaacctgggctttccatcctcttcccaggcctctctctctcattggatactcctctcttttgttcaaatctttactgcattctcagggtatgcagtaaatacaggcattcagactctcgggcttcttgcaaattcaaaactccatttttctttaaaattca

SEQ ID NO: 272327 - DNA, 233 bp, Homo sapiens
gatgaccttgaacaagggacttccccgtcctgagccccagtgtctttatctcacatctgacagtaaggacactgatgtttcttgcacattcccagctttgaatggtttgtgtgccacccacctcctccacctgctgcagatccattcattcagttcattcaatacatgcatctactctgtgcccagtgctcttccaggcaccaaaaataaagccttgaacaaaatagacacaa

SEQ ID NO: 272328 - DNA, 447 bp, Homo sapiens
tatttaacccacgcctctgggaggcgctcaagaacaggataatttaatgtcattctcagcctgaaaaagttccttagttttcttttaattaaatcagtaattattttaaatgcatcatttcaacaagataccataagttagttgaatgaatgcatgtaaaaccaaaatgttgactggcataatccccaaatcgaattaatattttaatcttaggtataacatactttatatttcatacctggcacgttcttaaatgtgttaaatgtgttttccacaacttggcataactatacatccactcagtttattgggtggggaggcagagaagagaactttgtttaaaaacaaaacaaaacagaacaaaaaactatgactaaaggatagaactctacagcagacatttagtttctacaattgatgccaaaggtagaagagattttgagagga

SEQ ID NO: 272329 - DNA, 127 bp, Homo sapiens
gttttggggttggggaattggaagagaaggagaatgtatataccaaagacatctaaggggaaagaatccaaaagaaacaagggaatatttatccacttaacatttacgctaaaaaaaaaaatgtagt

SEQ ID NO: 272330 - DNA, 371 bp, Homo sapiens
agggaatcacaattacgaacactcatcctattaaaaaactaaccgtaggactgagtagaatgaaggattctgaatgtttaatatgtttgttacctgcaagcatttaccacaagacatacaacagcaggtgttaaggttgaaaaaaaaatcataagaaaaagacttaatttttcttgataactggtagaaggccaccattcttctgtttcagccatgggacgcctttgtccagcccaaggaaaacacgcagaggctcagtttgagaactaggatggcctctcccaaatatcaaggttgccgtggaaactggtggcaactgttgcattaaacgaaaatctccatttctaacactgtgcaatgccgactcactc

SEQ ID NO: 272331 - DNA, 416 bp, Homo sapiens
tttattttatttttgtaggaacagaatcttgttctgttgcccaggctgctcttgaactcttggcttcaagagatcctcttgccttggcctccaaaagtgctgggatgaatctctgtcatggtggcatgagccaccatgcctggcccagatcctgaattctagcaggacagctcatgcccaccagtctgaagacaccaaaaggagaactgactcaatgcaagaatgcaatttctttagttccatgacgtcacccttcattcttcaaccaatcagtgatccttataccttggcccactaaccatccaaaccccttaaaatccctagatcctaaactccttgaggaggtggatttgaggtttcctccagtctccttgtttggctgccttgtgattaaacctctttctctgctgcaattc

SEQ ID NO: 272332 - DNA, 306 bp, Homo sapiens
tggagttgaggaattatttttatttttaaaagggaaattaacgtagacaaatcgtaacatgtaccccaaatccaaatggattaaagacaaaaatgtcaatagaacatttgtggacctttccaatagaaaaaaaaaaaagagcaaactctaactgcctacaacattttaaatctagaatcctatattcaatcaatatggggataaagttcttccccttggataggagaggtttcgtttggttttcttttaatttcctccaaaacaatcattggcaggaagcttctgcaggataagctccaggtgtag

SEQ ID NO: 272333 - DNA, 248 bp, Homo sapiens
aggaggaggaggaggaagatagtgatgccctggctgaggagtcaggagacctgagttccaaacctacagcaccttacacactcgaaattcatgggttgaatgcataaatgaatgagtgagtgaagaaattaagccaggcgtaagggctcacatgtgtaatcccagcactttgggcggctgaggcagatggatcacctgaagtcaggaatttgagaccagcctggccaacatggtgaaacctggtctct

SEQ ID NO: 272334 - DNA, 453 bp, Homo sapiens
ttttcatctaccaaccctaatcaaggattctcccctaaagttagctactgttaccagtttttgtatgttcttccagaaggacattgtatgttcacatagaaaaattatatagtattgttttgagtgtatgtatgtatgtggggatgttatgtataaatacatactccaccatttacatgtggcattttgtgttgtgtttttgtttttgtttttttgcatttgctattttcatatgctgtagttttaaattgtgctctgtggaattggaggcctgaaagcctgtgtgtttctagatgctttataccacttcctctggagcagctctgctttagattttttacatatggggcctttgggtaaaattttatttaaagaacaaaattgcttacaaagaaaagcttgcaaactattttatgataccttgtctctactgccttataaaaagaaagaaaa

SEQ ID NO: 272335 - DNA, 670 bp, Homo sapiens
cagaacatgtctgcatcctcacctccttaagcctgcagctcatcagaaccaaagaccctggcagagtttggtggtagttcttttttgtcagacttacagtcaggggttggtgggtttgtgggtagctccattctagtcctgggctttaatctgtgagtatggcttttgtcttccatcttgctcagggtactttggaaccgctatacattgcaggagcttagcttctggttaccatggtttgcttccagagcaacaagcctagtacttcaacatggagacaattatcttttgtttttgttttgttttgtttgttttgtcttggccatgcctttttgagtttacctttttatattttgtccatcattgccatgtgtttggagcagtgggcgttccataacatgaactcactgtaccatcacgaatgggaagtaaggggaaaccttatccatgtggattttactcttccctgattccctaaattgggtttgcaaaatactactgtgcactttcttgatgattcgggcttatctttatgactgtctgtttttgtgtcagactgtaaagaagtataaaagtctttagcttgattaatgcaatccacgcttcctttctggaaaaaaaaggggggggggcgcatttttttacagttgcaataaatcgtcttaagcca

SEQ ID NO: 272336 - DNA, 349 bp, Homo sapiens
aacccaaccagcctggtgttgcaccacagggctcacacctcagatcaagacaacgggggcccagccacagcccactgacgagggcatgcagggcgtccaggatgcagggcagagagagaagcgagggatgagtcacggatgcgccccccgctctgagcccgacggggccctgaatggcttttcctgccctggctcctcccatcatattttaaatgccgtcttcctcccgctccaaggaaaccttctcttgacgtcaggtactctccagccacggacctatcaacattctgacagttttctggtcttgacacattatccttttaatatagcgctggattcaatttattaa

SEQ ID NO: 272337 - DNA, 478 bp, Homo sapiens
atgagagaagagcagggcaggtgggggtctaaagagctcagggtctcattatgtttctggtggcagctccctcgtgggtgggagtcccctctccccatagacgtgtgttgccttacgagaggcttgtgcctgcctgggtgtgtgacacagttactctgggttcagatttctatgttactgctagctggttgggagagtctgagggaatcatttcacctctctgtgaaatggagataactcaaggtcccttacctcatagagtccatgtgagaagtaaatgagggaaagcacagacattactcgctccgggggctgcacctccagaattgctgttgtcattattaccatgtgtctgacacattgatattccatcccacaacaacctcggaaaggaaacactcccattagcctcatttggtagaggaggaaattggggttcatcaagggttaaatgacttccctgagggtccacagttgt

SEQ ID NO: 272338 - DNA, 190 bp, Homo sapiens
ctctgtttcctcagcttccactcttgccttcctccctcctctccttccctcctcatttctttatcatctccttttagtctttttcaaacctttcagcttttgcattccacatttcctcacctgggatggggacaatgcctgcctcacgggatgtagcgcagactgaggacagaggcagccgcagagggaa

SEQ ID NO: 272339 - DNA, 262 bp, Homo sapiens
gtcctccacagcaaagtgtattccacccattttcttagagagagagaggcaagcatcctattattagacagattctcaatgtgcctctcacccctctgacattcagactcctggctgttattttccagaagattttgagcccactctgcccctcatcctgtgcctatgaagaccccagactcagtcagagagaaagggagaagcagctggacttctgaaagaagaaacttgacttcagagggaagacttgatggcttgattt

SEQ ID NO: 272340 - DNA, 1206 bp, Homo sapiens
acggggccagagggaaacttctcacaaacttcgtagagcctcctcaggggaagctaggaagaagacatcaaatgtttttaagtcatgaccaaacaggcttgttggggacatatcatggggtgagctttgaagtgctggtggtccagaggggttgcagatacgtgacttggagcacccgtgtcttacgatggacagtgataaaggtgaacacacagagacagactattctctaagaatgtgagaaacctgatctggaagaggagctatataaacactatctgactatctttgtcttttggggccagtggctgttggcataatcacaagcctgtctgtcttcgagaagggacagtggagtcatccaggtgctgccacatgacaggcacggtgggcaccgatccacagtgggccccgccttccccagctcgcctccctgcctgtgctggcctggccttgcctgctggcaccattggagtaggagggggtggaacacagggggcccatcctgatcaggccccatctcaaggttggcactcctgcccatcacccttagaaggatcttttcccatggcttgacttccttcatttccctaactgaaatacacccactctcttggaataatgacgtaccactcagttggaccctcaagagtcactgctttgtctgtgctggtagtttgtgagaagtgacccgcacgcttccatttgatgcatttgatgtgagtgaatccatacatttgaatgtcattgtccttgagaccctacatgtgcagtttggctcatctcattaaagatgcttgatgtaataattggttagtttccttttattttcctgcaggcttttccatgagtattatttttttcaaagaacaaatctgtatggcttttccccatctccatattttgttttgctatgaattgctttgctttggtgaacttgtcctagtatgcttgcctcacaaacgttttagccattgtgaattttcttcatctctgtaaatagttcatctgtgcttctccctgatgacgttttattttttttcccctgtaagcaaccgaggtagaaaaataaattgtttaccatggacatactgtgtgctgccgtctcttagcctgacagtgtcctgttctcgctccgggggaggtgaatgcactgaataaccagcaccgatgacagcctagtgcagtttctaaaagcatgcgaac

SEQ ID NO: 272341 - DNA, 999 bp, Homo sapiens
acggggccagagggaaacttctcacaaacttcgtagagcctcctcaggggaagctaggaagaagacatcaaatgtttttaagtcatgaccaaacaggcttgttggggacatatcatggggtgagctttgaagtgctggtggtccagaggggttgcagatacgtgacttggagcacccgtgtcttacgatggacagtgataaaggtgaacacacagagacagactattctctaagaatgtgagaaacctgatctggaagaggagctatataaacactatctgactatctttgtcttttggggccagtggctgttggcataatcacaagcctgtctgtcttcgagaagggacagtggagtcatccaggtgctgccacatgacaggcacggtgggcaccgatccacagtgggccccgccttccccagctcgcctccctgcctgtgctggcctggccttgcctgctggcaccattggagtaggagggggtggaacacagggggcccatcctgatcaggccccatctcaaggttggcactcctgcccatcacccttagaaggatcttttcccatggcttgacttccttcatttccctaactgaaatacacccactctcttggaataatgacgtaccactcagttggaccctcaagagtcactgctttgtctgtgctggtagtttgtgagaagtgacccgcacgcttccatttgatgcatttgatgtgagtgaatccatacatttgaatgtcattgtccttgagaccctacatgtgcagtttggctcatctcattaaagatgcttgatgtaataattggttagtttccttttattttcctgcaggcttttccatgagtattatttttttcaaagaacaaatctgtatggcttttccccatctccatattttgttttgctatgaattgctttgctttggtgaacttgtgcgctggccggcacgggtctgcttctgcactggcataatcttcaaaacctcatccttg

SEQ ID NO: 272342 - DNA, 303 bp, Homo sapiens
gaggttaagttacttgcccaaggtcacaaaatagagattaaaatttagttttgtctgactccatattcttaaccttcaaggtccactgcatctctgcagagcttcccaagctttccactgaaggcctctttatattctattgcacctatgtcatccacattttgaaagattttattactgagcacactgcatttgtgaactaataatttcttccatctggctgatgattatttttctactcctgtttctgttacaacatcaatccagactttaatcccaattattgaaggttcaacataatat

SEQ ID NO: 272343 - DNA, 374 bp, Homo sapiens
aataatgattggtaatactgtaggataaaatacattagtcctcagattaaaagtctatctataaatacatatatatccctggatacagcatagtgaaaccagaatcttccctataagacacttccttgactggagaaaagacagactatgaattaagatgaaaataaagaaattttcaggtaaacaaaggtgagtgagtgccactgttgggtcttcactaaagaaacattaaagggtgtatttcaacaagacaagaaaccccagaaggtatgagatacaagaaacactgagtatagcaattaataaaacatttggctgtgactgctgttgactagggaaagggttagggttttatggataattgtgtttaaaaa

SEQ ID NO: 272344 - DNA, 492 bp, Homo sapiens
ctgaccgaggagagaatagagccttgagtgcttcagaagagcctggctattctcatttgaaaagtctgaggacctgaagctgccatcctacctgcaagcccagctatgtatctaatgctactactcactttagctttggctcaactacttaaaatactggatggaaagtcttacattttacaaggtattttcatgtgtgctgaaacttccacctttgtgaggtaagagacagaggtcaaacttctcactcataggcctggggagatcttgcttaatgataattgtgtgtctccccacaaccttgcaaaatgaagattatccttatcaaacagaagataaaataggctcagcgtatttggcccaggaagtagcagagttgagtttcgacctcagctttgcaaatacaaaacccattctcttgtttgtcctgtagcttctctggaagcagtcttttccagaataattctgatagtatagattttcagatgatat

SEQ ID NO: 272345 - DNA, 370 bp, Homo sapiens
accacattttccgaaactctgttctattcagtaacaaaccattcaacctaaatattcatcattgcttcaaattcaatgttcttcctccaaagtcactctcaagcccacctgcctcactctgtcagttccccgatcaccagacctccaaacttgggcttcttgtatgaccaattctgctccttcactcccatcctaaggtttcctttcagtggcctcttgcaactgtccctagccctccatcctcccaggcatcctccttatcctcctccctggtgacagatcacctcccagcaggattcccctggcttccctagtgaggacctgagtcttgccttgtggcccgcttcaccatggctggacccccttcttt

SEQ ID NO: 272346 - DNA, 576 bp, Homo sapiens
tttttttttttcaagagataggatcttgctatgttgccaaggctggactcaaactcctgggctcaaataatttttgagccctcagactctcaagtaggctgggactacagatgcacatcaccataccaggcttaaatttcttgacaacttagtttgaaagtaaatgaataaatgattttccagaaaaaaagcccagcctactccaggccaggtgcaagttttagctgttttttcatgcttatttcatgaacactcacatggaaatgaccttggtatactgtacactctggtactttggttgcacagataaattcccccatctgggttatacaacaattagcctaaaacatgtccagtttaggacagacgttaatttataagttattttactgaaagcacaggcaaaaaaagcaaagtcaacagttttgaattataacatcagaaaaattgattttatacatgtttaaagtctctgaataatgctgatttaagcaatgatgcattgagtaatttgcaatttttttttttgagacagcgtctcactctgtcacccaggctggagtgcaatggcacaat

SEQ ID NO: 272347 - DNA, 434 bp, Homo sapiens
ctagtaacttttaatgaaaaagatgtgtgaacttttatcttgacacaaaacgttttttccctttgttttgtttaattcatttaatcagtagagggagttctggtatcatatgcctcctagcaaattttctccttaacttgaatatggagatctgactctacttctttacattagacagaatcaagaagctggcaagtccagctacatttggtaaggtgagtctttaagggctgtgcatagatatgagagcttagatcccagccaaaaatcagacagcaggactgggagaggcaggttaccttattggttattaacctaaagaattatagtgacaggaggctgggcgtggtggctcacaactgtaatcccagtactttgggagtctgaggcaggtggatcacgaggtcaggagttcgagaccagcctgaccaatg

SEQ ID NO: 272348 - DNA, 778 bp, Homo sapiens
ttaaccactgccttcttttgccagtaattgaaggaggcctgagtcccatatgagctactgctttagataatcaaacctccagaccctcctcttcttggagcctactccctgcttccctggtctcggcccttcttgctgcttccccctcgttggggccttctgtgcctgtgccagcttgttgccagaggctctgtgtttataggatgaggagccctatttggcctttgcccacatcctgctgcaatctgggcaggatctccttgtcctactgctgtggctgctgtcccccaggtgacccccgtgctgccggcccagcagggtccatgtgcctaacagctggcaggaccttgttcctgtcctcctgccacatgctggctgcagctctgcagacagtccccatttcatgctgatttgctttgattcttttcagacctgggagtgactcatgtttacttcaaaatgtgtgggccacaagtgtgccagagctgtcagaccttccggtgtgcaagctttgatcgttagaagacaagccttgaaggaaaaaacctccatttaggtgacaaaaccagatttagaataacctggcttacttgggatatctgcttagtgatctgtgcctttaagtactagagacttaggacatctgagccagaggagacctatgaggccatctgttcccatagctccattgtacagatgaagaaaccatgacccagagaggagtgtgacttgcctccagtcacccagctccaaagagcagagtaaaaaccagaaccca

SEQ ID NO: 272349 - DNA, 405 bp, Homo sapiens
ttttttttttgttgagacagtgtttcactcttgttacccaggctggagtgcaatggcgtgatctcagctcaccgcaacctccacctcctggattcaagcaattctcctacctcagcctcccgagtagctggaattacaggcatgtgccaccacgcccagctaattttgtatttttagtagagacagggtttctccatgttggtcaggctggtctcgaactcccaacctcaggtgatccgcccgcctcagcctcccaaaatactgggattacaggtgtgagccaccgcgcctggctttttactcactttttgaagccctgtctgagcattcatttgacctccgtgaagttctccatgaccccagtccttcagcacgtagaacgcaagctccatgaaagcagcaacc

SEQ ID NO: 272350 - DNA, 1071 bp, Homo sapiens
aaaaaaaaagaaaaaaaaagtccagctacacagaagcgaggagtgcgaagcaaatagccgcttcacgtcccacaccctggcagcagctgcgcccgggtctgtccggagatggtgtgtgcaagcgtattccagcacaagaatctggacttctgtttcttatgaaagcagctgatgccacactgtgtgccctgtgccgtactgtgccaggcacctggacggacctggcttctccctgtgcctctgaagggcggacggcgttgtgtctgcgcagtcctgcaggcgggagaactggagtgctgctgtcttcatttgctcacagggttgagcatctccagttactgggaccttcttgtctctccgcggggccccgttacctccttcctctcgtgtttcattgtgatgttcatcattttcttgaactgcagctggtctttatatgttaaggaacttttgccttctatcacctgttgacaacatttctttccctgcttgctcttttccttttgactcggagagcaaatgagatgttctttcaggcgatggtgtggtgggatggaccgcaaactcagcattgatagtggatgttggtcattctttttgactttccaacatcagaacccacttggggaatgggacgcagaacccctccctctgcagaagctgccgcactgcccaggctccttgcggtgagctgagcccaggccctgccggccccacactttgttgatggctgtgaggccgaaccataggtctgtgggcagaaaagtcacatcatgtgtcccgggtgagcgctgagtccaggcgaggcaggtgccctcgctgtcctcactgtgggcttcggggcactgccctgcagtttgaggaatttcctgttaaccttttctcttcctcagtcggccggaagagttttcagttgcttagaagcccactgccgatgctgagggcactgaccagccccggccctgggccctctgtgtggctcactcagcaggtgtgctgcccaacacaccaggcgccgtgagagcagtgggccacaaggaacgaggcgggggctgatggggagcaggtgct

SEQ ID NO: 272351 - DNA, 438 bp, Homo sapiens
atgcacttagtagcattctcgatagtgggcttggccactgggttcttgagctccattctcagggagcctacctacttcagcccagggaagggatagctcagacaagatacccagaggaggatgagcccagcaactcatggcccaggggtctttccatcatggccatttgtatattggctactaaatggcccctgttttttatttaaacacatgagttattttcctggaaaatccgcaaaaatacgtagtcggtttaattgatttagaggttcctgagccttcaaattcagtaatacataatttgccttcagaatcttcaattgtttgccttatttttaagagtacaggtaaaaaggggcctgtaggtggaggttgcagtgaaccgagagtgtgccactgcactccagcctgggcgacagattgagattccatctcaaa

SEQ ID NO: 272352 - DNA, 465 bp, Homo sapiens
cagccttcagccttagacctttcctctgacagaggctacccaaatgagaaggaaccagaaaaccaactctggtaatatgacaaaacaaggctgtttaacaccgcccctcccccccagaaaaaaaatcacagtagctcaccaacagtggatccaaaccaagaagaaatccctgatttacctgcaaaagaattcatattagttattaagctaatcaggaaggcaccagagaaaggcaaagcctaatgcaaggaaatccaaaaaaaaaacaatacacgaagtgaagggagaaacattcaatgaaatagatagtataaataaaaaaaccccaaaacttcacaaaacactggacacacttatagaaatgcaaaatgctctgggaaatctcagcaatagaattgaacaagtagaagaaattcagagcttgaagataagatcttcgaattaacccaatccaacaaagacaaa

SEQ ID NO: 272353 - DNA, 1843 bp, Homo sapiens
ttcccctcctggtgttgccccaaagcctaggagcttggcagggtcccacacaggatggtccttgtaggagacaggtttgacaagttgctgaggtgcctgatgggccaggcacttgtcatgaaatgagtttgcatcctgggggagcctcttcttcactggaaacctggcaaggatccaatttcccctttgcctgatccccacaggagcatagcagatagggaggggggtcacccaggtggctcttcctgcttggcccccactttccagaccattccaggcagggagagctgctgagctgactgcatgagctgcccacatggaggacccagccaccccttatgtccggcaggcagcccttgggctgttgcaggaccgtggccagttcttggtattgctcaagtcccctgggccttcagactggcgggtgacttcaagggagcaaccatcctgggcctctcctgggacaaacacttgccttcacccactatcgatgtcttgctcagccctcagaggagcgtggttggcgtggattacttcatgccttgattctgccttcccggaaaccacggtggcagcaggcttggatgtcaccaagtcaccgtgtttcatgctatttctggaggttctcgcctttgtggcctcggaaaggaaggcgatctggtgctttggggaaagccctcgggatgctcctccagatggtcttcttcaggccttttgctcagcattggtctgatcagttctgccagctctgggccatgatctcttggcactggcgcggctttccttcaataattccataaactccagacttcgtgtcttttgcatggaaagcacgcggtgcccatttcatcgacaccgcaccccggagtccaaacgtcagccctgcgggtgttgggtttgttagggacaatttcgggctcaggtgcagggggcgcttccccagcgcgggcgcttcctgggccccatctgaggccgtgggctcctggcaggaggacctggagttttcagatccccgggaaggatgcatttcccccactctcgggcacaagctgccctttgctggcgttgggcacggatcatggcctcgcagaagcccgcgacagcgtggagcaggtggtgcccccgcccgggactcctggtgggtgatggctccgggaggccttggctgggacagagtggggcctccgggtcggtcagcggcccgagcccggctgcggctctcggaggcttgggtttggaagacaccgcctgccatcccgcggcgcctctcggggtccgctcccccggactggccctgcccaccgcgcgcgagtagtagcgggcggccaggagtcagtggcaggcgcggccggtgggatgccgggtaggaggctgcgctggagcccgctgggcagcgccgacccctaaggcagccgggcgggtgagcgagcagaggcgtgggcggctgaggggctgaggggctgaggcggctgaggcggctgaggggctgaggaggctgaggggctgaggggctgaggcggctgaggggctgaggggctgaggggcgggcagcctggccggtccctgccgcagggtccaccgcacgtcacgtggccgaatccctcgggctgctttctctctgggctgttttcttactgtgaacctcgtgggctcctgctcggtgtcctttcttactctgtctctgtttttgcattctattggcaagtattttatttaggatattttactgatataactgaggatgaactgtgttttgcagcattttgttttattacgcgttttctcctagattttggtatcatttttatgctgacttgattaaacattttggaaactttcctgg

SEQ ID NO: 272354 - DNA, 450 bp, Homo sapiens
tgatcgtgccactgcactccagcctgagcgacagagcaagaccctgtcttaaaaaacaataaacaaacaaaagactctctcccactgccagggccccttgggaattcaggtgtggtcacagcatgggggaggggaggcctggaagaaagagccatggactttggtcccttcctgtaataacctcagaggcaaggcttccttatccttattttatagaagggtaaactgaggccacaggtgagtttgtttttggggtggagcttcaccatgggtgtcatcccagggcctttgtgtccttttgggtctgtggggatagacagcaatgactaaggccaggcaaggtggctcacacctgtaatcccagccctttgggaggctgaggtgggtggatcacttcaggtcaggagtttgagaacagcctggccaacatgttgaaaccctgtcattact

SEQ ID NO: 272355 - DNA, 420 bp, Homo sapiens
ggcagtacatcaatagcagtataattaaggtaataggtagcgtgccatctaatcaagttacttactgtaataccaatgtgggttaacttgctttaacatcctctgaatactaattactattactttcagaattttataatatgcaatatattgaacagaatttaacgtagctgaataataattattataccaataaataaaatagttattacccaagaaacataccgtagcttgttttaatagatgacttcgaaggtactccagttacaaaccaccatgacattagagaatgtagcctatgtctcattttaaaagatgccttaatgtaaacatcatatcctctatctctaatatagtttgtgtaaggctgatttttatcagaaattgaaatttaacttaaaaatcaaggttttacatttg

SEQ ID NO: 272356 - DNA, 910 bp, Homo sapiens
agataatgattaaaactactctggaatttttgaatgctagagcattgtgagcatcatatgtattttgtgtttccatagttttacaaaggacgagcaaatactcaagagaaaattataaagagagctcaaagacttatttaaaagatgtcaaatgcttattatttttccccctcatctctcccatgagattctaaaaaaagtagaattttgcctgggtgcagtgactcacacctgtactcccagcacttttggaggctgaggcgggaggatcgcttgagctcaggagttggagaccagcctgggcaacatagacctcatctctacaaataatcaaaaaattagctgggcatggtggctcacatctgtggtcccggctactttgtaggctgaggtggtagaattgcttgagtccaggtggttgaggctgcagtgagtcatgatcacatcactgcactctaacctgctcaacaaagggagaccccgtctcaacagacaaaaacatggaatataaagcctaaactaaatgcacttttctcatgtgtacactgcttacaaattctactgtacttgaatcttcaagctaactcactttcagaaaaaaaatgttcaactgagccttggttcaaccatcattgttataatggtttcttttacctttgagaatagcatatgaaagtgggagagagattataggtatgagccactgtgcccggccgcaaccttcaattatttagataattgttatatctttagccttcctaaggctgttatgtcttcaagctttctaagcattaacatttgatggtttatgttatgtgtatcctaagtgactttctctgagtcccttgtgtaagggactatgtcttttatattgtatattgcttaggcacataaatgataagtttggcta

SEQ ID NO: 272357 - DNA, 373 bp, Homo sapiens
agcaccgggaagcaggggccgagccttccccgctctgtgcctgggggctctgggcactgtctacacctgggaggtggtcagcatatgtgcgtgggaacttgctggaaggaaggaatgacccttctagccatggaacggtggtcatccgtgagccacggcctcaggaggtgccttcctaatgtgcaggtgacgattgcctctgagctcaggcatgcagcttctgggatgcactctcctttcacggcaaagcattctgcataggaaaaaccgtctctgcgtctccaagctgtggcctagcccttcattcatcaaatgggatacaactttcatttcttattaaaatctggaagtcactctccatttgtaagatatc

SEQ ID NO: 272358 - DNA, 493 bp, Homo sapiens
tccctgggtctggctcccgctcggcctcaggtggctctgctccgtccttccttgccgcaggcgcagtccagtctctgcgagtccccgggatgcgagcccgactttgagccctcggttaccatgccactgctctccaccagatggcctcagatactagcgacttctttgggagcacgcttactcctcgagaaaggaacccagaggaagggatgggaggccagattgctgctggcgctcagcccagaccgaacctacagactcagcagaggcgacctgtgtgccccggtggcgttctctggcttcctgggttgggagggggggttactccctccccgcatcccccccatgaggtcgtctagttttgtcccaggttgggtggggactgtggtttttttccctcagactgtaagccttgggggaggggggcgtgcatataggtacataggcactgcgtcggcaccaaagagctaaataaaaggattgttgaattttc

SEQ ID NO: 272359 - DNA, 365 bp, Homo sapiens
cagtagaactttttatgataatggaaatgatctgtatctgtgctgtccaatatagtagccactagccatgtatggctattgagtacttaaatgtggctactgcacatgagctgaattttcagttttattttaatagccacagcattgggcagcacagacctcgagttaggggtttgtggttttcatgtggagaagatgacaatgggaagtgggggaagtgaatggctttcccattagcaccgcctactcaattcccagtagaaacagatgttagactgcgagtgggctaataaacagtaataaacgggagaaaatggaggggcattcttgcctatgttaatctataacattcctatgttaatctt

SEQ ID NO: 272360 - DNA, 476 bp, Homo sapiens
cagatgagcctcagttacaagactaatagcagagcttgagcgtctgctctctactttacctcgtagcctgttgtcatcacagtggggagagaggcttttataatttcatgggataaactggtggtaattatagatcattggtttaaaatatgaattgatgttaaaatggaatacatgatagaaaaaataaagataggctgggcacggtgtcttatgcctgtaatcccatcattttgggaggtggagatgggaggattgcttaagtctgagaagtttaaaaccagcctgggcaacatagtgagagcttatctctacaaaacaataaaaaaatttgccaggtatgttggtgtatacctgtagttcagctgctcaggaggctgaggccagaggatggtttgagtctgggagacagagggtgtgagccatgatcgtgccactgtactgcagcctgggcaacagaggaagacgttgtctca

SEQ ID NO: 272361 - DNA, 388 bp, Homo sapiens
atatagagtcacctacttgtaactgtgccttgtattctctgtcttccatctgttcttatgaatgaaatgttccgagctgtatccttgcaacttgtgcactagatcccattccttcccctactcaaagagtgattcagcaactttctcctctcccctgcagcatcactcccaccctctctattgggtcattcccacaaccagcttggtggaagcaacaatcagcccgctcccggattcttgcagtagcctcctacctggtctccttttagcccctgctccctttcactttattttcatcgcaatagccagaatgattccattaaaatccactcttgctcagaaccctccagaggcttctcattcactaagtataaaagttaaaatctct

SEQ ID NO: 272362 - DNA, 413 bp, Homo sapiens
tttttttgtgatggagtttcactcttgtgcgatcatggctcacggcaacctctggcctcacgggttcaagcgattctcctgcctctgcctcctgagtagctgggattacaggcatgcgccaccacgcctggctaattttgtatttttagtagagacggggtttctccatgtgggccaggctggtctcgaactcccgacctcatctgcccacctcggcggcctcccaaagtgctgggattacaggcgtaaaccaccgcgcttggccagaaatatgtagattttaaagtgaatgaaaataagaatctttaaattatcaaccaaaatttgtaagttaagtcactaaaaatgaaattagaggatctattgtaattttgatgcaatttttttgaagatactttccaaatagtattttt

SEQ ID NO: 272363 - DNA, 684 bp, Homo sapiens
tcattcttaaatgatagtttaaaagaatataaaatttcagtagaattgattttcccttacccttcactgtcttctgttatctaagatgttcatatagttgtcactacttggtagataaactgttttatctagtctcatggctttatgtctatctgtcaatgactaacaaatttctatcttgagcctgcatctttccccttgagtttgcactagaaggaccaactgcccacgtgacatccattcttgaatgcctgataggcatttcaaacgttaacatttcaaagccaaactcctccccaatcctgtacctccttcagtcttctttatctcagctaatatcaacctcagccttgcaatcactcaggtcagaaaccctgaagtatttcttcatgccctctgtctcatccccttctttccaatcattccatgaccatcatctaggtctcatagttttgtggttgtttccaggttctatccagttaccaagctcagaatcagaccttccaattttggtttcgagttcctatcccaaatattctatcctaaaatgatattcaggaaactgaagatgtaattattgaactattggatgattcagttcctttttttggttatcagggttagtctttctggttttgatatgttttcttttgttgttgttattattattatttttgccaggct

SEQ ID NO: 272364 - DNA, 536 bp, Homo sapiens
aaatagtaatacaataattgtgggataattcagtataacccacttttaacaatggatagaacattcagacagaaaacaggtaagcaaacagcagacttgaacagcgctatagacaacatggacctaacatgtatacaaaacattctacctgacagtggcagaatatatatttctctcatgcacagataggacattctccataatagatcacattatgtcacaaaacaagtcttaacaaatggaagactgaaaacataccaagtatcttttctgaccataatggaacaaaactagaaatcagtagcagaaggaatactggaaaattcacaaatatgtggaaatttaacatactcttgaataaccagtgagtcaaagaagaaatcaaaagggaaattagaaaatatcttcggatgaaagcacaatatattaaaacgtgggatatagcaaaagcagtactgagggaattttataacaataactaaatttaaaaagaaaaatttcaaataagctaatgttacacctcaaggaactagaaa

SEQ ID NO: 272365 - DNA, 326 bp, Homo sapiens
ctggatagctgaaggggaacaggcattgcctgctgtgtttatttttccaaactgcttgcattttggacaagcggctctaaatcaatgtggtggttaggggctccatcgtctggtttatctcgtattcagacctttccattcagccaagtgggtaaatggtcccgacttgtcttgtttgtgtgaccacctttttgctacacctgaaaaaagtaggtattggtctgtggagaccactctgattaaagcagagcatggttaagtagtaacctatgcagttgacccctactggtgaatttaaacttcttaaaaagtttttaagataaatg

SEQ ID NO: 272366 - DNA, 353 bp, Homo sapiens
tttttagtcggagtctcactctgtcacgcaggctgcagtgcagtggcacaatctcagctcactgcaagctccacctcccgggttcacaccattctcctgcctcagcctcccgaacagctgggactacaggcgcccgccaccatgcccggctaattttttgtatttttagtagagatggggtttcaccgtgttagccaggatggtctcgatctcctgacctcacgatccacctgcctcggcctcccaaagtgctgggattcaggcgtgagccactgcgcctggcaccaaataagaaaatatggtaattctttactatctttatccactcaaaaagcttcatttaaagttgatgg

SEQ ID NO: 272367 - DNA, 418 bp, Homo sapiens
taacatctttctgaaccaaagcccatccgagaactagatctgactatggaccaccaccctgggatcatggtttgcactccactgactgttcaatgtcttattccagtgcccatgggcacttcaaattgagcctgccccagaccatctcttccccaaacccacctctcctccccaccgtgtaccttatctcagttagcaaacttccttctaacctgctcacccaagctggaaatatggatgagggtgtcctttccttcctcctttccctcctcctcccacattcactaaactctaccaacataacttgctaaataaatcttacctattcttacttccccatcccttaccaccattattgtagcttgggctgctagcatctgttgcctggcccagtagcctttcaagagttttgactgat

SEQ ID NO: 272368 - DNA, 163 bp, Homo sapiens
cactcttaagtgtgaacaatcaagtatcaccagacatgtgaggaaagtctccaacataaaatattaaagattaaaataaacaaataaatgaataaaggcaacttggagtaacaaaaagtgcagtgaaaagaacacttaaacatattattgacctcaaaaaaaa

SEQ ID NO: 272369 - DNA, 447 bp, Homo sapiens
gccattcagaattcagcttattttttgccaccttgggaaaagctttcctgactccctgtggctgactcggggtgtgcttctataacattcctgtgcacaactctatcatagcatttacctctgtttttttctttgtttttgttttttcttagagagagtctcaaactcttgggctcaagcaatgcccccacctcagcctcccaaagtgctgggattacaggtgtgagccaccacacccagccttacctctcatttaattgtcaaaaaaaaaaggcttcaggccatgcatggtggttcactcctgtaattccagcactttgggaggccaaggtggaaggattgcttgaaccaggagatcaaggctgtgttaagcgatgctcacaccgccacactatagcctgggcaatagggcaaaaccttgtctcaaacaaaaaagaaaaaagagaa

SEQ ID NO: 272370 - DNA, 409 bp, Homo sapiens
tcctgccccagaactcacgatgcctgggcacactttgcaggcaaagtgtggaagccgggcagaatctagagtgcagtgctcactagctgtgagaccgtgaatggcctggcatttctgagtgtgaactcatccacatgtgctacatgggaacatctcactgccctaaagaaggattgcaagcaagtatgccctgagtgtggcctagcacatctcctgagctcggtacatattagtttccttattcccaataattcttatctcccctttccctctttggggacgtacgaaaaaaaaaaggttgctttgttatgtcatgtgtaagagagggttttccaaaagtcccaccaaagaacaaataattgcctttttatgggtttatccctccaattaaatttcaagtgccttgaga

SEQ ID NO: 272371 - DNA, 340 bp, Homo sapiens
taggaacggatcagtctaaccccaaatgtaatcctgaaacaggattacaaggaagcacagccgtctctatctaaatttaaatcccgaagttctcatttatttaaaaacatcctatgatttataaagccatgctcaggtgttttctcacagctcatgatcctttccctgcattgaacccaacagcagtatgctgtcacgattcacctgcagtaacgctttctcctgagtatttttctgcctttaggacttgaaagtgcttcagagcctgcgtttggtaacctttaggtccagttggagatttatttagtgtgcttcatcctggagttttcctcgtttcggt

SEQ ID NO: 272372 - DNA, 451 bp, Homo sapiens
ctttttgacttaaccttttttgatattagttatcatagcaacttactagggaatagagaattatttagatacacccaatatatatattctacaaaagttgtgggaaggaaacccagtattgctataatgaaaacaatataggtgacctgaggttttagtcttggctataccactgacaatcactttgtttctctagatgtcattttccttttctataaaaggaagggtggattagctcaagtccttgcaacttaataattttcttgacttgattatataacaggcatctgttaaaagcaggtaagtagtggccagtcacaatggcttacgcctgtaatcccagctttcagggagggagaggtgggaggatagcttgagcccaggagttcgagacctgcctgggcaatatagtgagactccgttctccacaaaaaagggagaaaaaaaagac

SEQ ID NO: 272373 - DNA, 305 bp, Homo sapiens
cagagcccacaggagttgctgatggcttccgtgagggggatgacagggaaggtgaggaatcaaggcagagtctcagctttgggatctgagattcattcaacaaataattaattcattgccacgtgccaggcctattctaaaagttgaggatatgaagacaacagtggtgatggcctcacgcagtaatcccagcactttgggatgttgaggcaggaggatctcttgagcctgggaggtggaggctgcagtgagccatgatttcaccactgcactccagcctgagtgacagagcaagaccctatctc

SEQ ID NO: 272374 - DNA, 868 bp, Homo sapiens
gtgttgttttaggtaatctcatcaataagagtgttttcttggaaaggaaccagtgagcagtgtttgtgatggagcaaagcacggggtatttacactgtggaggaaactgctccatgataataaaagataaaaacctaaaaaagattagtttggctgctaaagcattcctttcccagctataattatctctggcttttgtgaagttgctagcacagcaactaaacaattgctttacagagttagattagtggtgcaatttcttctctttcatctccccttccctccccacccccccaccaaattatggcactactttctgttctggaaagagattcctcacagcagtaaaatcaacactaatgtttattgctctactccaggatgtttttgttttgtttctcgtcatttaaaaagtattttaagttatataccagcagcttcaagtttaatgccattagaaattgccatcaggttcctaggatttagagatggaggaaggattatttggaattatgcttcagtatcgtattttagaaggggagatagaggccgggtgcggtggctcatgcctgtaatctcagcactttgggaggctgagttgggtggatcacctgagatcagacgtttgagaccagcctggccaacacgacggaaccccatctctactaaaaatacaaaaaagttagccgggcgtggtggcgcatgcctgtagtcccagctactcgggaggctcaggcaggagaatcgtttgaatccgggaggtggaggttgcagtgagccgatatcgtgccattgcactccagcctgggcaacaagagcaaaactccgtctcaaaaaaaaaaaaagaggctcacgcctgtaatcccag

SEQ ID NO: 272375 - DNA, 407 bp, Homo sapiens
caacagagagaagtgcttctctttctggaatgcccactggtgctactactaaggtctccagaacagaagccctctccttaggcagaacatccaccccaggtcctgctcaatccacaatatcaccagaaatctccacggaaaccatcactagaatttctactcccctcaccacgacaggatcagcagaaatgaccatcacccccaaaacaggtcattctggggcatcctcacaaggtacctttaccttggacacatcaagcagagcctcctggccaggaactcactcagctgcaactcacagatctccacactcagggatgaccactcctatgagcagaggtcctgaggatgtgtcatggccaagccgcccatcagtggaaaaaactagccctccatcttccctggtg

SEQ ID NO: 272376 - DNA, 189 bp, Homo sapiens
aaggtggaaagctctccaacccatcttctacagcacagcttcctgaacagggtataagtatgctgagatgcaggctgctctgggccccgagcaacctctccagttatcctcatatgcatgtatgaatactgtcatttttctgtgcgtgcagtgaaaatggcctcatctcataccatgactccacctcca

SEQ ID NO: 272377 - DNA, 198 bp, Homo sapiens
caacttcctctttttctttattctccattagttttacctatttagcagtgttttaagttgttagccaatcaggttcagtttaaattgtaatttctagctccagtcaatggagacaacacacagtagcaaggacaagctgcataaaggataaaaattgcttccctcttttctccagaaagtaaaattaccttactgaga

SEQ ID NO: 272378 - DNA, 249 bp, Homo sapiens
gaaaaaagtaagttattggtaataaaccctcaataaactagatatacattatcttagatggacatagacaaacagagtgttagtgaattagaagatggttctaaggaagtggcttagagaacagcatacaaattgactaggcacagtgtttcacgcttgtaatcctagcactttgagaggccgaggtgggcgaatcacctgaggtcaggagttcgagatcagcctggacaacatggtgaaaccccatct

SEQ ID NO: 272379 - DNA, 433 bp, Homo sapiens
caggggtcactgaaatgccatgggtatatccatacctataggctgaatgaatagaagtcactggatcctgaacatgtaagtatttttctaggttactaaataaaatgtctcccttttcctaagtttagtttgttccccccacctctcaccccaactctcatctgtcagtttctgtgctccaattagaagtacttgttagtatattctcactcatgggtgggaattgaacaatgagatcacatggacacaggaaggggaatatcacactctggggactgtggtggggtcgggggaggggggagggatagcattgggagatatacctaatgctagatgatgagttagggggtgcagcacaccagcatggcacatgtatacatatgtaactaaactgcacaatgtgcacatgtaccctaaaacttaaagtataata

SEQ ID NO: 272380 - DNA, 682 bp, Homo sapiens
cactctcttaaagctattcccattctgagctgtcactattcttggcagaagcttgtcttttatttcaagacaacatcattgtgcaaatgttgctaggtcccaagataaaaagcacagaatcaaaatgattccattttctgttagtgagtggccatcttcactagctccctccttcagaaccttactcaaaaatctttagttctgaacctttctggattaacctcactttgcccttcctactctgatctatgatccatgtctttttctcacacggatatgattagttaaatgtaaaatgacatggttcccctctctacccatttttcaagtgactcattcatccaacaaatacatgttgagtgctttctgcatgtcttatgtctgccacttagaatataatcagtgtacaaaacaaagacccttgccttcactgcactcatgttctagttgtgcgttgtgcgtgtctttatttctcaataagagtttcatggccctaccacctaaaaatgccacaaaacaacaatcccacaatcccattcagaaagtgaatgcatttaacttgaaacacgcagtataaatctaaaggagcagggtcaaataaatgaggctgaggctgtggctcatacttgtaatcccaccactttgggaggcccaggtaggatgttcacttgaggccaagagc

SEQ ID NO: 272381 - DNA, 440 bp, Homo sapiens
gcatttacttgctgtatgttttagtggatccttatcctttgcaaaaatttaattctagtcattaatctgtcacttagctcctgtgaccttgcctgtgtaaatacagttaacatcagctttatctacctcagtcattgtttgttgaaagagcatatgaaataataaaagagcatttgtgtttgtatggtgggtattggttccttctgctttctctacatggaaaagtgattgtcatttctatggtaggcttatttttaggcctattgtcttcatccccttaaatattggaaatctttgtaaattctcactcatacctaaagcagagaacctacgtgccatgtggtacttgttttttttttagtgtgtgtgggattcagaaattgttaataatgaatattcaagaaggtacttcagtttttatgttattgagataaataatg

SEQ ID NO: 272382 - DNA, 620 bp, Homo sapiens
  misc_feature (392)..(392): n is a, c, g, or t
  misc_feature (462)..(462): n is a, c, g, or t
gtatcgtatcatgtcatgctgttccagtgtaaacccggcgcctaccgggtcctgaattggaataagcctgcggatacatttaccacttgattagtactattatattatttactgtttgatatatctaagcatagttcttcaaatgcatactccctgagggaagaaactttgacttacatgtaccaccagagcaagcagcacaatgttggacaatacacatatttgctataatgggcaaccaaagaatctcatcactggggtcaggattagaaactctactataactcaatctcaggcaattagaatatatcctaaaataattctctgcattgcaataatcaagaattaacattaggtcgggcatggtggcaggagtaatcagaggtgttctngtgttgtgataagggtggagaggttaaaggagccacttattagtaatgttgatagtagaatgatggctanggtgacttcatatgagattgtttgggctactgctcgcagtgcgccgatcagggcgtagtttgagtttgatgctcaccctgatcagaggattgagtaaacgcctaggatacgaggtggtctagaataaataggaggcctaggttgaggtaatctgaggg

SEQ ID NO: 272383 - DNA, 412 bp, Homo sapiens
gcacggggctgaaaggaatgtgggtgctccgtctgcagctagtgagctcttggttgcctcactgtttactggaggtgcaaggtgcagaactgtgtgtgtcatatcccatcacttacctgttgattggttggcagagtatgagcgtacacgcatacgcgcatgcacacaaactttcctatttgcttatattacaaaccaaacaaaattaaagaataaaccagaaaccaatgaaaaagggttatagtctatatggggaagatgagatacaaagggtcagatctgaagcctgacttctcttctctgaatgtaccttgttttatagttttttactttgaatcatgtattgctttacataattataaagccaaactaagcccaaatcagaaagctattcttaaaaagcaagaacaaa

SEQ ID NO: 272384 - DNA, 432 bp, Homo sapiens
caatgagaactttaatatgactgaccttcaaatcccaagacaggcttgaagcacatccagactccctctgaaaaagactgctttgaagttcaaacgttttctgctgttgctttacttcacttatttattttggttacagcaactctaaaaagcttaaccaaaaagaaactgatggattaactccaaattcactcttggcccttctaaatgcagggcgatgaggaaaccctcagcccccctcagaggagaagttcccacttgctggccgtcactgcccttcctgcctggaaggagtccctccatgttgcaggttactttacaacacacacccacaccttttttcccttgaagctcatcaagtgaagttatcagctctttagagaaatcccttcaattcctcacagtatttaaaacaaattatttttacctgca

SEQ ID NO: 272385 - DNA, 471 bp, Homo sapiens
gaagtcagggtcttgccttatctagtcaggctggagtgcatgcagcgcagtcacggcatactgcagcctcagagacctcctggtttcaagtggtcctcccgccccaccctcctgagtagttaggactacaggcatgcactaatatttaaaactctttgtagagattaggtcttgttatgttgcccaggctggtgtagaactcctgggctcaaatgattcttctctctcagcctcccagagtgctggtattaaaggtgtgagccaccacaacccacctgttattaaatatctgaatgtttaagtctctgaaaaaaatgatggacaaggtaagatagatggataaaattgctgaaaacagctcatgatcaaaatagaaccctaaagagttatctgtatatccatgtgatttctgttatttgccatcataataccagaatcaaaatgaaaaataaatttcatgtaaatgaaaaa

SEQ ID NO: 272386 - DNA, 362 bp, Homo sapiens
tgtctacatgaggaagcgaaggtccagagaggggaacaaccaaagtcacagcgtgtcggttgtagaaagcatccaggatttctaatcctgatttaggccaaggttcgccagaaatcaaactcaaaagggaaaaagttgaagatctacaacaaatttaagtaactggggaacatccttcctccccaccatctgtgttggtgatctttgacctgaagtccctgaacaccctatagatgacggcatgtacatgtgagtatttcctgtgatcccaaactgtgaacagccactggctggtctgtgtctttgttgtcttcccaaagcttataaggaatccccaatacactggtctgctaagtgttttt

SEQ ID NO: 272387 - DNA, 1108 bp, Homo sapiens
ttttcaagttggctgactagggatgttggatgccaggtctcctcagaaagatcaaagttacaggtgaatgcccatgatttaaatggaaatctgagggaatgaagcaaggacctgttggagcacccatgggaagaacctggggcacaaaagaggaaagcagcaagagactgacagagattgtctccctagaaacctggaccacgaaaagggtggagaggagaaaactctgtgctaaatattactcctggaaaagtgcatttgcttcggagaaatctttatcatgggtctctaagaggaaggaacaatagcatcttctatgtgccgaggtagcgcaataatgaactctgttcaagtggatcaaaagccatcaaggtcaaaattaggcacaggctgtacaggaagcgtgattctggcatctgtttggtttctgggaaggcctcaggaaacttaaagtcatggaagaaggggaagggagagcaggcacgtcttacatgaccaaagcaggaagaagagagagaagtgtggaggtgctatacacttttaaacagccagatcttgtgagaactctgtcagaagaacagcactagggaaatggtgctaaaccattcttggggactccatccctgtgatacaatcacctcccaccaggccccacctccaacactgagaattacaactcaacatgagatttggatggggacacagatccaaaccatatcaaattttcacacctttcagtaaagctttatattttttaaggatatttaagtacttggaagtagaagtagagagtaaggggaatattgtacagccatcacagcctttgtctactaaagaagtcagtttcatgtgacaaatgttcattttaatattcgcttcttcagtccatctgggggtgtttccttatttctataagatgctgcttttcaaaaaaattaccgaaagcattctggaaatccaagagtaattgtgtgaactataagcattagaaaacacagacataagttgaaaatatttatgaacctaaatagatgtaaagctagtgactcatattttataatgtattcacagatgatatttcttaaataaagtaggcatttctttaaaa

SEQ ID NO: 272388 - DNA, 338 bp, Homo sapiens
taacagctattagtcagggtttactagagaaaagagctaataggatgtgtgtatgtatgtatatatatacatagagaggatttgtttaaggaattggctcatgtgattgtggagccttggcaagtcctaaccctgcagggtaggcccacaggctggagactcaaggaagagttctagttgagtccaaaggcagttggctggctgaatccctcctgttcagcagaggtcagtgttctgttaaggccatcaactgattggatgagtcccacccacattatggagggtggtccgctttactctaagtctgctcatttaaatgtaatcttatcttaaaaaaa

SEQ ID NO: 272389 - DNA, 537 bp, Homo sapiens
ggggcctaacagaacttgtagatagatgagtgtgagttgtaaaggaaagagtgagtgatcaagaattactcatagatttttaaacctccagcataattaggtgcacagtgacattgggaagaggtttagatgggaaaaatcacagttcttcgcttgtaattgaattcattactaacctcatctcgtttgtttttggggttgttccactggaaaaaggaaaaagctacttgtttctttgagttaggcaccaaggcaaaatcataatttatgatgtaggtgtgttgaaaatttttggattgttgtatttatatagcatatttatgctctagagcattcgtgttgtggtttacaatttaagcatgtgattaagacagaatagccactgaacttacaatagggcacagcagtattacaaaataactacacaaggttataaattaaaacctttgtttacgtaatttatatgctctttagagttaaactttaaaaaaaaagcttctaagtttctgcccagttttatgtcttgtaaaaaaaaaa

SEQ ID NO: 272390 - DNA, 319 bp, Homo sapiens
ttcagactgacatttccttctttggaatggtaaccaggccaatgaatcaagtgaaccaacagacctggtatatctgaatttcagtaaggaatttgattttttttttaatgatgagaacatggaccaagtacaaattagttgaaaacctatggcgctgaatgatgaattgatttcaaacatgaaacagatttttagacccaccaggctctgaattctctggaggtccacagtttcaatgaagatttagatgaagataaagaccaagactttcctatttgtagatgacaaaactgggagataaactatcagtcaaaagaat

SEQ ID NO: 272391 - DNA, 418 bp, Homo sapiens
agaaaagcttggataattgttctggtaagaactcaaccaattggtgtttgcctttggctgtgcatagggaatccttctcacttggtagttgttgggcagcatacggttttagggtgtttcagagtccttagtcttgttgagatttatccctcgactagaggggatcccggaggtctttcccaaaacttcccttagaaatggtcctaggcttactccaaacatgttcatccaccaacttttggagtcttccagcccaatgcggaggtgctggctgctggtatcttttgaaccgcagattccatttcttcctctgtaaaatggaaacagtgtcttctgttatgagaagaaattgaatcctattagccaaggactccagaaattgatgtgctttaagcaaatggggataaaaaggagacga

SEQ ID NO: 272392 - DNA, 397 bp, Homo sapiens
atagcccaagatggctgctggatcaccagccatcaggcaggtaaccatcaggaaagaggaaagacaaaagagagcatgcctgtgtacctgttaaccaagaagcattcctgaatgtcccacacagcaacttttgcttgcttttcattggccaagcttagccacttagcctgcctaactgcaaaggagactggagaatgaggtctgttatttgggtacaaaaatcaaatttctgttactaacggagaaagtggatactgggtagaccaagagccaagtctgcttcaaaaggtaactgtggaaaacacagtgtaatgaaaataaagcaatattattaaagtctagttagatatattgcttgctaagcctgagccttctctcccattattaaaaaaaaaaa

SEQ ID NO: 272393 - DNA, 308 bp, Homo sapiens
caggcttgatgactcagctaacccacttgcttcaaatattctgggagacctctggagcccgggaggacaaatctggtgtggattaagaaagagcagcttctatttttacctaacatgtcagctgcatatttcaatcctgacagcacatttgttttagagaaatttttatttacaatgcctagaacaaaaaagaacaaaggaagtggacaggttaagaaccaacccagcttgctaatggagttagaaaacacctcccagagattgccagagaaatttttatttacaatgcctagaacaaaaaaaaaaag

SEQ ID NO: 272394 - DNA, 350 bp, Homo sapiens
agatgggaactgttaaaataattaatcaggaggacatttacatgagtcaccttcagcacctttggttgctacctaagcaaatggaaaaccaactcaatgtaaacagtaaaatgaaaccagcgtaaccaatcagaaactgccagctaacttctaactagagactttaccaatcagaaactgacctctcaccagggactttctgctttaaccaaatattttctttgtcttgcttccatgagcaccttataaaagccccctcctctcctcccctcggagcgccaggctgcttgtggtctggtgctgcccgattcctgaatcatttaaagctcaaataaactcatgacatttta

SEQ ID NO: 272395 - DNA, 376 bp, Homo sapiens
ttcttcatccagtctatcattgatgggcatttgggttggttccaagtctttgttattgtgaatagtgctgcaataaacatgtgtgcatgtgtctttatagtagaatgatttataatcctttgaatatatacccaataatgggattactgggtcaaatggtatttctagttctagttccttgaggaatcgccacactgtcttccacaatggttgaactaatttgaaacatacatatttttatatcacaactattatagacatctcaaaatattgttgatgcttattactatttagaaaatacaatagttttttaacctgaggccagatcatgttatttcattcatcaataaacacatatatcacaactttaatattt

SEQ ID NO: 272396 - DNA, 321 bp, Homo sapiens
gccactgtgacagccttttttgggtacccacattcagtggatcccaagctcttgtgtggcatctaagatgaatgagatagcccagacacttgaaggatggtgaaggtggagaattgtgttaggcaatgggaaatgcctctcagcaaagaggggagccggagaggggacaggacagcaatacctaatgagcaattaaagtgacttactgagagtgaaggcttcttgcaggtcacagcagccatatgtcacatcagacataaggcactgaacagaagcaattcaacggaatcatgtcatccatcaggcaaaatacatgcagag

SEQ ID NO: 272397 - DNA, 436 bp, Homo sapiens
atccgcggaaatgcaagcacgcagcgccaagcccaacccagtaggtgccaggccctgggtgcaggcttcagcttcacgccacatcctctctctcttttcagtctctgagtgacttgactcagccagggagaggagatacctacacatccgcatgaaggcgcgtgggaggaagccgagaaatgacggatggcgcagggcctactgcagccgcacgtagactagctccttctttacgggcaaaaccccctacttgtctgcagtgggaaaggagtccgttcagggcaagctctgatcgctgagctatggatgtagatggtaactaggcgtctggaggtcattacacaccatattcggatggtggaaatcattgcttatttcaggacactaaaatggtccatttttatgtattaaagttattaagaatgaactggctggg

SEQ ID NO: 272398 - DNA, 498 bp, Homo sapiens
tcggccggtaccgatgtatcgcccaacacactttgtaaaaggactcttccatcaagagtgggaaaaccatgggggaggactaggacccatatgggaattattacctctcagggccgagaggacagaatggatataatctgaatcctgttaaattttctctaactgtttcttagctgcactgtttatggaaataccaggaccagtttatgtttgtggttttgggaaaaattatttgtgttggggattgttatccccaacacccaccccaaatatttcccaggtctcgctgagctctgccagtctgttttcactgccctttgaaactcataactaagacaccaaagcttccagatgcctccagatgcttccagatctgaccaagactgctgaggcagacaaagcatggaccacagcgatggggcatgagagagtggggctgccttccctctgccggggcagcagaggctgaggctgtgactgtgttgggcgataacatca

SEQ ID NO: 272399 - DNA, 496 bp, Homo sapiens
atatatttttgaatgaagttcaaggcatgtatttttatgtgttaaccaaaagatgcattcaaggatgttaatctcagcaggatttgtaatacacaaaaattgaaaaaaacctcaaatgtctatcaatggtagaatggaattttatacagcaatggaaatgcatgaactatgactattagcagcaacatgaatgattttcataaaaatagttttgagcaaagaatccagatataaaagagggcatgccctatgattctacgtatattaagtccaaacacaagcagtactatctatgatagtaaaatggtaggctaaacattggggagttattacattgacaacaacatgaaggggtttatgggattctggtaatgttttgtttcctgatctgggcactgggtaccaggatgtatttactttgtgaacatttaaccatctacgatttttggatttttctgggtatatgttatactttcaataaaacattttcatgaga

SEQ ID NO: 272400 - DNA, 522 bp, Homo sapiens
tgactactgctatgatcatcatcagaaattgtatcaaattgtggtgtgatacagttggtaggtatcccgtggtgttaaacaggtgcaaggtgtggctgaatggaaggggagtgaggctgggttgaagagtggtcccagagcagaccttcagcctggccacaccattgtcagatggctttgtccctctgccttctgttctgctgctaagtgaggaagagcacctcacgagtcacatttcagcaattgtatcactttttcctatcttgctgttgaccaaagtatattgagtgcactgtgtctttttattcgattgaacaaaggatggaatataatgatcaaacaatgaaatgagcacagtggaataatctttgttttcatacatgtaaagaatatctggccgggcacggtgggtcatgcctgtaatgccagccctttgggaggctgaggcatgtggatcatgcagtcaggagtttgagaccagcctggccaacatggtgaaaccccatctctactaaaaataca

SEQ ID NO: 272401 - DNA, 266 bp, Homo sapiens
tgtaaagatgaggtcttactatgctgcccagactggtctcaaacgcctggcctcaagtgatcctcccaccttggccttccaaagtgttgggattacaggtgtgagccattgctcctagctatttttctttatacctttgctcaagctgcttcctaggccagaattcttccattcatacttagctcattcatcacttccccctagaaaatcttcctttattttcctctctacacactcaacagtattggtacccttctctgttactc

SEQ ID NO: 272402 - DNA, 288 bp, Homo sapiens
ttgaataatggaacaataccaactagagaaaagacttgcagacactgattctttggggacattcaaccaaaaatgaggttatgtcgttgttcaacaaaaatgaggttaaactgagcacagtggtgcatgcctatagtcccagctacttgggaggctgaggcaggagggtcacttgagcccaggggttcgaggctgtagtgcactattattgcacctatgaatagccactgcacttcagcctggagaacatagggagactctatctcttaaaaaaaaaaaaaaagagag

SEQ ID NO: 272403 - DNA, 410 bp, Homo sapiens
gtccgcctcccacagcacccccggctccatgctttgaagcccggctggcccacacacacttctttaccccccagcctgaaacttcacctttttcgggtcacacaccgctttgaagcggtaatgaaaactgggaaccctctctccatgtcagtaatcatatgcacacagaattctgcatgcaacgtagtgggctcaatgcctcctgaggaccaccaatggtcccatccacattacacatccagtctctcaccagactatgaggctcatgaaaggtagagccatagaagtcgcggcgcagagcctgggcgggagtggagatggtttgtaaagacgtcttagggaacctggactttaaacttggaccattgtatttgtaaatttagcaaatgaagcaacagatgtgaaaactg

SEQ ID NO: 272404 - DNA, 621 bp, Homo sapiens
agtctgccctgtccttagcttctgcaggaggtgtggggaactctgccttctacaatgtgatgctgcacagagagctgtctgtcatcttcgaccaattccatggcattcaggacactgtgataggggaaggaacgcactttctcatcccatgggaaaagaaaccaattatttttgactgctgctcttgaccacattatgcaccaatcatcactgtgagcaaagattgtcaccatcacactgggcgtcctcttcccaccttgttgctggccaggtccttgcatcttccaattactggagaagccaatgaagaatgtgctgccatccatcactgcggagctcctcaagctgggggcggctcaggctgacgctggagaactgatcacgcagggagagctgggctccagacaggtgagcaattaacttcggagcaagcagcaacctttgggctcctcctggatgctgtgaccttggatctgaccttcgggaaggaatttgcagaagcagtggaaccaaagaggtggctcagcaggaagaagagagggccagatctgtggtggcaagggctgagcagcagaagacggcggccatcatctctgccgagggcgactccaaggccacgga

SEQ ID NO: 272405 - DNA, 428 bp, Homo sapiens
tttttttttttaagacagagtctcactctgtctcccaggctggagtgcagtggcgcaatctcagctcaccgtaacctccgcctcccaggctcaaaggattctactgcctcagcctcctgagtagctaggattacaggcatgcaccaccacgcctggctaatttttgtattttttagtacagacagggtgtcaccatgttggccaggctggtctcaaacttctggcctcaagcaatctgcccactttggcttcccaaagtgctgggattacaggtgtgagccactgcgcctggtctcttttcctaaagttcagttcaatttatataaaacgcaaacttctggccaataatccacaattgggtaattcacatatggctcatcaagaattggctgcattttagaatacaattttaagattaaatttagact

SEQ ID NO: 272406 - DNA, 437 bp, Homo sapiens
tcttttctagttttatgatctgagccaccctggcactagaaagtagcactgaaggatgctgaaggatgtgaaagtagagcaatttgcaaagtcacatttagctatgcattattagaaaagctttaagtgtgaaaaaatttaacttgctttaagttatgctaattctaaaacaaaaaccaaatgaattccaatttaattagaattaaatctaggagtaatagatggcttttcacaaatttttaaacatacagaaaaaagtagtgctttgagaaaaatgtcaacgagataatactagcctctaggatcatttatcattttcaatacagctagttagagacctcacagacagtgcttcccttaatggtcactcagcagggcctcgatccatctgtctccattaaaaggaagaggaagtgttttatttatagaatgacaaa

SEQ ID NO: 272407 - DNA, 356 bp, Homo sapiens
attcaattacctcccaccaggtcattcccacgacatgtggagattatgagagctacaattcaagatgagattagggtggagacatagccaaactatatcagagtacctatgtgatcagcccccaataaaaatcctgagcagcaaggctctaataagcttcaataattgatgtttcagatgtattatcataattcattgctgaggtaattaagtgcatcctgtgtgactccactgggactagattgttgaaagtttgcacctggtttccccatgactttgccctatgtgccttttctctttgctaattgtggttggtatcctttttctgtaataaatcatagccatgagtatgacta

SEQ ID NO: 272408 - DNA, 183 bp, Homo sapiens
aaaacaataccttctgttggcatattcaccagggaccaggatggttttagaacctgtctaggcattatgaactcacacctctgccctaaagaaagctggtaattacagattccaaacacgctaatacgtggcagtcactgctgtttgttttgcttattggtccaattacttgtttctttatta

SEQ ID NO: 272409 - DNA, 337 bp, Homo sapiens
gcattcaagtgtatgttggtcttgccaaaattatcaataccttctccgtaaataccactttcaagccttgtaggttaagccctgattatgtttgtaaaagtagcttgatctacatgtctacaattgttctctaatttgctttatccaaatggaaaaaaaaacacacaatattttaggccttgattttcatcatgaatttttaaaaatctaaaattgcctcttcattgtgttatttcaaaatcatgagatatcctttcattgcttctactgataaggttgtttgtaactcaaaatcataattggtagatcaacagaataaaattatgagatacaaata

SEQ ID NO: 272410 - DNA, 869 bp, Homo sapiens
tatgagaaattcaccttaccattattgtatcagaggtatgggaagcgccagacgttgaccaggcccacgaagccgccagccacggagatcaccaagtcgatcttgctagacgagaccacttctgcctctgcggaggttttccctcggccttgtcctcagaccgcgctctctggctcttccccagcgagggcttcaggatgtccttgtggaaatctttcagacactgcagcttctccttggtgaccatctcttcgctttcccacatggagatgaggaactaaggctcagagacgttaagcgacttaatcaaagttgcacagccagaatgtggtggtagaaaggtttttgacacgtgcctgaataatgatacaaaaaaggaaggggtctgtctgtgtttacataattttttcccttccctaagaaaacacacaaaaataaataatgagatgtagaaattaacattaacagctactttggatggtattttacccaggtttgcactaattattcctttctggaaatgaatttattgttatgcagcttacagtgaaaatgttaaagagaggttaatatctctcaaccacagattaaatgcctggaggccatgacctctctaaggagctaagaataatctatcagtgaaaacaaatataaggatttagaatggtattcttgtctattctttgtaacattttaaaatatagggcttctatttcaaatatgaataattatttttaacatctcatatcatatggcttttttattacgatagcaccaatacaatttatgtctgtaatagcaatatattaggatttataactaagttttaagcgctataattttaaataaattctacacaacaagataac

SEQ ID NO: 272411 - DNA, 710 bp, Homo sapiens
tgcctctttttataaggacaccagtcacattggattagaggcccaccctactccaatatcactttaattatatctgtaatgaccctattttcaaataaggtcacatcctgagttactgggagttaaaacttgaacatatgaatcaaggggacaacatttgtttcaaaggaaattgctcaccctcctctttcctattctccctttcctaagggccgcacacatacagagctgaacttgtatcgccgtgtagatgaagacaaacacctttaggagatggccgagaaacaaaatgggaaaccctcaggtctccaaatgactacaccaagcagaattgccccaccagcctgcaccattcatttctagactatgagcaagaagtacacttccatcttatttaaacaaccatatttggggtttttgttgttgttattgttgttgttataggagcttagcttttactctaagaaatacagctactcaactcacttcattaggatcttaactataatatcaaaacctcctaagcacagaataaaaaatacagtagagcaatatcatttatgatcatagatgcagagcttccaaatgaaatactagcatattcaaggaaagatatatataccatgacctagttgtgtttaatttctggaattcaaaaatggaatgtttgacataagaaaatctattaggccgggagcggtggctcacgc

SEQ ID NO: 272412 - DNA, 684 bp, Homo sapiens
gcaaaggactgaactctgaccaaccagaagaaaggaaaaactggagttcctttcccctagtgagcatacaaaggcttttcatccgctgaacccagcgcatctgctaccatttccctggtctccggtcagaactagtgactgtcccataaacaggttctgctggacttccagtcaagatggagcgggccgcacacatacagagctgaacttgtatcgccgtgtagatgaagacaaacacctttaggagatggccgagaaacaaaatgggaaaccctcaggtctccaaatgactacaccaagcagaattgccccaccagcctgcaccattcatttctagactatgagcaagaagtacacttccatcttatttaaacaaccatatttggggtttttgttgttgttattgttgttgttataggagcttagcttttactctaagaaatacagctactcaactcacttcattaggatcttaactataatatcaaaacctcctaagcacagaataaaaaatacagtagagcaatatcatttatgatcatagatgcagagcttccaaatgaaatactagcatattcaaggaaagatatatataccatgacctagttgtgtttaatttctggaattcaaaaatggaatgtttgacataagaaaatctattaggccgggagcggtggctcacgc

SEQ ID NO: 272413 - DNA, 532 bp, Homo sapiens
caggctcgagagctgtgagaaataaatgtctgttatttaagccactcagtctatggtagattgttacagtggcccaaaatgactgagacattttttcgtatcatcaatattgcatatgctttccactatgttcttgaaagtgtatattttaaaggttcgcgagcttgaaatggtatcttatttttttaatgcattaaatttaatataattttacactcctgcctcaatgcagtctacccatccaattttttttattggatagtgagattggtaatatcaaccacaaattatattaacagccatttcaagttattcttttaatatttgtattttttcttttaaaaacgattttagtgtttgcattttgttttataaccaaatgtttaacaactatttggatgtatctttatgttgaatttactcctgtgttactagataatcttttattatcatggcttaccaatttatgacccattaatcacagttatatcttaatatgttgaaataaatcttctagtaatttttttcaagt

SEQ ID NO: 272414 - DNA, 485 bp, Homo sapiens
actttctttacatctctaccctatcactactgggtctagtaatagtgattgggtctagtaacagtaattactattgtggtctagtaatttaaatgtaatacagatctgttaaactacatatataaaaggaaatctcaattcatttaggtgaaacccacaacaatatccttaaataattgcagaaatccagcatacagtttgaaagctaaaacttgttatgtatttttagattaagttataaatgtacgaatccatcaagttcagttcttcattcaaaataattgtctgaatgcacttaaactgatctggcattcaactgttactttcatttagtaacagctatatccttaagaaagtgggcagaaaataactggaagaaaaaaatttttaatccaccatctagtccttctaaatgctagaaattctctccagcaatttacttacagtgtacatagacatccaggtggctcactataaatttccta

SEQ ID NO: 272415 - DNA, 213 bp, Homo sapiens
accttgagcaaacagagatgagagagatgaatttctaggcacatagatctgagttaagaaggaaaaaatcattaccaacaccaaacagtatttactttggaaaaacagaatttgtgaaacagaatttgagaaacagaatttgtgaaacagaatttcactgttaacagggttgaatttcatctaatgtgaaatacctaaagggactggcttatc

SEQ ID NO: 272416 - DNA, 327 bp, Homo sapiens
gtcctactgtcaggatagaaccctgactcttacacggagagatgaggcatttggagacatgtgaccatcatttcaaaatgaggtcattaacacttttatatttcacatgtagaattgtcacttaaattcaaactgctgttttataattattttgtattagccacctttatatttaagatttatagccttcaataatttgggggaccatctcatgacctaggagtcgggctcattactatgtaatgtttgcttgtggggcccagacctcctaaaggggatttctgtaggaatccctcaagctgtctgtgctttagtgagcaccactat

SEQ ID NO: 272417 - DNA, 758 bp, Homo sapiens
atcccgtctcatgttgctccactgctggggtgggaggtgaggagtcatggaaggtatcagtgttcttacatccttagggcaccctggagacggacttacatattcaggccttcgcaagttattagaagactggtagggtgaaattgaccaaggtgtgagtgtttacaccatggtgatgggtgaatgctacagatcagagcttcctgtttttggagagctaatttacagacacaccatgacctgcaccccatgcacacatctctgcacaccatccctttttaccagtataacagataatatgcgcacttatgaacgtgcacacattcacatccctcttcttgtattttgctcttccaaaacctcacaagatgaaattactgttttctttttctttttttttgagacacagtctcgctctgtctcccaggctggagtgcagtggtgcactcagtgctgcctcagcctcctgagtagctgggattacaggcacctgccaccacgcctggctaatttttgcatttttagtagagatgggatttcaccagttggccaggctggtcttgaactcctgacctcaagtgatccgcccacctcggcctcccaaagtgcgaggattacagccatgagccatatgaggacaccaaggttgctcagacagtggagatctgtctgctcacataccttcagcttgtcctgacaactttctctttgcacatctggcttcctgatggactttcaatggatttttgcccctgttg

SEQ ID NO: 272418 - DNA, 668 bp, Homo sapiens
agcctattgagaactggttataaaatagaaaataaaatactggcaacggaaccagctttgaactgggtaaatacacaggcaatattaacaattctaactaaattaggacaagctgacaattgttggcttatgttaagtattttctttactgaatataagtacaatataactaaagttctaacagaaaactgcaatttgcttgaagaatttaaaacccaaggttatacagactgcatagagcatgaacaactaataaaaataaaaggaaataaagagttttgcaaagaaagacttgatacagctctattacaccagagccactgaatagagacctgaaaaccattttctttatagtaacagagctctttgttttcttcatactggacagtttagaacacagtcccatggcataaaatttggaaaatagaagagtttaaaaagaaaataaaaatcaccagcaatccaaccaccttgaagaatattgctgtattaatgttattcaactttttttttttttttttttttttggggggaaaggggtttcactcgatcacccaggctggattgcagtggtgcgatctcggctcactgcagccttcgccttctgggtccaagtgatcctcctgccttagcctctcgggtacctgggactataggattgcgccaca

SEQ ID NO: 272419 - DNA, 300 bp, Homo sapiens
tccatgaatgctgatggaacaaaaatcccaaggaaggaaatcaacctctctctctctttctctctctctctctctcactcacacacacaatagattttctgatgtattttaaaacttcgagaaatatatacttgtagtttggtgatgaattagtgatagcaagaacaaagaaaaactaagggccgggcacagtggctcacacctataatcccagcactttgggaggccgaggcaggcagatcacctgacatcaggagttcaagaccagcctggcaaacatggtgaaaccttgtttctact

SEQ ID NO: 272420 - DNA, 905 bp, Homo sapiens
gcaccttccacagtctggtgaaactcctaaagatcagacctttcattgatatatgagtacctactaagtaccagacactgtgctgaatacttggataaaatgtcacccaaatgtcatgccagacccttcctccttcctcaatccctacatacaatctttcatcaaatcctgtctctgctatctcctacttatctctttaatgatacactcaaggctttccgagcccattgcagcccccttagttcaataaggccaatagagacactatgatcctaaagcttataatgcagcatgagaaatacgagtgtgaaagtattaccattgtaaggtattgaacatgttctaggaaaatctaaccttgaaatgcatccttatcttctatgagccagaactctctagttttcctccacatccttctggtcactcctcagccttcactgaagttatatctttctctatccatcccttaatcatatcccaagtgttacatcacaagctttattttctcaaaccttcacatcctcccttaatcttgtccatacccatggtgtcaatactacatttatgctgactgctcctaatttcatctccatcccatatatctggagtttagatagagcagccagtattacgtggccatgtctgccccaggcatggaacttaccatatccatctcaaacttaaccatatcaataattgaacttattttcttctctcagacttttctgtgagttgtacactaatcacccttaatttagacactcatatgtcatcccagaccctcctgcctcagtccctacattcaatctatcacgaaatcctatctcttatacctcctgattctctctttgataatattctcatggttttctgagcccactgctaatcccttagttcacgcctcc

SEQ ID NO: 272421 - DNA, 757 bp, Homo sapiens
gccgggtcttctgggcatagggactcctagatgagtggggcaggggctgaggaatgcaaatgagatgtcagtgtgcccttccctcagcccattcaaagtctgtagccctggattgaatgaactggaggagaagcttatttgccaggggatgggaagcagaaacccaggtgtttggttacctggggcctgcctctccttcagcctgagatatggagagagcagggctggaaggactccctacccccacctcagcctcgcttcccgctctgcgtccctacttggctgtccttgcttcagtctgcccctgccccacctcccacctccagctactgccctacaagtcaaggaatgtttgggccccaggggtagagctgggggttggataagggtaagactgcacaggggccagatgggctggtttggagaagggtaatgagatcccaggaagagagaggaaccgtgccacatgactcagccaccaagcagccctatggagaggccaatgtggagagaaactgaggccttccaccaaaagccagcaccaacttgctatccatgtgagtgaaccagcttgcagtacagagtggtcaaccccagtcaagctttcagataactacaagcctagttgacatcttgactacaacttcaagagagacatcaaggcagaactgcttcgctaaactgctcttgaattcttgacccacagaaactgagagagagaataaatatttattgttgtttcaagtaactaaatcct

SEQ ID NO: 272422 - DNA, 520 bp, Homo sapiens
acagttgaggtacagagacagcgttcgcagtcagcttgctagaggacctacacgggctcctcaagttccgctgcttcctcctccaagcttgctagtattgaaaacccaggagtttggggtcattcatcaggaggattctgctccagtttgcccccttcttggtcctaggatactggagggccagagaaagcaagcttgaaacagagaggaacgggtcactttggtggaggaaattgggccaccaagcagccctatggagaggccaatgtggagagaaactgaggccttccaccaaaagccagcaccaacttgctatccatgtgagtgaaccagcttgcagtacagagtggtcaaccccagtcaagctttcagataactacaagcctagttgacatcttgactacaacttcaagagagacatcaaggcagaactgcttcgctaaactgctcttgaattcttgacccacagaaactgagagagagaataaatatttattgttgtttcaagtaactaaatcct

SEQ ID NO: 272423 - DNA, 618 bp, Homo sapiens
agaaggcacctgactttgtgttttatgccccacgtctgagaatcaacaagcggatcctgcagctctgcatgggcaaccatgagttgtatatgcgccgcaggaagcctgacaccatcgaggtgcagcagatgaatgcccaggcccgggaggagaagcatcagaagcagctggagcggcaacagctggaaacagagaagacaaggaatggagaaacagacctggagaagggccaaagctggaatatattttgggcccaagttgacccagatactggagggccagagaaagcaagcttgaaacagagaggaacgggtcactttggtggaggaaattgggccaccaagcagccctatggagaggccaatgtggagagaaactgaggccttccaccaaaagccagcaccaacttgctatccatgtgagtgaaccagcttgcagtacagagtggtcaaccccagtcaagctttcagataactacaagcctagttgacatcttgactacaacttcaagagagacatcaaggcagaactgcttcgctaaactgctcttgaattcttgacccacagaaactgagagagagaataaatatttattgttgtttcaagtaactaaatcct

SEQ ID NO: 272424 - DNA, 235 bp, Homo sapiens
tcaaagtgtaggcaaaaacctgcagagagtgaacagagtcctcatgggcccaaggagcatccaggaaaggcacttcaaaaaggtgggaaagcacagcactaggaaagaacaggatgcccaggcatttgtggacaatgctgccaaaggaaaaaggcttgagggtccagccccaagggagctggaacagcctcacagtccagccttctaggtaacaaatttaaaaacaaaatatttg

SEQ ID NO: 272425 - DNA, 470 bp, Homo sapiens
gctcattccgatcagggtgcatctgggaagtcgggcgactgtgtccatctcctgggtggaagaatgacccagggaagtgctccatggggaaggcggggcatgagagaagggaggggtggtcccgaggaccctttccatagacctgggagttcccggtgagcacgcggaaaggacgcggtgggagcggcaggtgcagagggaggacttgaaggttccatccctaacagaggacagcgtggccgagtactcatgcttccaaccctgcacagaggatagtgcatgcccagcatgcagactcgcttccatcgcgacacagaggacagcatggagcccagctcgagtgccgtccccccaccatgacagcgcagcatgggccttccaagccacagagccacagggaagccagtcctcctggaccgtgtgtggctgttttggagccagttgtgtcctgtgaagagcgcagcggccgc

SEQ ID NO: 272426 - DNA, 289 bp, Homo sapiens
cagattgtcttcatttccttgttgattggtttgaacctggggtcattatctctgctttgcaaatgaagaagagaaagaagctcaaaaaggacaagaaactttccccaaatcgaacaggcttgtcgtgacaaactgagatgaggtttgtcaagtgttcagcacagaaaatgctcaacatctccctctggatgtccagcagttacttcaaatgcatcccccaaggcagttcatcttccatgtaactataataatcacagtaaaaagctactgggagctgtctgtgttctgt

SEQ ID NO: 272427 - DNA, 507 bp, Homo sapiens
agaaatacttcagtgcatgccgtgtgcagcctagaagttacatatgcaattgtagatgaagctaactgaccaggcgacaccaggaggagcacgaggaccaagagaactaagtgggcaagatgcccaggcagtggacagaaaacagagaacaacaacatccaaagagccacctggagaacagatggggaccggggaccagaatgctcttcccaaatcaaatagaaaacaggaaggctgtccaaagatttggggggccaggagagtgagcaatacagaagggattgtgaccaccaagctccctttctagagaatgtgtccaaagcaggtccaggcagactgggggtgggagaggagaattcacattaaatatttatagtgtgcacaatgagttctagtgggaaatctcagaagatgccaccatttccaactttaaaatacccttcttcttcaatgtctgtatgtgtttttaggaatccaaatacaataaaatattcatcatggagagtt

SEQ ID NO: 272428 - DNA, 396 bp, Homo sapiens
ttccatgttctgcaaacactggcttttgagtgatctgaggagaatctctcatgacctttcacactggcatcatttttctcactccgtggggctcttagctctttgatatttgtttcttacctgtgataatactctggtaagaagggggaaaggagaagcctcaatggattacattcttttttaaaaaagtttcatgagattaaagcacatattgattgaatttttgaagtgctttatttaaaatagcattttattcattataaaagtgatataggcttatggtaaaaatagtttttaagacagaaaacaatagagaatatgaagcactaataatgccaccacttagaaatgacccttcttaaatttctggtgcaaaaaaatattcaaactctaagg

SEQ ID NO: 272429 - DNA, 375 bp, Homo sapiens
tgggccccggccccggagtatgtggcagacgaggtgtcttcctcggcggggtggggaaggggagaaggaaagggcagaggcatgccaggcaaaagcatttgtagtaaggggcactggggcgggcggtggcgggagagctgtgggacagagatgcgtgtaggtccccagcctcagaggatttgagaggagccccgaagcactgttacccagaaggtaccacagaacaggggtcctttaagttgttgcgtgaaaagaaggttccttggcgaagtaagcttagaaatgctgtgaatgattcccagccctttttccctcctcatattggagtcacagagcattggtagattaaaggctctgagaagtcctgcaaaaaaa

SEQ ID NO: 272430 - DNA, 450 bp, Homo sapiens
gtcttgaacattatttcacaccacacataaaaattaacttgaaatgagtcatagaattaaatatgagagctaaaattataaaattcttaggagcatacatatgtaaaaatattcccaacttttgggtaggacaatgttttagacaggatacaaaaagcacaaactttgaagaaaaaattgagattaaaaacttgaacacatggtggtaaaaaatatatatatacgtagtatgaaaaatactgttaggaaaatgaaaatgcaaaacatagattggaagaaaatattttcaatatactctccttgttccattttcccatgtcttaattttcagtttgatcataattttttgttagatcagtgttcattgtttacagtataataactttgttaaacatctcactgttgagctataattaaatttttttctttgactgttgtttttcctagagt

SEQ ID NO: 272431 - DNA, 460 bp, Homo sapiens
gtttaaggaactgagttttattaatgtgaaaaatatcctatatgtgttgttttgttttatttgagacaagaggcttgctctgtcacccaggttgaagggcagtggtgtgaacatggcttactgcagcttcaacctcctgggctgaagcagttctcccacttcagcctcccaagtagctgggaccacaggcacatgccactatgcctggctaaatttttttagattttttgtagagatagggtcttgccattgttcaccagcctgagcagcatggcaaaaaacccggtgtctacaaaaaattcaaaaattagtcgggcatgggggcgcacacctgtcttcccacctattcgggaggctaaggttggggagaattgcttgagcccgggaggtggaggttacattgaggtaagatcatgcctctgcactccagactgggtgacagagaaagaccctgtctcca

SEQ ID NO: 272432 - DNA, 342 bp, Homo sapiens
gttcctagaggtcacctgcattccttgccacatgaccccttccatcttgaaagccagcgacagagaccttcttgcgtgccaaacatcctcctacatcagatctctctctaacttcctcttttgctaccagccagagaaaactctctgcttttatttttatttatttttttatcttttgagacagagtctcactctgtcgcccaggatggagtgcaatggcgcaatctcggctcactacaacctccgcctcccaggttcaagtgattctcctgcctcagctactcggaaggctgaggcaggagaatggcatgaacctgggaggcggagcttgcactgagccga

SEQ ID NO: 272433 - DNA, 385 bp, Homo sapiens
ttaaaaagaggtaaaaataaaaaggaatttaaaaaacccaatttttgtttaattagaaaatgacaaggcccaacatacagataataggaatttgaaacaacaacaaaaccctataatcttagaaaatgttttatttaaatatataaaacaatattttaaaagtgaactgtggtacctaagcagcagctaacaccaggacataaataatataatactttaaagggagaaaactttttggctaggcaaaaccaggtgaaatgaaagatggtgatcagactttcttcacaattatactttatgcctgaagaaaatggattgaccattttcgagatacccaaagaaaaatgtgagctgaggttttcatatctaataaagttataagcat

SEQ ID NO: 272434 - DNA, 457 bp, Homo sapiens
tttttctgagaaattagaaattctattcctcctctccaaaccactaaaaaatagcctttccattagtgtgttataaggcagaaaaattttaccatttggaatttttcctttgagaaaagctttgttcctgaaagctatagttaaattccattgttaccttgtggtggtggagggatgagtggacttggtcttctgtccaagggagaaagagaaataactcatcaacccacgatcacctgttgctcattatattttcactgagagtagggtccagagagaaacacacctaagagaggtaaacttgaaggtgaggtaaaaacagaaagatttgtagcaggggcatctgacaagaattaatagttagaatgggatactgcagcagtggactttgaaaaacaggagtgcattgggcatttggaggtgggctgaagccaaagtgggtgcccaagtggggaag

SEQ ID NO: 272435 - DNA, 485 bp, Homo sapiens
gtgacttgaatgaggttaaccctcggcctggtgtcagtgatgagcacgtgcatttgtgtgcagctgaactgcatgtgaaccaatcaccttaaaaatgccatctgtggcctttcggcgggaaccgccatcttccagtaatgcacccaaatgcacacaaagggaaagaggagaggcaccgatacacgttctccggccttttagaaaagagtcgttcctctggccacgtatatgcgaacctataagaaaggtgatactgcagacatcaagggaatgggtgctgttcaaaaaggaagccccacaagtgttgccatcgctgaactggaagtcgcagtgttccccagcacgctgttggcattgttgtaaacaaacaagttaagggcaagattcttgccgagagaattaacttgtgtattgaacatgcgcggagcactctaagagccgagagagcttcctgaaacgcgtgaaggaaaatgatcagaaaaaga

SEQ ID NO: 272436 - DNA, 840 bp, Homo sapiens
caaaatccatgaagagtctcaaagaagccggatggatggagcctgctgcggatgccttttactctcgtagatcagggtgatttacattccacctgtagtctgcttgcaaacacacagagcagccttgcagctttgtgcctttagactcttggttttgcatttctccctgctcccttcttccttccagtaagctgcaacttttctgattgaaagggtgcaaggctaacacacggaatgactaactcaggatcacatactggcagtgggagaggcaggaggagcagctgccatcaattgccagggccaagtggatgataggatggatgctggtgcatgcggaggaggcagacgcaacgctcatctctaataatgatgtctgttccctcagaggcggctagagcatcacctcttcacgcaagtgtcttgaaactcagcttgaagatttcagcaaatgtgtcttacagagaagagaagagggagtcagcccatcgggattaaaaatatagaggcagtgacaacacacactcggcttcagttcttaggagagttttggttttgattttttttttttttttggagaagattttttttttaatggatctacactgttaactgagactctgttgagattcactggtttacttaaaaacttctcagggatgtctgtaaatttcagtgttatatgtcatgaaaactggtgtgggcagatctgttggttgaaataatttctactgtttcaaatactgaaggcaggaataattggtttatactgtgttttaaatagaagtattactggtaagtcccccaggacattaaaccttaaaaatcagttttaagcta

SEQ ID NO: 272437 - DNA, 1139 bp, Homo sapiens
gccccccagagcttggtggtgtcccaggacggtcctcccaggaaacattttgaataagttgctgaagtgcctgatggacgtggctctcgtcacgaaatgagtttggatccgagaagccctcttcttcatcggaaaacaggacaaagatgagctgcgtgcccataattccacgtttacgctgactcctccagtgcctcatcaatgaagtaagcaggcagctacgttctggatggctagcatgtaccgaaggcacaaaacctccagagttggcagagttaagtcctggcgtgcccgaggctatccaggggaacacgcgggacagacagcaccctcagcctgtccccatgaccctctgctccagtctgaggggcaggacaccatgagacctctcagacacagagtccaccctcgacatgacccggatgaaaggcaggagtgtgtgccctgcttttgccctcgaagctcgctgaaggggacccatctctgcaagcccacagccctacctgcagcatccacagcctcagagagcagcggggccccttacccctgaaccccctccaagagcatcaggacaacaagccttgagctgtggagacaagagaatcagtatccctggcccagggaggattccaggagaggacacgggcaggagccctggcccagagccagaaccaagagtccagccagaggcggctagagcatcacctcttcacgcaagtgtcttgaaactcagcttgaagatttcagcaaatgtgtcttacagagaagagaagagggagtcagcccatcgggattaaaaatatagaggcagtgacaacacacactcggcttcagttcttaggagagttttggttttgattttttttttttttttggagaagattttttttttaatggatctacactgttaactgagactctgttgagattcactggtttacttaaaaacttctcagggatgtctgtaaatttcagtgttatatgtcatgaaaactggtgtgggcagatctgttggttgaaataatttctactgtttcaaatactgaaggcaggaataattggtttatactgtgttttaaatagaagtattactggtaagtcccccaggacattaaaccttaaaaatcagttttaagcta

SEQ ID NO: 272438 - DNA, 286 bp, Homo sapiens
agtcatgtcagtaaatactgttttatgttagtaattcacctaattactaaattccttaagattacatcatctgaaggaatagtgtagtgtccaagtaactgtgcttctaagaacagctgattcacaggttgacagggtcagaaaaagtggctcttgttgaaagttatcttttctataacaaacattttttatggaatcttttgaattaaaatatgatgctgattatgtcttggcagtcttggaagcttagaattggccacggtatcacttagtgattgtggtgatt

SEQ ID NO: 272439 - DNA, 512 bp, Homo sapiens
gtagcatattcacaggtttggggatatggatgtggacatctttaggggccactgtttggcttactacactcttacacacacagagagagattcagtgtgatggttaattttaggtgtcaacttgatgggattgaggggttcctagacggctggtggagcactgtttctgagtgtgtctgtgagactgtttccagaggggactgatgtgtgagccagtggaccgagagaggaagactcgctctcagtgtaggtgggcgccatccaattggtcgggggcctagcaggaacaaacaggcagaggaaggggaatgtcctctttgcttcctttcctccttccagggtgagacgctttatcttctcctgcctttacacgtcacactgcaggttcttcagcttttgaactttggaacttacaccagcggccccctggggacctctcaggactaactgggggctgcactgtcagcttccctggttctgagatttcagacttggactgtgccatgctgcct

SEQ ID NO: 272440 - DNA, 379 bp, Homo sapiens
tgatccacccacctcagcctcccaaagtgctaggattacaggcatgagccaccacactcggcctatacctcttctttctttctcttgtctgattgtcctagctggtacctccacaacactgcatagcagtggggatagtaaatgtccttgttctgttcttgaacttaatggaaatgcttctggtgtttcctaattaagcttgatactagttttggagttgagaaagttatatttttatgatattgaagaattatccatctactttattttgtagagaagttttattaggaatgtatattgggttaggtgctattggtttaagtgcctcctgagtatggcagtaggaaatacacagctatacccatggagtatatttgta

SEQ ID NO: 272441 - DNA, 700 bp, Homo sapiens
agaagacactaagcctcattagtaatcagagaaatgcaatttgaaacaatttcacatttatgagactggcaagaatttcaagtcctcgaataataaatttggagaagctgccaaggaaggaagaactccgtatgcatacacactggaaaatgtgtacaagggtgcaactgtttttatagtagccagaaaaggtagaactagcctaaattcttatccaaaggagaatgtataaattatggaatactgtatcatagttaagaatgaactggatctacatgtatcatcatggataaatctcaaaatcataacattgaatatttggtgaacaaataaaattgcaaaagtacaaggatggtttgatgccagttatgaaaattttataagttcttttatatattgttaaaactatatatatactggccaggcgcagtggctcacgcttgtaatcccagcactttgggaggccaaggcagatggatcacctgaggtcaggagtttgagaccagcctgaccaacatgccgaaaccccatctctactaaaaatacaaaaattagctgggcatggtggtgcatgcctgtaatcccagctacttgggaagctgagacaggagaattgcttgaacccagaaggcggaggttgcagtgagccaagaccgtaccattgcactccagctggacgacaagagcaaaactccatctc

SEQ ID NO: 272442 - DNA, 291 bp, Homo sapiens
agagaaagccgcagtgggcttagcaagggcaggctgatgtgaggcggaaggtgagcacagcatttggggaggctagtgcaactgtccctaaagggcctgccctcagacagtggtggtgggaaagaagagaagggcctgatgcaagaggtgtctgaggggtagcattgatacaggactcagtggcccattggatggggacatggtgtgtgggctggtgtgtgtggtgtgttgagggcagaaagacacggcaggactgcatgaattatctgagtgccatggttggagggagag

SEQ ID NO: 272443 - DNA, 401 bp, Homo sapiens
tcataaacttgctcaaagtggctcagtaagttagtagcaaaccttcgagtggttttaatttgcttagggctattgcattagtatgttatctatgaaaactagaataaatgttgaagccatctgtcattaccacaaggaggtgaaaaagagactatcacctgctagacagtaaagctaaaaaataaaggtctcaaaacatgaaagaaatgtaaagctaaaaaataaaggtctcaaaacatgaaagaaatgtaaggacatatatttaaaagttgtcaaaggacaaagtctgtccttgatcagcttcctccaattattatttcaaaactaaacattagttgcatgaacttggctgttgcaacagaggtcagttaattaactgcttaccattaaataacaacaaa

SEQ ID NO: 272444 - DNA, 316 bp, Homo sapiens
ctgcctgggcaacagagcaagactctgtctcaaaaaaaaaaaaaaattattctaggctaggcacagtggctcacgcctgtaatccaagcactttggaaggctgaggcagggggattgcctgaagccaggagtaacaaagtaagatcctgtctctacaaaaaattataaaaattaggcacagtggtgcatgcctgttgtcctagctactaggaaggctgaggtgggaggactgctcgagtccaggagtttgagctgtcataggctaggatcacaccattgcactccaacttcggcaacagagtaatacccaatctat

SEQ ID NO: 272445 - DNA, 862 bp, Homo sapiens
acctaataaaagtatgcaatcattagctactaaaaactattaggtgaaaggatgatgcgctctgtaatagatggagcaagctgacatacaacaggaattacatagagtacatctgcaaaatattcttggtaaaaattacaccagagtctgatcaaacccctgtatttcaggtaaacttgtttacatgaagaacatatgaaatgacaacacagcggtacaatcagcagaatccagaaagtggaattttttttttttttttaagacggagtcttgctctgtcacccaggctggagtccagtggcgccactgcaagctccgcctcccgggttcacaccattctcctgcctcaccctcccgagtagctgaggcaggagaattgcttgacccaggaggtgcaggttgcagtgagccaagatcacgtcactgcactccagcctgggtgactgagactccctctcaagcaaatctgatgaaatatataaaaaaaactattagatctactaaatgagtttagcaaaggttcagaacatatgagcaatatgccataatcatttctatacactagcaaacaattggaaattaagtttttaaaatatcatttacagtacttcaaaatacataaaatacttatgggtaaatctaatcaaacaatgcacaaaacgtgtgcactgaaaaaaaaaaaaaaaatgcttaaagaaattaaagacctaatagagacatcaattgtagtcatgatgccaattttccccaaatttgctctacagattcaagtcaaatccagtaaaatccaagcagtttttctaagaactgactcatatgaaaatacaaaggactcagaagagttaaaaacaactttgaaaaa

SEQ ID NO: 272446 - DNA, 282 bp, Homo sapiens
tttaacttcccccgccccagatccatcaccagcttcaatacttctctatccaatacttcctattctcctttcacctttctcccctctcactttgttttgtttttgctgaggtgttttaaaacaaagcacaagcactgtatctttccacctataaatacttcactagatctctctcactgttaacccatttcccgtttgccccgagaaatgagtatgggcagcaagctgcacttttttttctaaacaggaaaggggtaaggactttttaaagaaacaaaacca

SEQ ID NO: 272447 - DNA, 453 bp, Homo sapiens
ctgatgcctctccctgagaaagtagtcagccccagagagtcccagttccaccttcttttgaaattatcttagaggtaaccaatggatcccctccaggagggactgtccatccccaccaggtgcagagaatgaaccactccttaagtttgcctggtaaatggtttggagtgtcactgctagacatggtggctgtgatgtcactactgtgtgtatcttgaaaggtcaataaagaatgagtaaaacatttgaagaggttcttattcaacaacaatatttgtttaaaggcttgccaaaaacacaaaacaaagccttaaaccccaaacctttaatagtataaaaataacaaggcttaagtcataaacattggatttccagaatttaaaaagataatttttgaaaaaggaattacatcaagaaaattttttttgaattgactgtcttctaaaacaaatt

SEQ ID NO: 272448 - DNA, 358 bp, Homo sapiens
gggggttgtggggttttcttctaagccttctcctatttatgggggtttagtattgattgttagcggtgtgtgtgtgtgtatgccaggtgtcttatatttgagaagagtctcacattaggtccgaagacacaaataggttgaaagtaaaaggatagaaaaacatattctgtgcaaatagtaaccaaaagagagctgaagtagctataccagtattagacaaaatagtctttaagtaaaaaaattgttacatatgtatacatgtgccacgctggtgtgctgcacccattaacttgtcatttagcattaggtatatctcctaatgctatccctgccccctccccccacccaaccagcagtt

SEQ ID NO: 272449 - DNA, 467 bp, Homo sapiens
aagctgcgtttggttctgtgtaccaatccattaaccagcccacagttttaagagaggcatggaatgatagaagtctcctcttagaaacagctctaaggtccagtgtaagctacttttcatttgagatgcccgtgacagacacagatgttatgtggttttctaagaagctctcataaccccaggattttggtgtaagaccatacactctgctaccagcaagtactttttgggcttgcttctggcaattctaatgaagactgaacacctggccatgtcacctgaagtgactttgatcctaaaaccaatatcatgaagtaagcatcgtcttttgcaatcataaggttgtatgtgcacagcagaattccaagtttcaatggaaatcgtatgtataatgcaatctgagaacagacatgaaagatacaagtaaacctcatagcctggtgcctcagtgctctcatgatacctgt

SEQ ID NO: 272450 - DNA, 417 bp, Homo sapiens
cgtctgaagaagttcttctgattttggtggtagttagacttgagcatacaatttcctgttgtttatagagatgtctgacttactaatcaatttaaatgcatctgcgtttttcagaaaacagaaaggaacaataaatacactatataaacactgggggataatgagtctctcccttcctccctctctttgacattcttcttcatttgtcccaaattcatcttctttctaccaaaattcacctaggaaaaaaaattgggttgattcaacaagattacattgactatgaagagacaataattttttaccttccttttcttgttttaaaaataagctgtgatgcagaaatcacatgatttattatagatgatggtaatcatggatgatatgatatctgaaattaacaaaggctgtcgcaaa

SEQ ID NO: 272451 - DNA, 314 bp, Homo sapiens
caatttatacattccaagaaaatcttccatttcatccaggtgaaacagaacctactggaatgaagctggcctcccatggaatgaagctagcctcccgtctccttgatttgaagcagcttctccacgttggttattatgccatttttctaaatctaacattttaaaatttgtgccttttctttctcttttgcttgacttctcagaggtttttttaatggtcttttcaaagaagtggttttgggttttatttatcaagtctacttttattatggctgttttaaaattaaatacatttatttcttgtttcccttaaa

SEQ ID NO: 272452 - DNA, 536 bp, Homo sapiens
cagggcccatctggctcttctcagtgaagaagcaagtttctgcatatgagactgtagtactcaatagattttcctttgccgcacagctaaagaaactaagctgagacaacaaaagtcattttattggcataggccttgcttgtaaaatgaattccacttttcttccatagctcataatgtttctccaaagtaattatctaagaaagatttagttctcttataaaatatagactaaacaacaactgaactagtttgcaatataaatgcagcaaatgatcacaatggtaaaccatgtggatgacaagtattttggaggcattaaaattgtattccaattagttccgaagtttatttgaactaaagtaagtctttaaccaaggagcgagatccagtttccttacagggagcttcaaaaaagcatactaaaaccacaaagaaagattataggcacttaaaggaaatgttatgtagattaaatgtcaactggacaagtcagattgaaggataggtttttgatatgtagcataaagaaaaac

SEQ ID NO: 272453 - DNA, 385 bp, Homo sapiens
  misc_feature (376)..(376): n is a, c, g, or t
  misc_feature (378)..(378): n is a, c, g, or t
ccgtatttctaaaaaataaaaaatacaaatacaactacaaactagcactagaccaacagtgactatgtaccatgaactgaggaatattattaattccaccatttgcatctgaggttaacaatatgtcaatgacttaaataacatcatatctctgagagtaatttctcctatatttccatgacaaatgttagataattttccattttttccattcaacaaaataaacaggaaatataattaaagagttcaattgaggattgggatttagaaaggaaggcaggaattaagaataatccttagttctcttcctaatttgcacctctctcactgatacatatgtattattttctttttatgtcttttttttctataactngngccggct

SEQ ID NO: 272454 - DNA, 407 bp, Homo sapiens
ccgtatttctaaaaaataaaaaatacaaatacaactacaaactagcactagaccaacagtgactatgtaccatgaactgaggaatattattaattccaccatttgcatctgaggttaacaatatgtcaatgacttaaataacatcatatctctgagagtaatttctcctatatttccatgacaaatgttagataattttccattttttccattcaacaaaataaacaggaaatataattaaagagttcaattgaggattgggatttagaaaggaaggcaggaattaagaataatccttagttctcttcctaatttgcacctctctcactgatacatatgtattattttctttttatgtcttttagaatctaataaacatgttttatattatataacaaactagaata

SEQ ID NO: 272455 - DNA, 265 bp, Homo sapiens
cacccttcaattccttttctttctgttttactcaggcacaatttctaggacatccttcctctggtctcattcacttctgctcaaactctttcactttttctttatatcttccaaccccttcctaaccattatctcttccataatttgacctcaacatatcttttcaactatttcttccgtaagtcatcctaagttagcccctactccaaactggtccttcactgttctccaaatatggtgggctctctccagccctccagccccc

SEQ ID NO: 272456 - DNA, 366 bp, Homo sapiens
gaggcatgagaattgcttgaactgaggaggtgggagttgcagtgacctgagatggcactatttgcactccagcctgggtgagagaatgagagtctgtctcaaaaaataaataaatataataaacaattttaatatatatagaggctaccataaaggagctactctacatactcattttttgagatcaaatttacttgataaacttaattttatgattacataaaagggcaaaaaaaaatcttttctgagagccaaggatacagcaaaacaggcaaaaatccctgccttgatagaatttacatttcaaagtaggacacagataactaaaatatagagcatgggagaaggtgctaagagatgtggggg

SEQ ID NO: 272457 - DNA, 288 bp, Homo sapiens
atctaaaaggggaccataaatatgtctcccagggctgttaacacaattaaataaagtacataaactacttggcagagctcttggctatcaaaaactctcaacaaatgttagttccttccattctctgttcaatcttatattctttgagataaatcaaaccatttctgaaggtgaggattgtctaagccacagcattttacttctctgtataaacctgctgattcaaggaacagcctaacgggttgagctctgtttacctggcatgagtgctgcctacatcccaatatc

SEQ ID NO: 272458 - DNA, 360 bp, Homo sapiens
aaaactggcatcaccaccttaaccacgtgacccaggtttacctctccagaaacgtgttgacagaggaggcgctgggaagagcgcagcaccccggaggttttcctgcccaacaatgcacaatctcattatgagaaaacattagacaacccaaatggaggaacattcctacaaggtaactgaccagtacccttcagaagtctcaaggtcacaaaagacaggaagactgaggaactgtcacagattaaggagacaatgactcctgtcacgtgaaatcctggattagatcttgggacagaaaaagagcatcagtggaaaaaccagtgaaacacgaataaactttctagtttagttcatagtaca

SEQ ID NO: 272459 - DNA, 450 bp, Homo sapiens
taggacgtacgcaccttagccatcaattaccactccccgccttgcccgggccgggcgcctgcctgacctacacgcccttcgccggcccgcggaaccggctccctcccgcgggcctcgggggggcttcagaaaccgctcggccgagctctgactgccgggcgagtgaccaggagatcgctcgctctctaagaagcagctttgttgagtcataattaataaactatgatgagatttggggtctgatgtaggtgtaattttcttcttgtgaatattttagtggaaagctgtagcagaggataagggtttgggaatagcgttaaaggtcagtagtagtagtggtagaatatgtagggctatgagggcgttttctcgtgtgaatgagggtttgatgttgttaatgtggtgggtgtattttcctcgttgtgtatacttagattagagagagtagag

SEQ ID NO: 272460 - DNA, 324 bp, Homo sapiens
cgaaccccccagagactggtttcaagccaatcccataacctctatgaccttctcaataagatattagtgaaattatttcataactttgtcaaagttaagttatagtttaagccgtatatatcttaatggcccatccagttcaattaggtcttcaagatgcttcatctcctattatagaagaactacttaccttccatgaccacacccttgtcattgttttcctaattagttccctggttctatacattatttctgtaatactcaacaaaactgaccaacaatagcaccatagatgcccaagaaatagagactgtctgaattatc

SEQ ID NO: 272461 - DNA, 595 bp, Homo sapiens
atatgtgaccagagattattttacatcttcctttcaatttagatgtcctttgtttttcttgcctaattgctctggctagaacttcgaacactatgttgaatagaagtggcaacagtagatatcctagtcttgttcctgatcttacagttttgaaaagctttttgtcttcactgttgtgtgatgttagctgttggtttttgcatatatggcatttattactttgaagttgtttccttcctggtttgttgagtgtctttatcatgaaagggtgtcaaagtctgttagatgctttttttgcataaattgagatgaccatgtcttttccttcttcattctgttaatgtggattacatttattttcatatgttgagccacccttgtattccaggtataaatcccacttgatgatgatgtataatcccttcaatatgctgttgaaaagccaggcgtgatggctcatgcctgtaatctgacttatttgggaggctgaggcaggaggattgcttaaggccaggagctcgaaacccatctgggcaacatagcaacaccccatttctaaatttaaaattttgaaaataaaaatttaaaaattgag

SEQ ID NO: 272462 - DNA, 160 bp, Homo sapiens
aaaaatggcttcccattggttctctggaagttcacctgaaagcaaggggacatctccgcccatctattggatctatggtgtcttgggtacttattttcagctacacacattcgcacacacttctctctttctaagtaaaagccacataattttcatgaat

SEQ ID NO: 272463 - DNA, 622 bp, Homo sapiens
aggtgctttttctgtctgccagagaaacattccagggtgctgtggctgcctcacctatccagggcgatgcagctccctggggacacaggtgcttcctggggagccctgagcacttctccgtgttgctggcctcacatccaattgggcaggcattggagtccgggcactgcctggagctcaccagaaggtgctttacagtggtccttggtttgtctctcagagggcttggtcccctctgctgtgaggctggactgcagctgtggtggcaagtgaccagatgtcactgagcagcctgaccatggtctaggtggtgcttggatgcatccacttggcttcctttggtcattgagtttcaagaagagaaactccaggagacggcttggccaggatcaggcaaaaacaatcatgccgaaaaagtggcagaaaagcttgaaggtctctcagtgaaggaggagaccaaggaggatgctgaggagaaacaataaatcgtcttattttatttccttttcctctctttcctttcctttttttaaaaaaaaatttaccctgcccctcttttttggtttgtttttattcttttgtttttacaagggatgttatatgaagagctgaattaaaaaaa

SEQ ID NO: 272464 - DNA, 1213 bp, Homo sapiens
cataatttggctctttgtatctgacctgtatttgcctgctagcatttatgtaccttttctttagttatcacaggaaatggagaccatctggcgaccactcttgttataatagagctgtgtggcatattattgtcactttcaatagtatattctgctttcaccccgtgttcttatattaagccctcaaaataataaatcacagtctgcttaatttacactaggtgtccctcttggtagctcatcccccagctgtggtttttcccttcagattcaagagtgaaattgggaacttgaaggaagatgtcaatatgtatgttttatttaaacgaataaatctttttcttatgaaagtttaaagtaatgatgaaagactgctatgctggcataatagaaaacatcctggattctcaataccagagttgagatctgggatatttacattggtctctgacattgcaccaggaattcagcagtcctttcctcaggtttacagagagctttaattatagtcttcttagtcatttctggtgatttcaaattaaacttgtcttttggaagtattttttttaaagttgttgatgacaggttagcacctggtaaaatggggaattttgaggacagtgagtggacaggacgggtatccaaaacattttacattgaaaacaaattcagaggaattcttagaattttctagaaccttttcccataactgaagagcaaacatattttgtcgaattatgatgatgctgttgtgaataacacagcaacagctaacatttctgttgtgtttatcatatgccagtcattgtagttagattatatgtcatccactctaattctcaaaacaatcgtgagagctaggtactacattctccattttatagatgaggaaactgaggctcagagatatttaataacttagacaggttcacttaactaggaagtgccagagccacaatttgaacccaggtaacttggtgctaaatcttttgctttttgctatctctaacacgaggcattgtttgcaaaatagtctgataactgtcttctgctcaattgggtgcttaatgtttattttctagatttccactaaaatatataaatagatatttcccctttgtaaaatagtaatttataacatcaccatctacaggcttttcaacttcatgtcttgatgtcatttaaatccttccgccaaaacaatctttctaaa

SEQ ID NO: 272465 - DNA, 487 bp, Homo sapiens
tttttttttggcagaaatttaaatataataacaaatactgtattcccactgtccagacttgaaaattaacatttttatttgtttcatctttatttttatttagaaatctgtagagttagtaagaataaatataaaagaaacatagttaaaggagaagaaataaaagaaggaacacattgtaatatatataacatcgtgtttgatccccaggcctaggcaagcccatttcctctgtgaatttggtatttatctttctgggattttttaaatgcttttaagccatatatgagtatgttagtccattcttggattgctataaagaaatacctgaggctggataatttataaagaaaagaggtttaattggttcattgttctgtaggctgtacacaaagcacagggctggcatctgcttctgatgagggcctcaggaagcatacaaccatggtggaaggtgaaggggagccagcatgtcacatggcaagaa

SEQ ID NO: 272466 - DNA, 975 bp, Homo sapiens
cagatgagaatactgatgttcagagcaaccgactgaacccctggaagtcactcatactgaaaatggcaaagcagtatctgcccctgctctgtccaatgctaacaggactgctgaggctcccctccacctcgcctcaagttgacattgggcctgtggaaatagacctctaagccagcctttcttgctagtttggttttagcctttcttggactcagctttgccatctgtgaaatatgtgagtcatctagatagtgtctgaaacctaccagctccaagtctatggtccacggatgggctgtgaggacaatcaagactgaggcaggttttcactcaagtcctggaatatctggtcatccttccagggttcttcatggcagggaaacaaaatcaacaactgaagaacatgaggttcaggagatttaagtctgagttccagtgttggctttgggtgcctctaatcaaccacaaatctatcccaagcccgaggcaggctggtcttactcaacatttatggggtcttgcagggcttatgagtgagctcatgtgggtgagctgtgggtaccacaggaccagcacagattgctccagcacattgtccagccacgagacagaatttccctcttacagatccattgaatagccctggcctgtgggtttgctgtaaagatgcaaaagccctgaagcattatctgccaaacctcagccctgaccatggttaggctgacatcaggggaggcagcaggagagggagagaaaagggtatctcattgtggaactggggcagtggtgggcaggggctgatgcaggaggggtgccatggcccaactgctcttcacccacggtccttacacagacctgatcctgctaattctgactcagctttcagactcagcctgcggacactcaatttttagtaataagcagtctcctcataatttactatatagcaaaataaatttttaaaagatattaata

SEQ ID NO: 272467 - DNA, 358 bp, Homo sapiens
cagtctaatgttaaatgagaaaaatcaactcaggacactgtcatctgcatttaatcaagacttctgtgtctcacacaagctttcaagatgggtagcggtaggggtgtgtgtttaggagtctcatgcaaacttcccattgccctgcagtggacaggtctatagatctccagttggagtacagaaatcttctagaagaattgtgactgtaaagccacttctataactcttactctgtgattctgatgcaaacataccattttgggttaatataagcaaagcttgtatctagaactatagctaaaagtatcaatgtggtgttattttttttctgacaataaaagcaatacataaatgtgca

SEQ ID NO: 272468 - DNA, 268 bp, Homo sapiens
gaaggggccttgcacagatcaatgatgacaggtacagcaccatcaactaacgagcattgagtcagcactgaggtcaagtggtggtgagtaggtaatgataggtgaaggaggcaatttcaaacatgttggcaacattttttacttacaagatttaaaagtcctttacgcagccgggcgtggtggctcacgcctgtaatcccagcactttgggaggccgaggtgggcagatcacgaggtcacgagttcgagaccagcctgaccaacatgg

SEQ ID NO: 272469 - DNA, 209 bp, Homo sapiens
tggggtccaaaacaaaccacctgttctgggatgctttgggcaacaaaacaacaaaggccccactacacaggaaaattccccgccgggtgcagtggctcacacctgtaatcccagcactttggaaggctgaggagggcggatcacctgagatcgggagttcgagaccagcctggccaacatggcgaaacccccgcctctactaaaaaaaa

SEQ ID NO: 272470 - DNA, 437 bp, Homo sapiens
tttaaaaatcaccttattccaacaaagttaaccctattctcaatattattaaattatatgctgctaaataatatcctaggtatttctataacaaatataacataaaagttataactcaaagttagatataaaatgccatcttctttatgaaaagaaattcacaattaccccctattgccagtgttttaatatttttaaaaaacttttttttctctttctttagagatggggtctcacactgacactgaggctggagtgcagtgggatgatcacagcttactgcaacctcgaattcctgggctcaagtgatcctcctgcctcagttttccaagtggctgaaactacaaggtgtgtgccaccacatccagctgaagaaacaattttatccagtattttactttgaccagcttaaattgtatttcagctcaagaaggaaa

SEQ ID NO: 272471 - DNA, 348 bp, Homo sapiens
tgatcttgagtttgatgactttttagatacaactcctaagacatgatccatgaaataactgataagctagacttcattaaaattaaaattttctactctgtaaaagccactgtcaagaaaatgaggccagatgcagtggctcatgcctgtaatcccagcactctgggaggctaaggtgggaggatcacttgaggccaggagtttgagaccagcctcagcaacatggcatgaccccatttccacacacacacacacacacacacaaaagtcgggcatggtggcacgtgcctgtagtcccagccacttagaagactgaggctggaagatttcttgagcccaggagctcaa

SEQ ID NO: 272472 - DNA, 719 bp, Homo sapiens
ctctttctccctctctccttacttttttctctttctctccttttaatttgctctattctctatatgggcctcgttccttctactgcaaataaggaaaatgaccacctggaaacccaaaaggcccaccacatcccagcagagccaccccagctgaaagaaacccagcttctctctccagcttctacacatcaatccaggccagaactccatctgacccttgtgagacatgcttccacacctcggtggaccactgaggctcgggaattcagcataatgatgggcacttctggggtcatgggccttccctgtagctaaggtgacaaaaggacagactggtctggaatgtccatgccagctggcttacatgcccagccattgatgctggctgctttctgggagctcagttgtgctctagaccagaaaacctccatgtggcctctccacatgaccctcatttctcagcatggtggctgcggcccaacggggagactctcatgagcaaagtttccaaaagaccaaagtggcagctgcgagcctcctcatggctgagcctcagcccccatgcagcatcagagccactgcagtcttggcttcccaggaggccagcccagaagcagcaagaaaggggacctggaaaccaggaggtttggttcgagggaaggccctctgatataatttggatatttatctccacccagatttcaagttaaattgcagtc

SEQ ID NO: 272473 - DNA, 207 bp, Homo sapiens
caaataattcttaagattgtttcaggtttaaccatcttcgtaacagctgcatccacagacttcaactacatgattacctctttgcccattctgctctttcttttctttcccgaataacctctttcagatacggttcaaggtagaaattttcctcttcatatttggtccactgctctttaggcaagatctgatgcttcatggacaggt

SEQ ID NO: 272474 - DNA, 321 bp, Homo sapiens
aaaggaactaggtatctagataaaaactgtttcctaagggaaaagcttagtctgtaccagatatatagaaggaaaatgaaagtccattttagggccaggctggtctcaaactcctgggctcaagctatccttcccaccttggcctttcaaagtgctgggattataggcatgagccaccatgcagaccttaatgcttatttctaagctggtctctgaatctatttcatgaacttgtataaattcccatctgtgtataagtttgtacccttacataaatcctcatttcaataaatgtggtttctagttactgtcaaaaactga

SEQ ID NO: 272475 - DNA, 177 bp, Homo sapiens
aggcagaaggggcccagacttgaggaaagggcaggggcaggggctggcaggcgagagaacctcgaagaatgggtggggccttgcacctcatacctaccctcatacccacatatgcacccaagcattctgcacctggctgatggttttgcctaaataaatgagccagccacaccgatt

SEQ ID NO: 272476 - DNA, 458 bp, Homo sapiens
gctctcccatcctactgtggggggttttaagtgtttcaaccttttgaggaagcagttttatatacctattaacattgtaaatccacatatccagtgacctaaccgtcccactcccacaaaactgacttacagagataggtgcatgtctgaacaaagatacatctacagggcaccattgtggcaccttttgtaacataaatagttggggaaaccatttgaattgttcatcaactcaaaatagacaaattgtgaaatacaaaatgtagtatgtgtgtgtatgtttatataaattgtttttgaagtttggaagaatacacagaatacttacaaccatagtatggtacacactattgattagtaatcaatcccattcctaattcccttaatattttgacacattcacttaaaaggtctttccactttccagcccctcttgcacagaggagtggtgacattct

SEQ ID NO: 272477 - DNA, 301 bp, Homo sapiens
ccaccctaagctgtggcatatgatgcactgaaactgacggtggcaacaacaaaacccaaacccaactcagctcctgacttattgcctcaaacctctacactaacttagaagagaagaggcatgtacactttcaggcataaaggctgtgtacgtctgtggctagtcttctgcataggtggaatgaataactttccaaaacacacgtacacatacgtacccacacacaccaaaccgtgatgcatcatattcaaaccgtcaaaaacaaaagataaagaaaaaataccgaaagcagccaagaaaa

SEQ ID NO: 272478 - DNA, 500 bp, Homo sapiens
tactatatatacatgttttcatgtcctagctactgtgaataatgctgcaatgaacataagggtgcagaaatcacttcaagatagtgatttcatttcctcatatatccagaagtaggattgctgggtcaactggtagttctatttttaatttttttgaaactttcatactgttttccataatagctgtatcaatttacatttccaccaatattgcacaaagtttcacttttttccacatcctcaccagcatttgttatgtattgtcttttcaataatcatcttaagaagtgagaggtgatatctcattgtggttttgatttgcatttccctgatgattagtgatgttgagcatttttcatgtacctattagccatgtccctgtttgtatgtcttctttgggaaaatgattattcccaaattattattatggactactttattagtccattttcatgctgctgataaagacatccccaagactgggcaatatacaaaagaaa

SEQ ID NO: 272479 - DNA, 974 bp, Homo sapiens
tgaacttatatttgtcaatcagggcatgacaaactttgcaatcctctcagggtaaaagaagtatataaaaattttcttataaatgcactatccctttaaaaatattttcctatgaacaagaaaagaagggctcagtaggtttatctgaagctactctgggttacaaaggagggcactggcaaaactgatattaaagagaagggatccacgttcccacactgtaggtattactgcgcatttgtctcctaatgaaaagtgaccttgtactccatgcacgagaccacacctcacataacaacatctgattttgagccttatatttcttaacagggatgaggacaggaccccgaatacagatgcttcagatgcttctgaaaatcatatttatgaagaagtgcttaagcactgaggatggccatccaaatggagagacgactgaagagatttgtgagtattgtcttcaacgtatctaaagaaagcatacaaacaaaggtgcttttcctctctctctctctccaacccttccttatttctttccttccattaaggaaaaaaaaaaaaagttctagaactgagaagtaggacaagggtttagaaataatgggaaagagctttcacttattcaaatataaaagtacttgctttggaaggtaataagcatcacatcactggaaatagtaattacaacgataataaaaataaccagtaactgagtacatactattttccagaagcggctaggtattcacatgtatttctcatttactctttactataattctatatgtagatgccatcgtaccattttgcaaacaagaaagtggaagtttagagagcttcaataattcaaggtcacacatagttactagaaaacagagacaaaatttgagtctagctttgcctgatttcacagtttacactaatctctttcttcctgttccctctcttgtctgcaccctgcaccaagccacagc

SEQ ID NO: 272480 - DNA, 458 bp, Homo sapiens
cagatacaaacagtggcaaagctgcatctgaagaggagcccaggaaggggccctgtcctggccccagaggagtccacacagcaccaccctccagaagtggctgggcccggggtcttgcaggcggcaccttttggtagattttgtttccctagaaaatggggaaaatatttcaagccaggtgaggggaggaagttaacactgaaatatgtattgtttttaaaaattaaatgcaaatgcatggaagctggttgtcctttctctgggtttggcactggcgtcctggaatccaaccgtgttggggtgcaggcgctatcagactctggatgatcctggctcgagcacacacatctaagggccaggctgggttcgcatggtgatctccgtcttgtatgtctgaatgttgacctgaaataaagattactgctgtaaaataaatgttttcactgcagaaaaaaaaa

SEQ ID NO: 272481 - DNA, 437 bp, Homo sapiens
gctgcaaaagactggaaaaagcagtttagagctttgggatcagaaacacttgtgtatgtaactacagggtggttccaaatgccatcagcaccgggcgtggtggctcacgcctgtaatcccagcactttgggaggccaaggcaggcagatcatttgaggtcaggagttcgagaccagtctggcgaacatggtgaaaccctgtctctactaaaacaaacaaacaaacaaacaaaaaactgggccaggcgcggtggctcatgtctgtaattccagcactttaggaggccgaggctggtggatcacctgaggtcaagagttcgagaccagcctgaccaacatgatgaaaccctgtctctactaagaatacaaaattaaccgggtgcggtggcacgcgcctgtagtcccagctactcgggaagctgaggcagaagaatcgct

SEQ ID NO: 272482 - DNA, 407 bp, Homo sapiens
tcagtggggggaaaccttggacaggctttcttgggcagaggtccctgcagctttcctcagtgtattgtgtccctggttaatagagaatggaggatggcggtgacttttaccaggcatgctgcctgcaaacggatggttaacaaggcataccctgcacagccctaaatccattaaaccttgattcaatacagcacatgcttctgtgacacagggtttcggctaaagttacagattaacagcatctcaaagcagaacaatttttcttcatacagatcgaaatggagtttcttatgtcttccttttctacatagacacagttacaatctgatctctctttcttttccccacagaaattcatgaccccatcctttccaatatgactttataaaaaatatttatcatccaaa

SEQ ID NO: 272483 - DNA, 317 bp, Homo sapiens
aaggaagaaagaaagaaaacaaaaacgttctcagcactacaacttctgccttgttctgttccagaacagtatgagctcagtactttttcagactctcaattttctacaactaataatttgctctttcagttagtggcaaaggcttaacgacaaaggttcatctttaatattagagaggcacttttaaaatttatgatgctaagccttttgttctggatatggtatgttgcacaggtctagggactgggatttcagatgtctattccgtacccttattcttttatttattaaatcttttagtgtgtatttttttctat

SEQ ID NO: 272484 - DNA, 670 bp, Homo sapiens
aatacttaaaatatcttaattttttgtattatgtgttaaaatcataatattttggtatttggggttagataaggtctattgttaaaatcaatcttaactttttactttttctcacgtgacgacaaggcagtgtgaaagttctcgtgcagctcacacaggccgcgctgctgtgtcgcttctcttaacgctctgaattcaggagcgagggcggcaagagcagtgttgggatgaggagcagtctgcacactggctgccctcctgggccctcaccccagcccctgtgctcctcccccttcccctgatgccagccctgctcctggatgcttcctcagcacttgctgcttccctctggggggtgaggagctgcacagcctcttcctgagctcttccatgtctgtggacgcctctcccagcctgaccagaggttggacctcaaggctcagacccctgtcctctatttccagctcaccgtgcagtgctaagcgcctgcatgtccaggggactgacctgaggagcaggtgctgtggcatcattcacaccaccagcagagtcccttccaagaggggtctggcccactcttccggttcagtgctcccattctgccaccacctgcctcccaaggctcctgtctgtcaggctcggtgctgggcgccagaggggcgcggccgca

SEQ ID NO: 272485 - DNA, 173 bp, Homo sapiens
aaaatgagtacctgcttccttgtactgtcaagattaagataagcagttagcactccctagaacatactaatttgtcaatattaatgatagctaacaattatcctgatattgaatgatggactccaaattatttattgtggcctaggaaaagtactaagaagtaattgatagca

SEQ ID NO: 272486 - DNA, 444 bp, Homo sapiens
tattgtatattactcatctaggcatggttacatttttcatcataatccaggtttatgatcatgaatagccacattcaggccaaagcacatttaccaaaaatagtgaattatggtctggatggaaaaatggacatgatttggattatttccttctaagaaggaagaatatgttcagtattatttgaaatagttgcattatgacaggcagaaatatctttaaaaggaaaaacaaaactcttatatagagagagaaaaaaaatggtacatataatttgggcaaccaaggtaggaaatggatttactatgagaaagtgttccactttcttgcaacttaaatcatggaatgatagatagttaaggattatcagtattctaattggcttaagatcaagcctgtcatcttgtaacaaaacttcagctactaaaaagtttaccaaaaaaaaa

SEQ ID NO: 272487 - DNA, 668 bp, Homo sapiens
ccatacaaaaattgatgcagagaaggcttggtgtagtcagactgataacagataaagcaaaaagctttactagaaataaagagggcagtttatgatgataaaaggtattattcatcaggaaggcataacaaccctgaatttgtattatccagtataacactttaagtaggagatttttaatacattgttgttggtaactgatagaacaagatgagaccaaaatttaaacatgaagaaagagaagacctcattaaccaatgttgaggtgaagaggatatcacaaaagcttatgagaagatattataaaaacttgatgtcagtccatttgaaatttagatgaagttatactattagaaaactacaacttaacagacacagcagaaaatagaaaatctgaatagtcctattaaacatgatccttagtggaaagagctacccactagttttgaagtctttgggatttacaaaagaaaaaaaaaaaaaaacaaaacaaaaaaacggaaactatccacaagcaaaactcctggtccagaaggtttcaccagtgaatctaccacacacgcataaaatcatgaccaaatcgcattccagaaatggaaaatctttttttgtttgttttcacaggatcttgccctgggctagagtgcaagtggtgcaatcatggctca

SEQ ID NO: 272488 - DNA, 726 bp, Homo sapiens
ccatacaaaaattgatgcagagaaggcttggtgtagtcagactgataacagataaagcaaaaagctttactagaaataaagagggcagtttatgatgataaaaggtattattcatcaggaaggcataacaaccctgaatttgtattatccagtataacactttaagtaggagatttttaatacattgttgttggtaactgatagaacaagatgagaccaaaatttaaaaaaaaatacctatataagacagcatacttaataaaattaaacctttgatgaggcggaccatgaagaaagagaagacctcattaaccaatgttgaggtgaagaggatatcacaaaagcttatgagaagatattataaaaacttgatgtcagtccatttgaaatttagatgaagttatactattagaaaactacaacttaacagacacagcagaaaatagaaaatctgaatagtcctattaaacatgatccttagtggaaagagctacccactagttttgaagtctttgggatttacaaaagaaaaaaaaaaaaaaacaaaacaaaaaaacggaaactatccacaagcaaaactcctggtccagaaggtttcaccagtgaatctaccacacacgcataaaatcatgaccaaatcgcattccagaaatggaaaatctttttttgtttgttttcacaggatcttgccctgggctagagtgcaagtggtgcaatcatggctca

SEQ ID NO: 272489 - DNA, 437 bp, Homo sapiens
caagatcagcctgagcaacatagtaagaccctgtctctccaaaaaaaaaaaaaaaaaaaaaaattagctgggcatagtggtgtgcagctataatcccagctactcaggaggctaagccaggaggattgctgagtccaggagtttgaggttgcagtgagctatgataccaccacagtactctagcctgggcgacagagcaagaccctgtctcagataaataaaaaccattcattctgttctaggcactgtgttaaagcaatactttacattcattgccttaatttaatcctcccaacttcccaataaaacctccatcttgtacatgaggaaacagagactgaagagtttgctctagagctagctagtaagtggtgggacctgcatccctccccagaaatgagtgaatctactgcctcatgaaccttttccttccatta

SEQ ID NO: 272490 - DNA, 374 bp, Homo sapiens
agctcatgggcactccggtgaccgccgtccctggcctgctgaggacctggggattccaagtgtcagccaacatgggacatagaggtgacttaattcacctgcttggactaataatcaactcagtcttttttttttgagaccctgtctcagataaataaaaaccattcattctgttctaggcactgtgttaaagcaatactttacattcattgccttaatttaatcctcccaacttcccaataaaacctccatcttgtacatgaggaaacagagactgaagagtttgctctagagctagctagtaagtggtgggacctgcatccctccccagaaatgagtgaatctactgcctcatgaaccttttccttccatta

SEQ ID NO: 272491 - DNA, 2054 bp, Homo sapiens
gggagaacttgcgttggctgaggctgggggatcgatacacagcctgcaggccccggggcagcctccatcccccaagccgagggggagttcgctggaaggtcatgcagccttcctggactcccgcaccggtacagcgcactgcatgtaatattacagcctggggcggcgaatttgggaaggagggagagggtcgttgtgagcaggttgcactcagctctggccctccggagggtgcacttcacgcctccagagaaggtccacagcctcctggtgctgaaaacctacgtccctccactggcgaaacatttgtgcagagcggacgatgggatgggggctggagaggagcaatgaaagggaggagacacaggcaagcctcaactcccccaactcgtcccgaatcgatcttcgttccaaccgcgcaggatggggcccagatggtttgcaaagcgcacactcgcacaacgcaatacacagaacaagattccgttgttacagcgcgtggtttactagatgctaaaagggtgggagtagcaggagggtcttaaacggcagccccaaggctctgctaaggacagagacaccccattgtggacggtttctccattgcaatatatttagcgttgggcgctggggtttttgcttcagtgtagctgctctgatcagttacagattggcgaccacgtggattccctcaagcatcctgatttgttcgttctctctctctctctctctctttctctctctctctcgtctctcttatttttcttttgtatttgccgcccccccttctttaatatgcataacggtctgcagaggtaataggcaggggactgaatgacaggctttatataactgtgtcaacagatttcttcccgccttctacccttgagaaaacatgaaccgggtgggttctgagtaacctcacttcaagcattcttcatttaacacaggtgggaggtctgcaggttgcaaggcagcagaaagaaggaagaatgtcttcgaatattgtgtggagtccccagactcaagcctctgagcagaaaaactccttgagaaatcatatagtttgtctctttgcctctagactagtccaaaaggagccagagcaagtcagaatttggtttattgttggagattttagggcgaaaatattaataataacatttttcagtgctttctgtgagcctaagtgctttatgtgcactcaattctctccaattctataagtttgattttacatatggggaaactgaggcttagaataatgtctaaagtcacacagctagtaagtagaagtgctaaaactcactggggtctgacagcaaatatccgttaaccatcctgctgatcataaaaagacattacgactcctgtaatcccagcactttgggaggccgaggcaggcggatcatgaggtcaggagatcgagaccattctggctaacactgaaaccccgtctctactaaaaatacaaaaaattagctgggcgaggtggcgggcgcctgtattcccagcttctcgggaggctgaggcaggagaatggcgtgaaccccggggggtggagcctgcagtgagccgagatcgcgccactgcactccagcctgggcgacagcaagactccgtctcaaaaaaaaaaaaaaaaaaaaaaagacattctgtgccttacacattaggtaccttaaattcgatgtgctttacttattttttattttaaattttcattcaacatatttttcttgaatacctaatacattcatatggttaaaaatttaaggccgggcacggtggctcacgcctgtaatcccagtactttgggaggctgagctgggcagatcacctgaggtcaggagttcaagaacagcctagccaacatggtgaaacccccgtctcgactaaaaatacaaaaattagcgggtgtggtggcgggtgcctgtaatcagctactcgggaggctgaggcaggggaatcacttgaacccggggggcggaggttgcagtgagccgaaatcgcaccactgcactccagcctgggcgacagagtgagactccatctct

SEQ ID NO: 272492 - DNA, 505 bp, Homo sapiens
cagtgccagagccagagctggatccggggccccagccggagccgaaacctgagccagagtccgcggcgggcgagcccggagcccacgagccgcagacgcagcgctgcccaggagaagtgggcaggagagagggccgcccgctgctccccgctgcgtccagggatggagggccccaccacccatggaattgctggcccctctgcgtggcccgggacttcagccgtggcttcgcgtcaagagggtatttttcctaaacgaaaccgcttcgttcgttcgttcgttcgttcgttcgggcagcaatgccgcagaaaagcagcagacgtcggtccgcgccctggctctcttcgccccggaccccgacgtcccgccgcagcgctcggaggtgcccccagcccaaggcagcctgctctcgccggcacaggtcgggctttttcttcccaggagagaaaccccaattcccttcgtaacgtccaataaagacattcccgcggcttcaaaaaaaaaa

SEQ ID NO: 272493 - DNA, 884 bp, Homo sapiens
cagtgccagagccagagctggatccggggccccagccggagccgaaacctgagccagagtccgcggcgggcgagcccggagcccacgagccgcagacgcagcgctgcccaggtggggtaagagacgctgggctaggggcgcagggtctccgcggtggaggggcgcagggaggtggcggccgagtcctgcgcagtttgctcctggcgtgtgtgggtccacccggcggcgcgggacagcgcaaggcgcggaaggtcaggagccttcgaggcagcgcgaggagctcgttcctgcgcccagggcacagtcatagccgccgtcaccgggtgctacctcacccaaccggcgggatcaaccctctgctttggctccgggcacctcaagagggtagcagcctcgggggcacgggccacggccccgcgaagggcacaacctgagaagcccgtggcagcccctcgcagcgtcgggtgacacagggctcccccacccccaggagaagtgggcaggagagagggccgcccgctgctccccgctgcgtccagggatggagggccccaccacccatggaattgctggcccctctgcgtggcccgggacttcagccgtggcttcgcgtcaagagggtatttttcctaaacgaaaccgcttcgttcgttcgttcgttcgttcgttcgggcagcaatgccgcagaaaagcagcagacgtcggtccgcgccctggctctcttcgccccggaccccgacgtcccgccgcagcgctcggaggtgcccccagcccaaggcagcctgctctcgccggcacaggtcgggctttttcttcccaggagagaaaccccaattcccttcgtaacgtccaataaagacattcccgcggcttcaaaaaaaaaa

SEQ ID NO: 272494 - DNA, 715 bp, Homo sapiens
ggcttaagcaatccttctgcctcagcctcccaagtagctgggactatagacacacaccaccacactcagcaaaagtgacaattgtttctaatacagacatccacacctggacatactgtgaaaattatattcattgggcatattagtgtccgttctttccaagatctgagttcataatgttttcttctgtaattgtaatgaaatatcaccatttcttgctagcattataccaaatccctctaggcaactgggtagcaggctatatgccaacctaggtttttggagatgacttgtatcttgtttgctattagagccaacatgttagaatttgtgatttgtcacagagtagaagacgagttcactcaagaagcacttatttatgagcacctacacaggtgatagaacagtcaaaagacaggagttctggcccttctggaactgacaatcttactagaaaaataaatgttaccacatcacttgaacaaaggcacaattatgcaatttgagttgtgttttgacttccttcccactaccttgtttttttgtttttgttttttgtttgttttgttttgtttttatgctggaggtgttgtgggagatggagttttgctcttgtcacccaggctggaggttgcagtgagccgagactgcaccattgcactcagcctgggccacaagagtgaaactctgtctcaaaaagaaaaaaaggaaaaaa

SEQ ID NO: 272495 - DNA, 329 bp, Homo sapiens
aatctgtgattgttccttagtctttccttatctttcatgatcttgacatttttatgagtattttgatgaatgctcctcagtttgggttggcatgatttttctcacaattagattgcgttatgcactttttggtaatgataccttagaagtgatgcattctctgggcatcataccagtgggtacatgatgctgatgtgtcttattactggtgatgttaaccttgatcatttgtcaagttggtgtctgtggaatttctctgctgtaaaggtactattttttcctctgtcactaataaatatcttaagggaggttcttcgagattatacaaa

SEQ ID NO: 272496 - DNA, 334 bp, Homo sapiens
ttttttttgcgacagagtctcacactgtcacccaggctggagtgcagtggcatgatcttggctcactgcaacccccacctcccaggttcaaacgattctcctgcctcagcctaccaagtagctgggattacaggtgcccgccaccatgcccagctaatttttggtatttttagtagagagaggagtttcactacgttggccaggctggtctcaaactcctgacctcgtgatccgcccgcctcggcctcccaaagtgctgggattacaggcgtgagccacaggcacccagccaatctagtatagttttatctaaattctttaaatatacacgccc

SEQ ID NO: 272497 - DNA, 370 bp, Homo sapiens
caggagagctgagatggggtggggatggatcaggccttgagagggtgcctggtaagccccgggaagggtagggaggaggaggagggagaggagagggcagtgcaagggcagcgacccccagccttgcccccgttttgagcacggggaaagtgtacacaggtagtgaggaaatgcctgcgtttgggtgcgtgttcatttctaatccattttcactttttgtgtattctttctatctactttttaaaggtttgtttcttttctaacttcctgttttagatgtatactttagtttctttatttatttttatttatttttttgagatggagtctctgttgacaggctggagcgcagtggcgtgatcttggctca

SEQ ID NO: 272498 - DNA, 355 bp, Homo sapiens
tcagaaatttggcaaaggtcttgatggagagaatgcttgggttggatgccctacccgctaattttgtccttgacaaacactaaagtctttgctttgttttctgtctccagcagcagcagcctcttgccaggggctgagccttgatacccacatttgtctggtgcccccaaaagagtggctgcagatcctggtgtcaattcacaggctttcatcttgtgctggatttcttttcaggttccttccctgggaagttttttgtttcctagtcacaaatattgacagaaattttactttgcctttcaggaacttttagcctagctctttaggcctccactcccctgactactcagctaaa

SEQ ID NO: 272499 - DNA, 478 bp, Homo sapiens
ttctttttttgacagtctcgctctgtcgcccaggatggagtgtagtggcgtaatctcagctcaccacaacctctgcctcctgggttcaagcaattctagtgcctcagcctcccaagtagctggaattacaagcgtgcgccacaatgcccaattaatttttgtatttttagtagagacggggttttgccatgttggtcaggctggtctcgatctcctgacctcaggtgatctgcctgccttggcctcccaaagtgctgggattacaggaatgagccactgcgcctggccagtttttaatactgttaatgctattcaaagatggaaaagaaagccttgaaagtatattcaatcatgaagactgcacttctacctaaaggctagggacgtagagagggcatccaagactgggtagtttaaacagtaatttttaattccttcactgggcatggtggctcacatctgtaataccaataactag

SEQ ID NO: 272500 - DNA, 875 bp, Homo sapiens
atcaaaactaagtcaagaaaaaataaaatatctgaaaagtcctgtaacaggagattgaactagtgattttaaaacttcctgcaaagaaaaagtccaggcccagatggcttcaattgtgcattctaccaaacatttaaagaaaaaaatagaattaatctttcacaaattcttccaaaattcaagtaggttcatcaatcacttcccaatacatttgatgaggccacattatcctcataccaaacccctcccaaaaaaatctcaagaaaactatagacccatatatatcccttaggaatattgatgcagaaatcctcaagaactgctacaaaatgaatccagtgacatgaaaaattatagactgatcaagtgggatgtatgctaaaaatgtaaggttaggactcctgactcaacatcattcaccatgttaatagaataaaggaaaaaaacacataaccacatcagtaaacacagaaaaagcatttgacaaaatgcaactcctcttcattataaaaacactcagaaactatgaatagaaaggaacttcctcaacctgataaagggcattaaatgaaaaacccacaactaacatcggacttaatggtgaaaggctgaatgcgtttcccccatgacatgacaaggatgtccattttcaacagacatttctgttcaacactgtacttactggaggttctcgttagggaatttaggcaggaaaaacaataagtggcaaaagaagtaaaactatattcccagataacatgatcatgtatatagaaaatcctaaggaatacacacacacataccctgttagactaaatgttgaacagttttgcagtatgcaagataaatgggcaataaataatgcaaacatgaag

SEQ ID NO: 272501 - DNA, 471 bp, Homo sapiens
tctgtttcacctgataggtcctaatttaatctagtatcaaggtctggtatcaatcatttctctctcaaaagcaaaaataataagacttttttttgttacatgagtcattttgtgaaactaattaacttcctgtggaacacaatgctctcccattattttttggccgaactatcaggtggttaactcctttatttatttcttctttttaaaaaattgtctaccaaactaaagttgagaaagaggagagggagggtcagagggtgtcacaattgttacccttctcaacattcatattattacttggttaccaaagacctcagcttgaaatgaaggaatattagctcaagttatggactctttgctgctttcaaattgtttttaactatgcaattgtcaaactttcttaggagtttctggagttcttcatttagtgctgagaaaataaataactttaattgatatatcaattta

SEQ ID NO: 272502 - DNA, 451 bp, Homo sapiens
agcatttcccctttggttctctctttccctcttggcctttcctgtacctctggcttcagggagggatgttcttctatcctggctgtctatcttcctccctccctgctccgtcttggctcctttcactggctcctctttctccctgcccttcaccctccacttcctacctgggggatactgtcaaccttcaagatgtagcacctgcccatccgtggttctcttccatggctgtgcattagaatcacctggggggcttccaaaaagtattgacttccaggcccctcccttaactcattaaatcagattccctaaatatgcagcctgggtgtctctgttgatcaaagctccacagaggctctggtgagcagtcaggatggagacctttaatttccgtgttaatgattccccaggggatctctccacttttgtccctccactgagccccacatgc

SEQ ID NO: 272503 - DNA, 398 bp, Homo sapiens
tttttgttttccatttgattgctgttttattttacattttttttgttttactagtatcttttctaggccttgaaaatgtattctttaaactttttgaggcacaatttacatagcacaaaattattttattctaagcatgcaatccagtgattttttttcataaatttacctagttttgtaactgtcactataatccaattttagaacattttttatcaccctgtaagatcttttatgcccatttaatctgcattagcactcccagtcccaggtaaccactaatctactttctgtctctatagatttacctttcctagatattttgtataaatggaattatatgatatgtggtcttttgtgtatgtcttctttcattaagtgtaatgttttcaggattc

SEQ ID NO: 272504 - DNA, 421 bp, Homo sapiens
tgctatgttgcccaggctggtcttgaattcctggcctcaaataatcctcccacctggcctcccaaagtgctgggattataggcaaaaactactgcacctggccctaattcataggttttaaatggtgcactgttttgagtagcacaatgaaaccttgagctgtcccattccatctggcctgggatgtgaatcattccttcgtttagtggctccacactgtatatgctacccgcccattagtcacttaatagccatcttggttatcagaccaactgtgagagtattgctgtgtttatgttaagtaacccttatattacttaatgattatccaaagcacgacagtagtgatgctggcaattcagatgtgccaaagagaaactgtaaagtgcctcctttaagtgaaaaggtaaaagctctcaac

SEQ ID NO: 272505 - DNA, 250 bp, Homo sapiens
cagatattgtaaggaaaaataagagtctgttggggagactgatcttcacctaatctttacaaaacatttttagaaaacctgcatgttttttcttaaactttcattgtactttaaaaaaaatccacatgtgtatcatcattacagtttgtgtgaattgcgaatgaggactctttcttctttctagtccatggctaaaagaaaccaaggctactatggcagtagcaaaatccatgtttcccaatcctaaaat

SEQ ID NO: 272506 - DNA, 393 bp, Homo sapiens
gcaccactgcactccagcctgggtgacagagcaagaatacatctcaaaaaaaattattgataattggtcattaataacttgttcctatagttgtgttagctctgttggattttgatttggccaatggttacactaattttgaataagcttattaataaagacaaaaattgaagaatgaatttggaataatcatttggaggaagccaaagggcactgtcgtatttcaaataaacgatgtcatcaatgaaatggtagtttcagataaatgtggtataatgaatgcaacaaatgtttattttcagttgcctagggattcaggtcaacatcctgaacagtgaagacagagcattttaaaggagactttgtagtggtgcttgggataactagagagag

SEQ ID NO: 272507 - DNA, 522 bp, Homo sapiens
cagggtggtggttgtctgtaactttaatccactgactgttgtactagggcagtttgggctagacactttggaggagctcctgtgaagggcatgaaggctcactgtagcagcagctcagttgtctttcagagttctgcccttaagagctggtttgcagtgctcatccttcttgctgatattttaaaataggtagaaacaggctgggcgcggtgactcatgcctttaatcccagtactttgggaggcctaggcgggcagatcacctgaggtcaggagttcgagaccagcctgaccaacatgttgaaaccccgtctctactagaaatacaaaaattagccaggcgtggtggtgcgcacctgtaatccagctactcaggaggctgagacaggagaatcatttgaagacaggagaatcgtttgaacccaggaggtggaggttgcagtggcagtgagccaagataccgccactgcactctagcctgggcaacagagcaagactccatctcaaaataaatacataaata

SEQ ID NO: 272508 - DNA, 1043 bp, Homo sapiens
ggaattgagaatacgttggagcaatacttcacatttttgaagtaaaatgatctccaaaccagaattctatacccagccaaactaccaatgaggaagctaccagaggatgtgcttcacccaaacaagggagtaaaccaagaagagggaaacagagaacactggacttaagaaatccaacaatgagaagcaaagggaatctcctggatgatgataaagagagagcccaggatgaaagctgtatgccagggaaagtcctgattagaccatgtgacaagtcttcaggaaagactgcttctggatgataaaatgaactgaatacctgttaagagacttggggggtcaaatttgcaataagtaccaaacaaagaagattaaaaaatgataagtcccaagggaaacaatatgttgtaaagaaaaagtagctatagtttgttcatgacataactgtaacttgccttgtacatgataatataaacaccgaatcttcctcactttgtgaaagaacaatattgggcaaatgcgcaggttttggaaagttccatgtgtagggggatggagggagaaattagcaaaatcctccttttctatagctaatacctataaagtgctacaacacccagaaaaaaaaaccaacacgaaagcatcacaaacaactacagaaacaaacgaaaacaaaatcaggagcacacatagagcaaaagacaagaaaaagaaccgaggcggcgcacgacagaataatgcccacaccaaggaaggacacaaagcaccagacgacaaaacaagaatataagcaaaaagaaaagaggggccccccaacaaaaatgatgaggagggttcacaaacaaaagaagagacaagcgacgagagaggacacgccgaatataaaaaagcaacgcagtcgaccgagcgaagagaaaaccaccgacagcagcggacaagagaacacctcggtgagaggaacgaccaccactatcgagagggggggcgggaagaagacacagagggagaggaacaaacaaaccaccacggaagaagaagagaga

SEQ ID NO: 272509 - DNA, 873 bp, Homo sapiens
ggaattgagaatacgttggagcaatacttcacatttttgaagtaaaatgatctccaaaccagaattctatacccagccaaactaccaatgaggaagctaccagaggatgtgcttcacccaaacaagggagtaaaccaagaagagggaaacagagaacactggacttaagaaatccaacaatgagaagcaaagggaatctcctggatgatgataaagagagagcccaggatgaaagctgtatgccagggaaagtcctgattagaccatgtgacaagtcttcaggaaagactgcttctggatgataaaatgaactgaatacctgttaagagacttggggggtcaaatttgcaataagtaccaaacaaagaagattaaaaaatgataagtcccaagggaaacaatatgttgtaaagaaaaagtagctatagtttgttcatgacataactgtaacttgccttgtacatgataatataaacaccgaatcttcctcactttgtgaaagaacaatattgggcaaatgcgcaggttttggaaagttccatgtgtagggggatggagggagaaattagcaaaatcctccttttctatagctaatacctataaagtgctacaacacccagacaggatacttctttgttgctttcattataatatccttgggtattgctgttggctatttcttaatactacttaaatattcacaagtgtacgacttgttttcccaacctaactataagctctttgatagttaatgcttctctatattatctgtagtggctggcatagtatgctacgcatagtatgtggtcagtttgagaaatattagttgaataaaataatagtgttggaacaaataaataatgactaaaactg

SEQ ID NO: 272510 - DNA, 498 bp, Homo sapiens
tatttggcctttagcatggagctgtctcctttcttaccatatgcaaagcaaattccaatgccgtggattttcccggccctgctagccacgtgtccctctttattactgtcacttcagcacagagtttccaagaaagagacacgtggaacagcctcatgttgaattctaaatcctactgatggacacaccaaatagcctcctgaccacaacagcatattccaagtcaaagttctccatgaatgttccttagcagactgaagacaaataaatacatgtcactttcttcttgaccccagagatagggacacgaagggataaacgtctttgggaatggcacccctgtaacctcagaatcactacttcatgaccaggtgcagtgactcttgcttgtaatcccagcactttgggagcccaggcaggagggtcatatgaggccaggagttccagatcagcctgggcacatatgaagaccctgtctctacaaaaatgaaaaataaa

SEQ ID NO: 272511 - DNA, 229 bp, Homo sapiens
gtgggttggagcccaacaccctactcccccagctgcccccagggataacagaagatgcttcctggaggaactgagaggaagaggtatgagggatggttcatgggtctctggaagagaccccactctccatgtcatgccctgcaaggtctgtggggaccccaagaagaagagacctgggtctgtgatttattttccagggaaacccatagagaagcagctagactcaaaa

SEQ ID NO: 272512 - DNA, 459 bp, Homo sapiens
agggtgtcttggcggtggccttggtaagagaaaggggcaaggggtataattgacaaggcactgaaagtattgaagtcagagccttgggaaggatctaccgaactctcggcggtccacgcggggacagacctcagcccgtgagccttgagctccacgcggggacagacctcagcccgtgagccttgagctccacgcggggacagacctcagcccgtgagccttgagctccacgcggggacagacctcagcccgtgagccttgagctccacgcggggacagacctcagcccgtgagccttgagcccagaaggagtggcagcctcaggacgtttgccaggtggcctggaatgtgagggaagcctcagccccgccaggaacagagctggcgctgagttcccggctcggcccgggtcagaagcgaggaaagtttgccggcgagtgtcctttgtgctgcgtggag

SEQ ID NO: 272513 - DNA, 421 bp, Homo sapiens
agggtgtcttggcggtggccttggtaagagaaaggggcaaggggtataattgacaaggcactgaaagtattgaagtcagagccttgggaaggatctaccgaactctcggcggtccacgcggggacagacctcagcccgtgagccttgagctccacgcggggacagacctcagcccgtgagccttgagctccacgcggggacagacctcagcccgtgagccttgagctccacgcggggacagacctcagcccgtgagccttgagcccagaaggagtggcagcctcaggacgtttgccaggtggcctggaatgtgagggaagcctcagccccgccaggaacagagctggcgctgagttcccggctcggcccgggtcagaagcgaggaaagtttgccggcgagtgtcctttgtgctgcgtggag

SEQ ID NO: 272514 - DNA, 354 bp, Homo sapiens
tgccactgcagttccgcctgccaggaccagtctttccctagaccttcccattcctgcctcttcctggcttggctgcctctttctggtgcttcaggtctcagatcaaatgtcacctcttcagagaggacttcattgaaatctctgcctaacacagcccgtatcaaggtcaacacttttctctttttagacttaggttttgatataaagaagtttcataaaaatgacttgggcagctatcatctgtttaaaaggtctgactttgttgaaataatttgggctttcctgttctttgagttttgataaaacaactgtaaaaccatctgcctttttaaaaaaaattgagattgatgtaaa

SEQ ID NO: 272515 - DNA, 544 bp, Homo sapiens
tctgtactatcacagtaagtgattaaaggtttgactgttactttcattgtggtttgtgttaatcagctattccgacacctggcagctcagctctctcctcctcagctgagctctcgacaattgctaactttctcatttcctcgaaggcactgttcaaatgtcactccaatgagtcccatcctaactaccttacataaaattagagaccacccctggctcttgaactctcaatgtcccttatcctacatcagactttcccacattagacttgtcactttgaaacatactatatactaattgattacggtattattaatgtttccccttatacccactaaaacgtaaactacataaagatgggctttaactactgtggctttaactattatattgcaagtcacataaaaaataaacaatatttgttgaaagaatgaatatacttgaaaaaaaggtgaaatttctgggaataagaactataattattcaaatactcagttgaagacttaaatagtagttcagacacagcaaaagcaaaaaaaaaaaa

SEQ ID NO: 272516 - DNA, 345 bp, Homo sapiens
tttttttctttgtttgtttcaatttcatttagttcagctctgatcttggttacttcttttcttgtgccgggtttgggttggtttgttcttctttctctagttctttgaggtgtggtcttagattgtctctttgtgctcattcagagcttttgatgtaggcatttaatactatgaactttcctcttagcactgcttttgctgtatccccttttgctgtaacagattaacagcagatttctcagcagaaaccttacaagctagaagggattggtgtcctatctttggcctccttaaacaaaacaattatcagtcaaaaattttgtttccagtgaaactaagtttcat

SEQ ID NO: 272517 - DNA, 349 bp, Homo sapiens
ttgagatggagtcttgccctgttgcccaggctggagtgcagtggcgtgatgtcaggtcactgcaacctccgcctcccaggttcaagtgattctcctgcctcagggattacaggcgcatgctatcacacccggctaattttcgtatttttagtagaaatggggtttctccatgtcggccaggccgaggtgggaggattgccggaggccaggagttcaagaccagcctgggtgacatagcaagactctatctctacttatattttaaaaatgtattgtaaattgacaatcataattgtgttgcctgttgttattttgaccaaaccatttgagagtaagttactattgtgac

SEQ ID NO: 272518 - DNA, 369 bp, Homo sapiens
ttttgccagttagaaaactaaataatagtatctcatttcaagttgcatttcattgattattagtcaaattgcatgtcttttcaaatggtttataggccatttatatttataatacttttctgtgaattccttgttcatattttttccccattaaaaatttttttatctaccctgggcaacatggagaaaccctagctctacaaaaaatacaaaaaattagccatatatggtggtgcacacctgtagtcccagctactctggcagctgaggtgggaggatcacctgagcccggggaggtcaaggccacagtgagccgtgattgtaccactgcacttcagcctgggtgacagaatgagagcctgtctcaaa

SEQ ID NO: 272519 - DNA, 338 bp, Homo sapiens
ggcggaggcaggagtacaccccagaggtgtgggtttggggcacagtctgttggtggaggctggagtgcacccagaggtgagggtttggggcacaatcttcacacaggctggagtgcaccccagaggtgagggtttggggcacagtctgttggtggaggctggagtacatccagaggtgcgggtttggggcacagtctgttggaggctggaatacacccagaggtgagggtttggggcacagttttcacacaggctgcagtgcaccccagaggtgagggtttggggcagaaacaatcccaaccccccacttcactaaatgggcatgagggtctcacgaa

SEQ ID NO: 272520 - DNA, 896 bp, Homo sapiens
atcatttctttgggttttgtatttgttattccacaataacctagtctaagccaaaacctgaaattcctttttttttaaatttttttctgtcgttaagctagcattggctactaaatcaaaaaaagtgttgggttgggcatggtggctcatgcctataatcccaacactttgggaggccgagacaggagggtcatttgagaccagcttgggcaaacatagcaagacccttactttacaaaaataaaataaaataaaaaattagccaggtgaggtggtatgaacctatagtcccagctactgaggagtctgagatgggaggattgcctgagctcaggacttcaagcttgcagtgatctatgactgtactacactccagcctggtcaacaaagcaagaccatatctctttaaaaaaaaaaaaaaagaaagaaagaaaaaagaaaagaaaaaattgtcaaaactagtaaattccattgggtatgtgtacatttttaaatggagaagaggcctcctaaaagaccacaatttctactttgtgtcaacatttatattgctcttttattaataggctactgtgttgtctctgaagcctttgaatagtatattaattcattaaaagcttgttattcagaaccttctaaaaaacaaactcttattagtacttaactgctcttgatctcctattcttactttcctgataccagttgataaatcagatgagctgtgatactccatatcaaactccagagctcacttgagagatttcaaagtgagttcatgcaaaggaactctataaataatcaatagatgtatactataagtaccttctcttttaaatcttgatagtatcagaattttaagttagtatatgaactgggttgttagctaaaacagtgga

SEQ ID NO: 272521 - DNA, 312 bp, Homo sapiens
taacagggggtagacagtagaggtttaagggaactgtttagtaaattaataggttgccatgtttaactcctctgtgtagttgagtttggtttacaaaagtagtagaatgtatttatttatgtttaccttacgacatttattcatgatgccaagggtgtgagttttatcctgctgtagacctatattactattttcttcagtttccatagactttcctgctagctctgacaagtcattttcctgaaatttggcaaacctcaaagagtatgactgaatcaatgccatctctatcaatatatatgaaatgatttt

SEQ ID NO: 272522 - DNA, 413 bp, Homo sapiens
ggaattttaggcatgagccaccgcacctggtggaaccacatgatcttgagcaagttgttttactcctcgatttgtccatattaaagagtaaagtgagttaggccaggtgcggtggctcatgcttgtggttccaacactttgggaggctgaggcaggaagattgcttgagcctgggagttcgagaccagcttgggcaacatagcgagaccgccccccctaccccgccccacctcccgctccccggctccatctctacaaaaaataagaaaattagctgggtgttgtggtgcatgcctgtagtctcagctactcaggaggctgaggcgggaggatcacatgagccgaggagtttgagattacagtgaactatgattgcagcctgggcaacacagcaagaccctgtctctataaaa

SEQ ID NO: 272523 - DNA, 319 bp, Homo sapiens
ataagaaaactgattcccagtcagagaataaaactccactaacaaagtctggcaaaccgcaggcaatacgtatttgctgaatattttgctttcaagctagcactttgagactcactactttggacggcactccccctccccacaaaacgacacgacactggctgacgtctctcccacccgccaggcagtgttaggccccgacaggcccgtgcaggtgggatcactgttatccccactagactgaggaggaagccggggacccgggcgattggccactcgggcgacctccacagtggagcaccaacagcgccgggaggcg

SEQ ID NO: 272524 - DNA, 350 bp, Homo sapiens
tttacccaattatttcagttcagggtctccagtggctgcagcctatcccagaagctcagggtgcaaggcaagaagtaatcgtgggaccaggcgccgtggctctcgcctgtaatcccagcactttgggaggcagaggctggtgaatcacttgaggtcaggggttccagactagcctggccaacatgatgaaacctcatctccactaaaaatacaaatattaattggatgtagtggtacatgcctgtaatcccagctactcgggaggctgaagcttgaacccggaggcagcggttgcagtgagctgagatcgtgatactgcactccagcctgggtgagggagtgagactcta

SEQ ID NO: 272525 - DNA, 1088 bp, Homo sapiens
tctcggctccctgcaacctctgcctcctgggttcaagcaattatcctgcctcagcctaccagttagctgggattacatgtgtgcgccaccgcgcccggctaatttttttatttttagtagaggcggggtttcaccatgttgaccaggctggtctcaagactactgacctcaagtgatccccccccccccccgcctcggcctcccaaagtgctgggattacagacgtgagccaccgtgcccagcggttttgcattttcaattgtggggcacggtgagaaaagacttgaagaaagcaagggagtgagatccatggaaatgtaggggggaaccttgcaggcctatggaacagccagtgcaaagggcctggggtgggagctgcctcagggtagccaggatggcaggaggcacagctgccgagaggaagcaggggccaggtcctgcaaggttagaggccatggctactcctgaacacattggcaggttttggagcagagaagtgacatgattttagttttctcaggatccctctggctgctgtgtggaggaagaggggagggtgagagcagggatacctcttaggaggctgtggtagtaatcccagggagcccggatgggagcagaggaggggacaggaattggattctggatgcattttggagggagcatgaaggaaagcggggtcaaaggttcctctgaggccttggctgcctctcttattcatctacatccattctgtcaaggacacctttcatttcttcttggcactgtctcaaggccaccacgctgctgcccacctgaccagcagtggcctttccaggccttccatcttctccccagcagcttatctctgcgtagccaggtcccatttcccacacacctttttttaaagtgtgttgcactgctctgggtgcaggactgtagcagtgaccagggcagctccagatgaagcttctgctcacaggaaccttttctactgaaacagatgatacctaaactctcagctgtgtgactttaagcaacttgcacaacctctctgtacttcagttgcctccatcttcaaatggggattaaaaagtgttgacatcata

SEQ ID NO: 272526 - DNA, 176 bp, Homo sapiens
tttttttacttgctcggtaaaataaattacccaacgctcagtttgttcatttgtaatttgggagaataatgccttcctctcaaagttgttttaggtttttacgtatatgcaaggttaagtgactgaaattactttgcaaattgtaaaatgcatatcaaggtgagtgattattttta

SEQ ID NO: 272527 - DNA, 484 bp, Homo sapiens
ggccagagtcaaagagtgtggagaaatcagaaccctcacacacagctggggaacacaaaatggcacagctgctctgacagcctggccggtcctctaacggccccacatggtcagcacaggacagcaattccacacctcggtatacacccaggagcaatggacacatacatccccaaatgcccatcgagtaggaatgtgtaggccaggtgcggtggcccacgcttgtattcccagcactttgggaggctgaggtgggcagatctcctgagctcaggagtttgagtccagtgtggccaacatggtaagaccccatctctacaaaaaatacagaaattagccgggcatggtggcacatgcctgcggtcccagctactcaggaggctaaggtgggaggactgcttgagccctggaggtggaggctgcagtgagccatgataacaccactgcactctagcctggatgacagagagagagaccctgtctc

SEQ ID NO: 272528 - DNA, 378 bp, Homo sapiens
tttggcaaacggataaactcttaaacatccacattcatctcaaggtagaacatttttatctatccagaagttttcctcatgtcccttctcagtcattctctgtcccagcaatcacttttaagaattttttcactttagattagttttgtttgagaatttcataaatggaatcacagtatattattgtgtttggcatcttatactcagcataaagtctgtacaatgtattatttttgcctgtatcagtaatttgttcctctttattgctaagtagtattctgttgtataatgtatactacaacttttttatcctttttccatttagttatttccaacagttggttattaaagataaaactgctgtgaacattgaggtac

SEQ ID NO: 272529 - DNA, 374 bp, Homo sapiens
actctctgttcgcaggtatctcttcttgagtctgtttctgggtctctcagtctctattcttcaagtctccctttgtgtcaccaagtgcttcccagcctagccactcctctacctctccatcagtctgccttacttccaatcaattcatccccatttttttctccttccctcttctgtttcttctccttaagtgactgttgatacagaactagatacatttttcttaggttggtggaatagactttcacattctctggtgtttagttctaaaattgattgaaaaatgtttgtattctttagtgttgtctgaatttcttataagagtatgtgtaattctttaaaactgtttattaaaatacgatgcctatattagt

SEQ ID NO: 272530 - DNA, 491 bp, Homo sapiens
tgtgcctagccatgtgctcaggtcattgttgactatgagtgcctcagtttccccttctgtaaaaagtggggtcaggcacaatcccgggcctgctcactgctccctcccccttacaagagctatggagcaaagggaggtggagatatttcttgaacacacaaagggaagggcagcttattttttggaagtcaccactcaagggcctcaagccctggctatcagcactgttcgagcttgtgtatacacgtgtccacacaaacgcgtgggtgttcacgtacctgcctactcacgtatgtcctcgggccaggccctgccctgtgaacctgtgagcacagccttccacgcctagcccagccctgaatgatatcccaccacagttgtgatgggccagcaactaaagcaacagcagcccctagtatgaagcacccagtgtatgccagacattattctgggtgctggaaacagaataaaacagacaaaaatccctgcct

SEQ ID NO: 272531 - DNA, 190 bp, Homo sapiens
cacccacccccggaaaaccaaactttattctcgagggcaactggacactgtattatgtcctgccgaacccccgcccttacttaggtagaggcgcataagtattctggccatgaaatacaccttctgttttatagagatttggcatatttgatatatgttctttggaatttatgaaatagaaaacccaaag

SEQ ID NO: 272532 - DNA, 385 bp, Homo sapiens
agcaccctatgaccacttgactacagaagacaaaattcaggtctgatttacagagggttctgccagataggctgggcactatctgaaatatgaatggctacttaagtctgaagcagtggcatgtgcaataccacagcaatgaatgaggcattccataagttcacaggtcatggtttaggcagacacactgcaggcctggaaggcaaatgagtatccagaataagtgtcgatcgcagtgagaacaaagtgctgccacttccattatgaaagtgatcttttgtaatcagtcacctgctagcaggtgactggccatgtttcccattttctgaaagagctggcctgatagaatggtgagatggcctttattttttattattgtggtaaa

SEQ ID NO: 272533 - DNA, 387 bp, Homo sapiens
gttcctctgaacccctctgtggactccatttggctccacccatagttaaaccatttcacaggctctcccatatcataccccttggaggattgtgagaacttgagacttccagctgcactctacaggaaccaagagcatctcaggaatgctgtagcttaatcttccattagtttttcataccactctgcagactttattatatggtggccacagtttagtgtagacatgacttcaaaaagtcccaaatattggctgaacgcggtggttcacacctgtcatcccagcattttgggaggctgaggcagacggatcacctgaggtcaggagttcaagactagcctggccaacatggtgaaaccccatctctactaaaaatacaaaaattaa

SEQ ID NO: 272534 - DNA, 374 bp, Homo sapiens
ttaattccacaatgtagttcaagttttccattaactaggacctgacctgttaagcagcagcactgtataagttaagaaaatacattatagccaagcatgggtggctcacgcctgtaatcccagcactttgggagactgaggcgggtggacaacttgggcccaggagtttgaaacaagcctgggaaacatggcgacagcctatctctacagaaaacacaaaatcagccaggtgtggctgcatgtgcctctaatcccagctgctcaggaggctgaggctagaggatggcttgagctgggagatggaggttgcactgagccaagattgcaccactgctctccagcctgggtgacagagctactcactctgtctcaaa

SEQ ID NO: 272535 - DNA, 217 bp, Homo sapiens
cggcacattagagctccactctgagggtgtaagccatgccatattttaattgtcattagcaataaaaaactagcagtgaggaaacccaacctccacacagaagagggcatgggccagggtcattaaccaggctgatccagcctctgacatgctgcatttatccttatttcacgtgtatgtgttcaaaccttataattggtagcttttactcacaggc

SEQ ID NO: 272536 - DNA, 415 bp, Homo sapiens
caaacactgaacggttttaagtggggcactatcaggatttaccattttggaaggtatgaagtttcacaagcacttccatgtatagtcaagttattggagctgtctccgtttagaaatggcttccagaaacactcctactatccactgagacaactcgcctggcatcagagacctagggtccagggtcagagatgggtcatgataaaagggcatcccttggggtgaggcaccagaagtctgcacagtggaatcaatatattccaaccaccagatgtagaaaatcttaagtgcaggatgtggttctcatccatctagtcacaacagaagttttcttcttcaggaatatacttaacaatgaagcatgtataattttatatacatcttacaataaaattattttgtgcatatcactgta

SEQ ID NO: 272537 - DNA, 821 bp, Homo sapiens
tactataatgcacttgaaattgtgtatgtgaccttatcaggcatttaaggaccataatctctccttgacctaagaaatcagcttgaagtaattcacttagatttcaaattttaatgtggatacccaaggctgcaaatctgttattcagtacctgctacacttttggggttgcctcttttatgcactgttagaattgctagaaatttagaagtccaattggaaagaagcatatcttgttagaaagtattcccagaaaatgaggaaggctacattttaactgtgtcttgattttacagggagaaaaataaagttaatattttgaggaaaaaataaggcttttaagatgacatgctatatagtagacaaatagtttaactcggtgcctacttcatgtacactggatgtgttaacatgaatttatgaccctcagtgactttttattaccaaaacagcttccttaaagcaaacacacacacatgcctctacagtattggaaaattccgtctccttagataaaacaattaggatttttcttgggccaactagaataattagggctgcagagttggagcctttatataaggagtttgcagctcatatccgaagagagaaatgtatttcgaaagtcaaaagtgtagttaagtgagaaagcagagtagtttcagcttttgcatttggagtgggtataatttactgtgttgtcataagatactggaaagatctttggaagaataggttcttaaagtgttttctcatgtgcccttactgacatttcccattgggccttcaagacaactccagtaaatacttaaattgatttt

SEQ ID NO: 272538 - DNA, 182 bp, Homo sapiens
cccggggccacagcaccttccggtttcaccactcaccaatgcatcgtttattaaagtttctttcaaaaagaatttttaagcctatgttgttgtacagctgtttctcgcttgcttttcttgccattgcacctgatctgctgctgacgtgcgggagggtcattaaaagattgacttaaatttga

SEQ ID NO: 272539 - DNA, 408 bp, Homo sapiens
gtctcaaaaaaaaaaaaaagaagagagaaaagaaattggacccttatctaacgccatccacagagtaaactccaaatgtggtctaagtggtggtgcctataatctcagcttcttagaaggctatggcaggctgggcacggtggctcacgcctgtaatcccagcacttttggaggccgaggtgggcagatcacctgaggcgggagtttgagaccagcctgaccaacatggagaaaccccgtctctactaaaaaatacaaaattagctgggtgtggtggcgcatgctgtagtcccagctgctcgggaggctgaggcaggagaatcacttgtacccgggaggcagaggtagcggtgaccgagatcgcgccattgcactccagcctgggcgacaagaacgaaactctgtctc

SEQ ID NO: 272540 - DNA, 493 bp, Homo sapiens
ctatgtacccacaaaaattaaagataaaaagaaatagtagatataatttctgcttttgaataggttattatttaaaaagaaaatagtggtcaaggcaagaaatatgtctttgcctatttgatatgctagaatggacagaaataatggcaaagtttcattcttgtgtatgtgtgagaatgtgtttgtgtatgtaacatatggaatttctggcatatatatggatatatatgaaattcctactaattttagaggtatagatctaaacttgttctggagttgagaattatgtcatccctcagagactatatttcacagaaatactgcttctggtcagaagtactgtggatcttaatattaaatcagattcttggccaggcacggtggcttttgcctgtaatcccagcactttgggaggccaaagtgggagaatcacttgagcccaggaattcaagaccagcctttgctacttagtaagacttcatctctgcaaaaa

SEQ ID NO: 272541 - DNA, 376 bp, Homo sapiens
cgcctactactactaaattcgcgggcgcttcgacgtttcattcttgtgtatgtgtgagaatgtgtttgtgtatgtaacatatggaatttctggcatatatatggatatatatgaaattcctactaattttagaggtatagatctaaacttgttctggagttgagaattatgtcatccctcagagactatatttcacagaaatactgcttctggtcagaagtactgtggatcttaatattaaatcagattcttggccaggcacggtggcttttgcctgtaatcccagcactttgggaggccaaagtgggagaatcacttgagcccaggaattcaagaccagcctttgctacttagtaagacttcatctctgcaaaaa

SEQ ID NO: 272542 - DNA, 583 bp, Homo sapiens
attaatcatctaaaatccaagcacagagaattcaattttagatggtctccagagcagaatttgatgtataatcttaattacaaatcatagataattaatattgtttacaaaatcagaatacgattagaggtagggatcctgcacacaccctattttcctccccagtgttctgaccgagagactaattaataattcaaggaacttacagtgaatgagaacccatggttttgcttaattatcagaacagctagatctgagaacagctgtctcccacatggatagacacttattccacccatttgcaggtagaatagctggcaataataagtccttcccattggatatgttgaaaggtgcctgccatggcatagttgccacaagagaggaagaaatggacacaaatgtaggctgttttcagggcagagggaaggtgggaggaaaccagcttgctggttttcacacaccctctggggaacacccatgcacctatgagatgggtttgtgttagcatcacctctgaaagattacccacccaggcaaagaaagtgacccatatgttttcactttcttggagtggagggca

SEQ ID NO: 272543 - DNA, 443 bp, Homo sapiens
aggccttgtccgttttgggattctgtatagcaaatattaataccttacttctatttggtctctgcagaactcaggtagtgcctctgttctcttaagtcaattatcactcctccatctcttcaattttataaaaattttataaattctcttgaatgttttagtttcccattcttttctctatcttagctcttttgtatttttacctttttatactcctttactgtgaatttaatgtggttaggggaagaagatgttgaaatagaatcatggagtcaatctgccatttttcagaaatactattttagtggcatgtgcttgtagtcccagctactcagggggctgagataggaggatcatgtgagaccaggaattcaagcctgccgtgggctattattgcaccactccattccagcctaggggacagagcatgacttggctcaaga

SEQ ID NO: 272544 - DNA, 459 bp, Homo sapiens
aatcttagacaatcccccaacaccactccccagtttatgtatacatactttcaacaacagccagtagtagtgaaaaccttgagatgcacccatagtaacctcctgcactggtgtagatgcccctgtgacaggttgtttctcctccagaccatgcccaccaaagtcaaagccacatgggagcctctgagctcagagccactgtatggggtctccatgcacaagggcagcagctccctgtcctttctgttggtgaggtggggaattcagttcttttgaataaggctgagtttattcaatactgattctgctggctgaccagtgataccttaagactttatttcttgcattgtaatatttatcctggttttgatatgatttgttgtgcaaatgtgtttaactcttgggtatattttttttctttttttgttgtcataaacatcatctaaaaccaaattttta

SEQ ID NO: 272545 - DNA, 233 bp, Homo sapiens
aaaattaaagtcattaggttgcttttccatcacctccctccatccacactcattctcttctcttccagccccaaagatgatgtttccttcctcttgttcaaaaccaacttatcatgtgagctctcagttcatttcccacctctttcagaagcttattccatcaggaacttcttacatatatttttaacctttctctcttaactacctcctcagattacaatctctactcctta

SEQ ID NO: 272546 - DNA, 250 bp, Homo sapiens
aagagggaggaggacatagcctaggttgtacccaacactttctctttatctcaagatgccccattgtagttactaggatgccccattctagaactacaatgggataaagagaaagtcactgttaagtggcaggggaaagagctggggcagccaaggtcatctggggatttgtcctcctacaactaaccttcccagttcaatcccttctttattttgaatattgctaataaggaataaggacaatatacag

SEQ ID NO: 272547 - DNA, 564 bp, Homo sapiens
cggcccgcctcgtcgagggttccgctgagctgctcacaagggcgtgcggaggcccgcggccggccctggcccctgtggtggcagcagctggctggcttcccgggcggctacctccagctgcagctgtcggtgctatttgcagctctccacatcctgagagctggacgccgaggaccgctccctggagggcgtgcgtaaaatgcagcagcggagcggtgaggagattaccggaaaaactgggagcggagtcaggctcgttctggagcagggagaggcttgggaagttgcgaaacgttgacctgcagggtcttgaggaactgtcggcctgggctgtccccgtgggtcattgaacattaatcagccaccagtcctcgaccaagccaaccgaaatagagtcagcaggcagaatgacgaatacagtttgaaagggaacgaacttactcttattctctccttggaaaggcctttccagactctcgaactcacccctgtcacattaccctgttgtgttatctttgtgggcctgcgcagcacctgaaatgatctgtcttaggtatgtgtgtg

SEQ ID NO: 272548 - DNA, 517 bp, Homo sapiens
cgactcagcaaggtggagacgctgcgcgccgccatccgctacataaagtacctgcaagagctgctgagctcggcccccgacggctcgacgccccccgcttcccgcggcctcccgggcaccgggccctgccccgcgccgcccgccaccccccgtcccgaccgccctggcgacggcgaggcccgggcgccctcctccctggtgccggagtcatccgagtcctcctgcttctccccgtcgcctttcttggagtcggaggaatcctggcattgatcgggcctgtggccgcccccggcttggaggatgatccgccggccccgtcccactttcgggagcagcgggaggctgttgggtcacccgcgatgcgccgcaggacggtgactgtaggaggtccgcggcgctcccgtgtctgcgacaccctccctcctccaccagcttggggcggaagtgcagggcagcgggtacgatgggcacgatagagacctaggagctccgtgggtgaagcgaggggcagggcctg

SEQ ID NO: 272549 - DNA, 562 bp, Homo sapiens
gtcctccgatgaattttgatgcagaaatctttgtaagatggtctgtattcattttgagtatcagagaactacaagccgaaggcaaagtggcaatgccagcccctgtgtgtttatctaagtgccaccacttggccaaggcactccataaggtcacagcgacaggctttgtggggagacccccagcggtgcagcagaggccagtgtgagccccaatcgcttgctctgctgtgagtcttgtcatggaaagctgggggtgtggagagcacaggttgtgtcaggtgggattgcaggaagatttcagggagcgcactgtcaggtgtgcagttgcaccccacgccccccagccccgggtctcaggcagcagggagaggactcgcaggctctcccactgtccagaatgccctctgcttggcaaaacaacttctgctaataagagcttgcattatgtatttttttttctgatgacaggattttggaatctgtaaattgaattttatcttcatcatattgaattatttcttttcttataaggccgaggacttcttacaattaagatacaaaa

SEQ ID NO: 272550 - DNA, 273 bp, Homo sapiens
gtgggagctgggagaggtgggaaatggccagaagcaacatccaggagcaccaggcatcccttgcttaccgtcctcacccttgcgcagcaggcagtatcagccctgcctgaaacttgctctgcagattgtgggaagagagcggatccatgttctagacccaacaaacgaacacgtgcagttcccaagccttcctcactccctgtttatgggagactccttgtttctcacatttcttttagtcttagagacaatttggtcaggagacatgggttt

SEQ ID NO: 272551 - DNA, 455 bp, Homo sapiens
gtcatgagtctttcagtcgtaatcagtgagagaggggctgaagtagactaatgacgccaaaccaggacttttctacctatctttggagaatccatgttaaaacaaacaaacaaacaaacaaacaaaaaaaacctactttggtaggtagtcttttctcacctgcctttcagccttgaggctggtttagtttcacaactatatagttgtgctgctcctaaatcttgtcacaggttttacctcgtgttacagttcttttagcacttatcttcagttccttagtagattataaactcaatgagattgaaactatggatgttatatgtctctcccctaacattgtattacatacttagtagctattacctaactgaattgattaattacctaactgaattgaggttcagtaaagccatttttaaattaaatattttaattcaccctgattaaatgtaaaa

SEQ ID NO: 272552 - DNA, 386 bp, Homo sapiens
ggcttacccagctgtaaagtggggttgcccttttggtgaagaatgtgaattctgtcaggttgggccagataacatagctgtcaggtggcgctcactattccaaactctcccagttcccctcatttttcactgattttcacacattaatccagactggatgttttctcagtgactgaggtgtttggtgtggcagctgactggttctgtcaatggggaagttaccgaggtctgaggtgggtcaccctggggcggtggttgccaacataggggagggttgcagtggcctttggaggcctggacctgggtggagggctcactttaggctagaggccttaatctggtgtttcttttgacatactcaggtaggagtgacatttgaaaagaac

SEQ ID NO: 272553 - DNA, 507 bp, Homo sapiens
cagttatgaataaagctggtgtaaacacgtatgcagcttttgtgtggacatacattttttaatcagttggaaaaatacctaggaatgtgattgctggtttgtgtgctatgaatatgtttagttttatgcctgctaaactgtcttctaaagtggttgtaccattttgcattcctagcagcaatgaatgtgtgttcctcttgttccacacccttgccagcaattgttattgtccattttttgggattttagctattttaataggtgtgcatagtatcttgttgctaaaatttgcactttcttttttttttttttctttttttttgagacagagtctcactcttgttgcctaggctggagtgcaatagcacgatttcggctcactgcaacctctgcctcccaggagaatggcgtgaacccgggaggcggagcttgcagtgagccgagatcccgccactgcactccagcctgggcgacagagcgagactccgtctcaaaaaaaaaaaaaaa

SEQ ID NO: 272554 - DNA, 407 bp, Homo sapiens
acaatggttatagtctcattacaaaaaaaaggattattgtgcatcttatatcatatggatccagtcgtttccatttaatctctttatttttatagcagcatagccctataatactgctaattaaggtaccaagttagagtgaacattgttttcatcctgtgaaatgtctatgtttcaaaatatttcatgtatgtgaggatgggggagtaaaatctcagccagatttttgagcccctaagtctcttctcaataacattttagaattttaggcatttttagaagatatagtctcttttttagtgtaagttttatttaagtccacattaaaaatacattggcatggtctaaactttaaacaattcaacaagctgacagccaaatcatgaattaactcccattcacaattg

SEQ ID NO: 272555 - DNA, 411 bp, Homo sapiens
  misc_feature (387)..(387): n is a, c, g, or t
  misc_feature (411)..(411): n is a, c, g, or t
acagtcacaaggcaccatcttggaaagagggaatgggaccctcaccagatacaaatgccagtgccctgatcttggacttcccagcctccagaactgtctccctattccttgggacacaactgtattgaaattagaccaactaatacttctacaaagacttctgagtgttgaagtgaaaggaagagttgcacgtctcttattttaaatcaaaagctagacatgatgaagcttagtgagaaaggtctgtagaaagataagatgggccaaaagctaggcctcttgcatcagctaactgtggtgtgaatgcaaaggaaaagcttttgaggaaaatgaaaattctactccagtgaacacacaaatgaccagaaagcataacagccttattgnctgaaaagaagaaagtttgagtgn

SEQ ID NO: 272556 - DNA, 473 bp, Homo sapiens
gctgtcctgtgcatggtaagacttctagcagcatccccgaactccacccactgtatgccagcagcactccccatcccccaagtcatgacagtctgtcttcagacagtgccaaatttccccagggggcaaaatctccagttgggaaccatcactttagagaaatgcaaagaggcaagagattgttcttcttttttcttttttaataataagccttgtagaacaatttgcctctttcatctatgtgcatgtcacacttttataaaaataagaacgaaagagagagagagagaagctcatgaatcattgataatgaattcatctgtaggaaaagccttgttaaaaaacaacaggccaggcacagtgactcatgcctataatcctatcagtttgggagactgaggcgggacgaccacttgagcccaggagttctagtccagccttggcaacatagtaagatcctctctctatcaaaa

SEQ ID NO: 272557 - DNA, 497 bp, Homo sapiens
tttctacccctatgtaaaaccaggggcttgaactatgacaagccctctcacctaaccttggtgtgaatggatgggctttgaggagtccttgaatccctgaaactgtgcaaaagtctgcgtgcatttgtgtgcacactcaggctcacatttctgcaaggagaggagctggtgtccttgtccagttctcaaaggaatctgcaaacaacaaaaggtacagattttgtgaactaggtcagaggttggcaaatggttttttgtaaagagcccaaatggtcaatatttccagctttacgggccacacagtctctgttgcaactacttgactctgctggggtagtgagaaagcagtcccaaacagtgcatgaacagaggggtgtgggttccagtaaaactttgtttagggacactgaaatgtgaattttctgtcattttcatgtgtcaagaaatgttgttcttcctttagaaatgatccattttcgatgatttaaaaatgtaaa

SEQ ID NO: 272558 - DNA, 338 bp, Homo sapiens
atttcttcatttgaactacttgtttttgtgtctttctaaaaagtagactccccacagtgagatttgaattgcatgagaaaatgtgttctctttaattaactatgggctactcatgtaaattgtgatattttattatgaatgcacatattgagagatcccagtgaaacctctggagaaagaagtagctgttttctgtgggtgctttctagtgttttcacacaagctgaaaaggaaaccttaaaacttgtaactattttggagtgcattttgttgaatagcatataacttgatcaagagcttttaatgaaactaataaaataattgtgtttccaaaaacc

SEQ ID NO: 272559 - DNA, 213 bp, Homo sapiens
ggccccagtcaaaactatgggcctggcacaaaggtgcacttcaggcacacatttcaaatctgtcagtgctgggaggaagcagatgtaaacaaaataagacccaccaactggaaaagagagcatgccctgactagaggcaatgacatcttaatcctccagaaggcaccacaaatcccacagacataaccaaggatgtttccccctcaaaacccc

SEQ ID NO: 272560 - DNA, 236 bp, Homo sapiens
gtatggaggtgctcatggtggtggaggtgctcgtggtggtggaggtgcccgtggtggtggaggtgctcgtggtggtggaggtgcccgtggtggtggaggtgctcgtggtggtggaggtgctcgtggtggaggtgctcttagtatggaggtgctcatggtggtggaggtgctcgtggtggtggaggtgcccgtggtggtggaggtgctcgtagtatggaggtgcccgtggtggtgga

SEQ ID NO: 272561 - DNA, 429 bp, Homo sapiens
cagacatgtctttataaacttggctatccattttccagtctgtaggaaaagagaagctgtaagttggagaaaaggctagtggttgggtggtgagtcataagcaataagatttgatgtcagtgatgacaggcctgtcctcttatgatagattccttgagccccctgctgaccacaaagctttggctggctagaccacaagtctgtctccctcaatgacaatttttgtagctcaatatggatcctattttgtgtgagttgcatttggagatttgttgtttatctgctgtatttgccttaggtgggacagtgaaatcaacctaatgtagtggaaggaagtaggtattacatccttaattccttgatatacatccttttattatgtggtactcccgggatgtggtttttcagatttggagaagaatagttaaa

SEQ ID NO: 272562 - DNA, 291 bp, Homo sapiens
cactggcctgagggctgggaaactgggtccctccgttttcccatcattgaagggaagggtgggactagatctggggacacgcaggcagagcacacagaatgaggtgggccaggtaggtaatgtcacggccccgagggcctgcactttgcgccagccagttgttgcctggcttgagtttgggccgatgctaccatgttatctgattttgcaagagaaactggaaacctggatttttaaaatgtgaaatctcctgttttttcaaatgttggcaactaattaaacatttttaaa

SEQ ID NO: 272563 - DNA, 3109 bp, Homo sapiens
tcccacccccaggctccgcgttcccgccggccccagctccagccccgcagcccaccgtgcaaacatgcttagacagagaagagattaacttcagtggcttcccactaattacagagattaagaagtggctgcctgaactattttccaaaggatacacattacaaattattgaatagggcagctaaccaagaagatcctattggtttggggggaacacaacttccagcagccacaagggatgctgctactcaggtgccaactgaaacaagctcctccacagaaggtttcgtttaggttttgtgtcgtgatggggaaacagcaaagcaaactcaaacacagcacttataaatacgggcctgatgaaattatagaagagagaattcaaactaaagcttttcaagagtatagcccagctcacatggataccgtctctgtcgtggctgctttgaactcagacctttgtgtctctggagggaaagataagacagttgtggcctataattggaaaactggaaatgtggtgaaaaggttcaaaggacatgaacatgagatcaccaaggtagcctgtattcccaaatccagccagttcttcagtgcctctcgtgacaggatggtcatgatgtgggacttgcacggttcctcacaaccaaggcagcaattgtgtggccatgccatggtggtcaccggattggctgtgagtccagactcatcacagctgtgcactggctctcgggacaacaccctgcttctgtgggatgtggtgacaggacagagtgtggaaagagcatctgtctccaggaacgtggtcactcacctgtgctgggtccccagagaaccatacatactacagacctctgaagataaaaccctcagattatgggacagtcgggggctgcaggtagctcatatgtttcctgcaaagcagcacattcagacctactgtgaagtcagtgtggatggacacaagtgtatctcctgcagcaatggctttggaggagaaggctgtgaagccacgttgtgggacctaagacagactcgaaacagaatatgtgagtataaggggcatttccagactgtcgcatcctgcgtctttctaccaagagcattggccttgatgcctttaattgctacctcatcacatgattgcaaggtgaagatttggaaccaagatactggagcctgccttttcaccttgtctctggatggatcaggacccttgacttctctggctgttggtgacgccatctccttattgtgtgcaagttttaacagaggaattcacttactcagaatggaccacagccaagggctggaactgcaggaagtggcagcattctgaggccaagagacactcactggacaatatcaaaccatggctcctcctcagcatggctttgtgtctttcccagttatcttgaggggagtgggatgtagggctggtattctttgcttaggttcatttacaagatgtatcagtgttgtaagtccaataatttaagtccagtgattcaaaatcaggtatagagtccagaaacatggactacacataaggttctctatttaagttaaatacaaatgcaactttttagtgagcttttaggactactcttcaaaaaaagtgtattgctcagaatgatgacctgtaaatgtaagagtggcaggcctctgtctgtgaaagtcagaacacagggctcgagcctctggaactgaccctttgcaagtctttacaaaagaaaaaaggcagtggggagagagagtgttttggttacatcagaaataattgagatgggaaagaatagtgcagctccatagaggagacggactgtagacaatgagattaagcttcaatcactgctcctcagcaatgtgaagaatcaaagtcagggcaagaaagcgaaagcttggacttctattcaaagtggcagcagagtgggagggcggtacccttctagcccagtgctgctgagcttgtgtgaaaatcagacctgagatggcttgaagcagccaagaaccacatgggcattgcccagaattacaggagttagcacaccagctctacagataagaaaacattgaaattcaaagattaaggccaaaaatatctcacttgcaattttaatattttcatttggatttatataaatgaaacatatatatgttttggaatggccagagtgaggcaaaggggatccctgaaatctgaggcgggagaatcgcttgaacccaggaggcggaggttgcggtgagccgagattgtgccattgcactccagcctgggcaacaagagcgaaactccatctcaataaataaataaataagtaaatgccaggaaaggtggtgacaaatggtagccataattatttattgtcctctctgtccagactaaatgttcccttttccatattaaacatttaccattctgcgtgagccactgcgcccggcctccttcatccattcttagatcttatcctctaaacctttagtcatcgtttcactctcctttgattccttgttatgggtctttcaactctggaaagacaaagagatagtgggagaggaagcccggtcactgagcatctacagagggctaaatatatttattctcatttgttattcccaatattctctgtattgtgatttccatttcacagatgaggaagctgagggctagaaacatgcagtactttgcccaaagtcacacacatattaagaagagctgaggtatgaatctgggtctgcctgactcaaagcccaaacgctttcctttgcatcgtgtcacaaagtcatagaccatgacattgtttgtatcttcaagaccagttattaactttctggctccaaggagatcccctgcccaagtgcctaggggcagtagacagctgtctcagggacagtcgtagcatgtgctggattattagtgcagcagctgacactttttcccagaagggagagaggcagcaagtcagaaagttcacgggaatgagttgggagggggtcccagggaagggggacaggctgccaggagaaggaaagtacacgggagaaaatagtggggctctgatgagttagtagggttctgttaccaataaaattgtttccataaactgta

SEQ ID NO: 272564 - DNA, 2879 bp, Homo sapiens
tcccacccccaggctccgcgttcccgccggccccagctccagccccgcagcccaccgtgcaaacatgcttagacagagaagagattaacttcagtggcttcccactaattacagagattaagaagtggctgcctgaactattttccaaaggatacacattacaaattattgaatagggcagctaaccaagaagatcctattggtttggggggaacacaacttccagcagccacaagggatgctgctactcaggtgccaactgaaacaagctcctccacagaaggtttcgtttaggttttgtgtcgtgatggggaaacagcaaagcaaactcaaacacagcacttataaatacgggcctgatgaaattatagaagagagaattcaaactaaagcttttcaagagtatagcccagctcacatggataccgtctctgtcgtggctgctttgaactcagacctttgtgtctctggagggaaagataaggtagcctgtattcccaaatccagccagttcttcagtgcctctcgtgacaggatggtcatgatgtgggacttgcacggttcctcacaaccaaggcagcaattgtgtggccatgccatggtggtcaccggattggctgtgagtccagactcatcacagctgtgcactggctctcgggacaacaccctgcttctgtgggatgtggtgacaggacagagtgtggaaagagcatctgtctccaggaacgtggtcactcacctgtgctgggtccccagagaaccatacatactacagacctctgaagataaaaccctcagattatgggacagtcgggggctgcaggtagctcatatgtttcctgcaaagcagcacattcagacctactgtgaagtcagtgtggatggacacaagtgtatctcctgcagcaatggctttggaggagaaggctgtgaagccacgttgtgggacctaagacagactcgaaacagaatatgtgagtataaggggcatttccagactgtcgcatcctgcgtctttctaccaagagcattggccttgatgcctttaattgctacctcatcacatgattgcaaggtgaagatttggaaccaagatactggagcctgccttttcaccttgtctctggatggatcaggacccttgacttctctggctgttggtgacgccatctccttattgtgtgcaagttttaacagaggaattcacttactcagaatggaccacagccaagggctggaactgcaggaagtggcagcattctgaggccaagagacactcactggacaatatcaaaccatggctcctcctcagcatggctttgtgtctttcccagttatcttgaggggagtgggatgtagggctggtattctttgcttaggttcatttacaagatgtatcagtgttgtaagtccaataatttaagtccagtgattcaaaatcaggtatagagtccagaaacatggactacacataaggttctctatttaagttaaatacaaatgcaactttttagtgagcttttaggactactcttcaaaaaaagtgtattgctcagaatgatgacctgtaaatgtaagagtggcaggcctctgtctgtgaaagtcagaacacagggctcgagcctctggaactgaccctttgcaagtctttacaaaagaaaaaaggcagtggggagagagagtgttttggttacatcagaaataattgagatgggaaagaatagtgcagctccatagaggagacggactgtagacaatgagattaagcttcaatcactgctcctcagcaatgtgaagaatcaaagtcagggcaagaaagcgaaagcttggacttctattcaaagtggcagcagagtgggagggcggtacccttctagcccagtgctgctgagcttgtgtgaaaatcagacctgagatggcttgaagcagccaagaaccacatgggcattgcccagaattacaggagttagcacaccagctctacagataagaaaacattgaaattcaaagattaaggccaaaaatatctcacttgcaattttaatattttcatttggatttatataaatgaaacatatatatgttttggaatggccagagtgaggcaaaggggatccctgaaatcgtgttagccaggatggtctcaatctcctgacctcgtgatccgcccgcctaagtgctgggattacaggcgtgagccactgcgcccggcctccttcatccattcttagatcttatcctctaaacctttagtcatcgtttcactctcctttgattccttgttatgggtctttcaactctggaaagacaaagagatagtgggagaggaagcccggtcactgagcatctacagagggctaaatatatttattctcatttgttattcccaatattctctgtattgtgatttccatttcacagatgaggaagctgagggctagaaacatgcagtactttgcccaaagtcacacacatattaagaagagctgaggtatgaatctgggtctgcctgactcaaagcccaaacgctttcctttgcatcgtgtcacaaagtcatagaccatgacattgtttgtatcttcaagaccagttattaactttctggctccaaggagatcccctgcccaagtgcctaggggcagtagacagctgtctcagggacagtcgtagcatgtgctggattattagtgcagcagctgacactttttcccagaagggagagaggcagcaagtcagaaagttcacgggaatgagttgggagggggtcccagggaagggggacaggctgccaggagaaggaaagtacacgggagaaaatagtggggctctgatgagttagtagggttctgttaccaataaaattgtttccataaactgta

SEQ ID NO: 272565 - DNA, 2919 bp, Homo sapiens
tcccacccccaggctccgcgttcccgccggccccagctccagccccgcagcccaccgtgcaaacatgcttagacagagaagagattaacttcagtggcttcccactaattacagagattaagaagtggctgcctgaactattttccaaaggatacacattacaaattattgaatagggcagctaaccaagaagatcctattggtttggggggaacacaacttccagcagccacaagggatgctgctactcaggtgccaactgaaacaagctcctccacagaaggtttcgtttaggttttgtgtcgtgatggggaaacagcaaagcaaactcaaacacagcacttataaatacgggcctgatgaaattatagaagagagaattcaaactaaagcttttcaagagtatagcccagctcacatggataccgtctctgtcgtggctgctttgaactcagacctttgtgtctctggagggaaagataagacagttgtggcctataattggaaaactggaaatgtggtgaaaaggttcaaaggacatgaacatgagatcaccaaggtagcctgtattcccaaatccagccagttcttcagtgcctctcgtgacaggatggtcatgatgtgggacttgcacggttcctcacaaccaaggcagcaattgtgtggccatgccatggtggtcaccggattggctgtgagtccagactcatcacagctgtgcactggctctcgggacaacaccctgcttctgtgggatgtggtgacaggacagagtgtggaaagagcatctgtctccaggaacgtggtcactcacctgtgctgggtccccagagaaccatacatactacagacctctgaagataaaaccctcagattatgggacagtcgggggctgcaggtagctcatatgtttcctgcaaagcagcacattcagacctactgtgaagtcagtgtggatggacacaagtgtatctcctgcagcaatggctttggaggagaaggctgtgaagccacgttgtgggacctaagacagactcgaaacagaatatgtgagtataaggggcatttccagactgtcgcatcctgcgtctttctaccaagagcattggccttgatgcctttaattgctacctcatcacatgattgcaaggtgaagatttggaaccaagatactggagcctgccttttcaccttgtctctggatggatcaggacccttgacttctctggctgttggtgacgccatctccttattgtgtgcaagttttaacagaggaattcacttactcagaatggaccacagccaagggctggaactgcaggaagtggcagcattctgaggccaagagacactcactggacaatatcaaaccatggctcctcctcagcatggctttgtgtctttcccagttatcttgaggggagtgggatgtagggctggtattctttgcttaggttcatttacaagatgtatcagtgttgtaagtccaataatttaagtccagtgattcaaaatcaggtatagagtccagaaacatggactacacataaggttctctatttaagttaaatacaaatgcaactttttagtgagcttttaggactactcttcaaaaaaagtgtattgctcagaatgatgacctgtaaatgtaagagtggcaggcctctgtctgtgaaagtcagaacacagggctcgagcctctggaactgaccctttgcaagtctttacaaaagaaaaaaggcagtggggagagagagtgttttggttacatcagaaataattgagatgggaaagaatagtgcagctccatagaggagacggactgtagacaatgagattaagcttcaatcactgctcctcagcaatgtgaagaatcaaagtcagggcaagaaagcgaaagcttggacttctattcaaagtggcagcagagtgggagggcggtacccttctagcccagtgctgctgagcttgtgtgaaaatcagacctgagatggcttgaagcagccaagaaccacatgggcattgcccagaattacaggagttagcacaccagctctacagataagaaaacattgaaattcaaagattaaggccaaaaatatctcacttgcaattttaatattttcatttggatttatataaatgaaacatatatatgttttggaatggccagagtgaggcaaaggggatccctgaaataacattagaacatacaggaaaaacgaggcaggcagatcactttaggtcaggagttcaagaccagcctgtacgtgcgtgcctgtagtcccagctactcgggaggctgagatgggagaatcacttgaacctgggaggcagagtttgcagtgagctgagattgtgccactgcactccagtctgtgtgacagaatgagaccttgtcttgaaaaaaaaaaaaacaaaaaaccacatacaggaaaaaagagagggatggagtcaactgtgccccagacattaagcccccttcagtgaggaggggcaaggtgctcaggcctgcctgtgtggcccccaggagtcagacctcagcctcatgctcacaggtccattttcctccagggaaaatggagttctttctgccttcagagatgcccacacataaggcacatgaggctgttggtgacaccatcaccaacactggagattccctttctgacaagtcccagccaaagaaagattttgcatttgtcttctctgtcctctgcttgtctctgataccagtggctgacagccaccttccttcttccctctcttggtgtgatcatggctaactgcagcctcaatcaccagctactcaggaggctgaggcaggagaatcgcttcaaccggggaggcagaggttgcagtgagctgagattgtgccattgcactccagcctaggcaacagagagagactctatctca

SEQ ID NO: 272566 - DNA, 3079 bp, Homo sapiens
tcccacccccaggctccgcgttcccgccggccccagctccagccccgcagcccaccgtgcaaacatgcttagacagagaagagattaacttcagtggcttcccactaattacagagattaagaagtggctgcctgaactattttccaaaggatacacattacaaattattgaatagggcagctaaccaagaagatcctattggtttggggggaacacaacttccagcagccacaagggatgctgctactcaggtgccaactgaaacaagctcctccacagaaggtttcgtttaggttttgtgtcgtgatggggaaacagcaaagcaaactcaaacacagcacttataaatacgggcctgatgaaattatagaagagagaattcaaactaaagcttttcaagagtatagcccagctcacatggataccgtctctgtcgtggctgctttgaactcagacctttgtgtctctggagggaaagataagacagttgtggcctataattggaaaactggaaatgtggtgaaaaggttcaaaggacatgaacatgagatcaccaaggtagcctgtattcccaaatccagccagttcttcagtgcctctcgtgacaggatggtcatgatgtgggacttgcacggttcctcacaaccaaggcagcaattgtgtggccatgccatggtggtcaccggattggctgtgagtccagactcatcacagctgtgcactggctctcgggacaacaccctgcttctgtgggatgtggtgacaggacagagtgtggaaagagcatctgtctccaggaacgtggtcactcacctgtgctgggtccccagagaaccatacatactacagacctctgaagataaaaccctcagattatgggacagtcgggggctgcaggtagctcatatgtttcctgcaaagcagcacattcagacctactgtgaagtcagtgtggatggacacaagtgtatctcctgcagcaatggctttggaggagaaggctgtgaagccacgttgtgggacctaagacagactcgaaacagaatatgtgagtataaggggcatttccagactgtcgcatcctgcgtctttctaccaagagcattggccttgatgcctttaattgctacctcatcacatgattgcaaggtgaagatttggaaccaagatactggagcctgccttttcaccttgtctctggatggatcaggacccttgacttctctggctgttggtgacgccatctccttattgtgtgcaagttttaacagaggaattcacttactcagaatggaccacagccaagggctggaactgcaggaagtggcagcattctgaggccaagagacactcactggacaatatcaaaccatggctcctcctcagcatggctttgtgtctttcccagttatcttgaggggagtgggatgtagggctggtattctttgcttaggttcatttacaagatgtatcagtgttgtaagtccaataatttaagtccagtgattcaaaatcaggtatagagtccagaaacatggactacacataaggttctctatttaagttaaatacaaatgcaactttttagtgagcttttaggactactcttcaaaaaaagtgtattgctcagaatgatgacctgtaaatgtaagagtggcaggcctctgtctgtgaaagtcagaacacagggctcgagcctctggaactgaccctttgcaagtctttacaaaagaaaaaaggcagtggggagagagagtgttttggttacatcagaaataattgagatgggaaagaatagtgcagctccatagaggagacggactgtagacaatgagattaagcttcaatcactgctcctcagcaatgtgaagaatcaaagtcagggcaagaaagcgaaagcttggacttctattcaaagtggcagcagagtgggagggcggtacccttctagcccagtgctgctgagcttgtgtgaaaatcagacctgagatggcttgaagcagccaagaaccacatgggcattgcccagaattacaggagttagcacaccagctctacagataagaaaacattgaaattcaaagattaaggccaaaaatatctcacttgcaattttaatattttcatttggatttatataaatgaaacatatatatgttttggaatggccagagtgaggcaaaggggatccctgaaatcgtgttagccaggatggtctcaatctcctgacctcgtgatccgcccgcctaagtgctgggattacaggcgtgagccactgcgcccggcctccttcatccattcttagatcttatcctctaaacctttagtcatcgtttcactctcctttgattccttgttatgggtctttcaactctggaaagacaaagagatagtgggagaggaagcccggtcactgagcatctacagagggctaaatatatttattctcatttgttattcccaatattctctgtattgtgatttccatttcacagatgaggaagctgagggctagaaacatgcagtactttgcccaaagtcacacacatattaagaagagctgaggtatgaatctgggtctgcctgactcaaagcccaaacgctttcctttgcatcgtgtcacaaagtcatagaccatgacattgtttgtatcttcaagaccagttattaactttctggctccaaggagatcccctgcccaagtgcctaggggcagtagacagctgtctcagggacagtcgtagcatgtgctggattattagtgcagcagctgacactttttcccagaagggagagaggcagcaagtcagaaagttcacgggaatgagttgggagggggtcccagggaagggggacaggctgccaggagaaggaaagtacacgggagaaaatagtggggctctgatgagttagtagggttctgttaccaataaaattgtttccataaactgtacatgtgcttgatgtcaaattatctatgcattttaagtagaaaatagattagtaaattctagtgtttgtagaggactttttttagtctgatatgccctaatcagatactctcagcacctaagatac

SEQ ID NO: 272567 - DNA, 545 bp, Homo sapiens
ttcccgccggccccagctccagccccgcagcccaccggtgggtactgagcctgaggtgggagaaaggggcatagcggcagactaggagcgggcaaccctcgccctttggtcgaagcggagagcggttatgagggccaaccttgggctgggtggcgctaggttcccatcttcggggactcttctccccgctttccacatacacataaaaaataagctttaggccgggcgcggtggctcacgcctggaatcctagcactgtgggaggccgaggcgggtggattgcctgagctcaggagttcgagaccatcctgggcaacacagtgaaaccctgtctctactaaaatacaaaaaattagccgggagtggtgccgtgcgcctgtagctacttgggaagctgaagcaggagaactgctagaacccgggaggcggaggttgcagtgagccgagatcgcgccactgcactccagcctgggtgacagagcgagactcgagactccgtctcttgaaaacaaaaacaaaaacaaattaagctttagttgttcata

SEQ ID NO: 272568 - DNA, 2954 bp, Homo sapiens
tcccacccccaggctccgcgttcccgccggccccagctccagccccgcagcccaccgtgcaaacatgcttagacagagaagagattaacttcagtggcttcccactaattacagagattaagaagtggctgcctgaactattttccaaaggatacacattacaaattattgaatagggcagctaaccaagaagatcctattggtttggggggaacacaacttccagcagccacaagggatgctgctactcaggtgccaactgaaacaagctcctccacagaaggtttcgtttaggttttgtgtcgtgatggggaaacagcaaagcaaactcaaacacagcacttataaatacgggcctgatgaaattatagaagagagaattcaaactaaagcttttcaagagtatagcccagctcacatggataccgtctctgtcgtggctgctttgaactcagacctttgtgtctctggagggaaagataagacagttgtggcctataattggaaaactggaaatgtggtgaaaaggttcaaaggacatgaacatgagatcaccaaggtagcctgtattcccaaatccagccagttcttcagtgcctctcgtgacaggatggtcatgatgtgggacttgcacggttcctcacaaccaaggcagcaattgtgtggccatgccatggtggtcaccggattggctgtgagtccagactcatcacagctgtgcactggctctcgggacaacaccctgcttctgtgggatgtggtgacaggacagagtgtggaaagagcatctgtctccaggaacgtggtcactcacctgtgctgggtccccagagaaccatacatactacagacctctgaagataaaaccctcagattatgggacagtcgggggctgcaggtagctcatatgtttcctgcaaagcagcacattcagacctactgtgaagtcagtgtggatggacacaagtgtatctcctgcagcaatggctttggaggagaaggctgtgaagccacgttgtgggacctaagacagactcgaaacagaatatgtgagtataaggggcatttccagactgtcgcatcctgcgtctttctaccaagagcattggccttgatgcctttaattgctacctcatcacatgattgcaaggtgaagatttggaaccaagatactggagcctgccttttcaccttgtctctggatggatcaggacccttgacttctctggctgttggtgacgccatctccttattgtgtgcaagttttaacagaggaattcacttactcagaatggaccacagccaagggctggaactgcaggaagtggcagcattctgaggccaagagacactcactggacaatatcaaaccatggctcctcctcagcatggctttgtgtctttcccagttatcttgaggggagtgggatgtagggctggtattctttgcttaggttcatttacaagatgtatcagtgttgtaagtccaataatttaagtccagtgattcaaaatcaggtatagagtccagaaacatggactacacataaggttctctatttaagttaaatacaaatgcaactttttagtgagcttttaggactactcttcaaaaaaagtgtattgctcagaatgatgacctgtaaatgtaagagtggcaggcctctgtctgtgaaagtcagaacacagggctcgagcctctggaactgaccctttgcaagtctttacaaaagaaaaaaggcagtggggagagagagtgttttggttacatcagaaataattgagatgggaaagaatagtgcagctccatagaggagacggactgtagacaatgagattaagcttcaatcactgctcctcagcaatgtgaagaatcaaagtcagggcaagaaagcgaaagcttggacttctattcaaagtggcagcagagtgggagggcggtacccttctagcccagtgctgctgagcttgtgtgaaaatcagacctgagatggcttgaagcagccaagaaccacatgggcattgcccagaattacaggagttagcacaccagctctacagataagaaaacattgaaattcaaagattaaggccaaaaatatctcacttgcaattttaatattttcatttggatttatataaatgaaacatatatatgttttggaatggccagagtgaggcaaaggggatccctgaaatcgtgttagccaggatggtctcaatctcctgacctcgtgatccgcccgcctaagtgctgggattacaggcgtgagccactgcgcccggcctccttcatccattcttagatcttatcctctaaacctttagtcatcgtttcactctcctttgattccttgttatgggtctttcaactctggaaagacaaagagatagtgggagaggaagcccggtcactgagcatctacagagggctaaatatatttattctcatttgttattcccaatattctctgtattgtgatttccatttcacagatgaggaagctgagggctagaaacatgcagtactttgcccaaagtcacacacatattaagaagagctgaggtatgaatctgggtctgcctgactcaaagcccaaacgctttcctttgcatcgtgtcacaaagtcatagaccatgacattgtttgtatcttcaagaccagttattaactttctggctccaaggagatcccctgcccaagtgcctaggggcagtagacagctgtctcagggacagtcgtagcatgtgctggattattagtgcagcagctgacactttttcccagaagggagagaggcagcaagtcagaaagttcacgggaatgagttgggagggggtcccagggaagggggacaggctgccaggagaaggaaagtacacgggagaaaatagtggggctctgatgagttagtagggttctgttaccaataaaattgtttccataaactgta

SEQ ID NO: 272569 - DNA, 436 bp, Homo sapiens
tgaagaatcaagatagtgggtataacttgagtgccaaacttctctcttagacaaccagtagtcacatgctctctatctttggtcctactgatgttaattttaaacacctcccattccataatgcttgtaaggtttttctccacagcaaatattctgtgaaatctattattttatagagtcatgtgtcaatgagaggaatacgttctgagaaatgcatcattaggtgattttgtcattgtgcaaacatcatacagtggacttacacgaacctagatgctgtagcctactacacacctcgcctataaagtctgttgttcctaggctacaaacctgtacagcatgttactgtcctgaatactgtaggcagctggaacacaatggtagctgtgtatctaaactatctaaatgtagaaaaggtgctataaaaatatggtat

SEQ ID NO: 272570 - DNA, 539 bp, Homo sapiens
  misc_feature (349)..(349): n is a, c, g, or t
tttatgtttcatatatgtaataaaaaactgaaaaacaaaaaaagcagtccaggacggtccttgcttccctgctggctcggactgagccgcagcacctgaagtgcacaaacccttttcatctgaaccgcagccaggcgggcccccccttctagatgtattgatttcttttttgacactaactataggattaatacaaaaatttgtcttgctcctttgctaagccattttcacctgccacaaccattcagaaccctgacactgccatctattttattctctgtccttccagcttggtgtcatctagaaatgacctccaatatcttcacctcgtgccgaattcggagagggncgactccacaacatcattcactcacagcctgatgacaagagaggcaggcgtgaaatccgagtccttcatcttttggaacagatacgcgcttactgtgaaacctgttgggagtggcaggaagctcatgaaccaggcatggaccaggacaaaaatccaatgccagctcctgttgaacatcagatctgtcctg

SEQ ID NO: 272571 - DNA, 302 bp, Homo sapiens
agccgagatcataccactgcactccagcctggaaaaaaaaagaattgacatttccatctttgtaaaaaatagttgaaggccgagtgcagtggctcatgcctgtaatcccagcactctgggagaccaaggtgggacgattgcttgaggccaggtgtttaagaccagcctaggcaacgtagagagattgcatctctacaaaaaaaaaatttttttgaattagccaggcgtggtggcacatgcctgtagaggaagctgagacaggaggattgcttaaggccaggtgttcaaggttacagtgagca

SEQ ID NO: 272572 - DNA, 285 bp, Homo sapiens
ttcagaaccatgtcagaagaagagaaagagaagttcatacccctgggacccagaggcagagagcttgcctaagactgccaaccagataaaaaagtattctcacctaccccccagcatcaggctaactgctgtcaagatacatattatttgcaagagatattgcaagagacatgctgtttctgaggcatagcacaaaaggaaaacttaaggttgaggatgaaatcatcatcagagaaacatcctctgcaagccaacccctaccctcaacacaaggtatcaccagag

SEQ ID NO: 272573 - DNA, 1039 bp, Homo sapiens
actggaggacctaaaccaagtatgacgatatgttagtgaagattttgctggttgaggcatagtacattttaacttatatttcaggaattgttctcaagcaggaacactcttttacatatttatttcaggcttgtcactctcataaacgaggcagcaaacccaaaatattggctcttcttataaataggcgcctttatataaagaacataaaactctataagactaatttcacaccaacacaggcagcttcataataagtaaccacctctccctccccactaaaaaagataaaaacaaagtataattagtctttcttattagatttttgtctttgatgatattacgtatttatgtgtagggtagtaatcacaatttatccttcatcttcattgtagttgaatcaaataaaagtattctttattcaaataatgtgaagttgggtgtctcaaaccttcatttaatgaattgatgaaaggtttaagacaaaattcacgttggagggaaattaagttacatacaaaaacactggttttaactgtgggacaatatttggattagaaaaccatctctagatataacctacttatatttatttttaaatggtattttattttttaaaataacaaaacccaatgttgtcttatttccactttgattgtaaaatgacattcaatgcttaataccaaaatatatatatatatacacatttgaaattatcaacggtcctttttttttggtttatattgaaaatattgtgaagggaaaaagacaagcttcaagttataatgttaatttgaaggtaaccggcctttcaagaattaatttcagccaaagcaataatcattatttaccagcgtgtgacatttttatcactcatcatattagcaaatttccattgaaaatgctaaaatggttcgtcataaggcagataactgctcgagctgtaaaaatgaccaacacaagtgccggtactcaaacattaaattatactgtaattaataaagacagttaaactgtctactagcaacagcaatttagg

SEQ ID NO: 272574 - DNA, 790 bp, Homo sapiens
gcagcagagaagggaccaacccaggctcttatgcctcatgccctctgcccactgttcattgccctgatcagccaaaccccacaggagccctcgatgtgccactgtgggtgagtcttgtggccacagggctacagaggtgaccacacagcacccatcattgcagggattgtaggacaaggtgcatccacatgtctcagaacaacgcaaccatcgccacctggtgagggccaggggcagcgtgtggcctcaggggtctgcacctctgggtgtgggatctgcctttttttcatttttattttattttttgtagagatgggggtctcactgtattccccaggctggtctcgaactcctggatgccaatgatcctcccaccttggcctcccaaaatgctgggattataggcgtgaaccactgtacccagctccgcttaaaaaaaaaacaaaaaaacagattggttgttttagagcagttttaggtttataaaaataccgagcagatagtgcagagagttcccatgtacccctcccacgcccaggttctcacattatttatattttgcattcgtgtggtgtgttggttgcacctgactcaactctacgttggtactgttactaacagccatagtttccattagggttcttggtgttgcacattctttgagtttggacaaaagtataatgaatgtgtctgccgttggagtgtcacagagtggtgtcactgccctaaaattcctccatgctccccctgttcatccctccatgacctttggcagccacagctcttctca

SEQ ID NO: 272575 - DNA, 339 bp, Homo sapiens
aagccatgattcaaaaccaggcattcttagtgcccagcatggggtcaacactgacctgcttggctttggtacctctttaattgcattcgtactaagcactcagtcagtcataaccattctcttctcccttgtggtaattaatggtggtggtggtggagaatctacgggattaggcttcagttaattcttttttttttttttttggagacggagtcttgccctgtcgcccaggctggagggcaatagcatgatctcaggaggcaaaggttgtggtgagcggagatccaccactgcactccagcctgggtgatagaacgagactcgacctcaaaaaaaaaa

SEQ ID NO: 272576 - DNA, 448 bp, Homo sapiens
gcagctgagaggcgaggcgaggccaggcccgggtgggattgggcggagcctgcgcttccctccgcctcgctcccagctcgtctcgttttggaggctagacctgccgtggagactggaagaactcagctatctggaaatagattgtgtcccggcagagggaaagtttgttgatgattagatccaggaaaattcctgctattaaaattaattttaaatcggctgtaggggcgctcgcatgtggtcctagctacccggatgctgaggtgggaggatcgcttgagcccatgaggtggaggctgcagtgagccgaggtcgtgcgctgcactcccgcctgggcatgagagagaaaccttgcgcctaataaatacataatcataaataacaaattggaaataaataattaaaataaataaatataaatgaataataaacactagtttccggaatt

SEQ ID NO: 272577 - DNA, 666 bp, Homo sapiens
ccactgttgtatatgcagtccatcattgaccaaaacatggtttgtgccaaatgatagtatttccaaacgttgatgcattttgatctgtagccacctcagttattcaaaccttagctgtacctgttttccggaggtaagtatcaccatccaggtgattaggtaacctatactttgctgaattgacatctccatatggtggcacactgcttaagaatgtagactgtattgttagaactgagttggagtctggttcttttgttgtatttgggcatcatctataaagtagcaataataatttacctactctagcagatgaatagagtaatacatgtaaagtgcttagcatatcgcctcccacatagtaagcattctgtgtatgatgattcattattaccatcacaaattcgtttattctctcttatatgagaaaacctccaaaactgtaatgctttaccatactccccattctagagaaagttagagaatctgtctggcctcgcagtagttatagggaggcagcatagagaatctagaaactttctgctgcttttaaagtcaggggtcagggttctaccatatggtggtttcatattttaatttaaagtaggtgtgtgtgtttgtagagacaacgtctcactctgttgcccaggctagattgcagtggcc

SEQ ID NO: 272578 - DNA, 414 bp, Homo sapiens
ttctgtgagctctcagagctctccagaccagaaataggatgatgatgactaaaggggaaatcaaagcatatctgaggatttcttaaggcattcttaattgtattaataagtaacttattagagatgattaagaaaaagttgtgggtggatgcagtggctcacacctataatcccagcactttgggaggatcacttgaggccaggaatttaagaccagcctgggcaacatagtgagacccagtctctaaagaaatacaaaaattagccaggcgtggtggcatgcacctgtagtcccagctacttgggaggctgaggtgggaggatggcttgagcccaggagttggaggctgcagtgagctatgattgtgccactgcacttccagcctgggcaacagagtgagaccctgtctcaca

SEQ ID NO: 272579 - DNA, 295 bp, Homo sapiens
tgcaggagcgccaggactcaggcctgggtcctcctcacctctccacgctcacttcctcggagatctcatcatttttgcggtctcatcacatccagcaccacccgtatgtcggcagctcccagtttcctccagcccggtcctctctcccagtccttggacgcatctatccaatcacctatttggcatttccacctgggtcttcagtggacagctcaaacatggtcggtccaaaatgagctcctgctcttttgcctcaaaccccatcctccgcccagtcttctccctccttccagct

SEQ ID NO: 272580 - DNA, 310 bp, Homo sapiens
gtgggacgcatctctactcccaactactcaggaggctgaggcgggaggattgctggagcctggaaggttggggctgcacggagccctgatcctgccactgcactccagtctgggcgacagagtgagaccctgcctcaaaaataatcataaatactgagtttggggaggttcattatgattgacgcacttgagttactgatttgggtcgagggttcagtgaagctttggtttacatcttgtgcagctaaccacgttgagcacagagcatgagacttcatcatgaggaggtaggattaaggattaggcttct

SEQ ID NO: 272581 - DNA, 434 bp, Homo sapiens
cactaaatgtccaatatgctgcacataagtaccccaaagttagcacagaattgttccatggctgtcatatatgttaaaaatcattaaaagttcattttttctctcattatgggaaggatacatgctcctactagtaaatttagtaggtagaaaaaaattatcactatctagactgctttccatttagtctttatgcatagctttctgtctgcctatttttaccttgtgtttgtaacttactattataaaatatgcgtctctgtgcattgtcaacattatttacaataacatggagtggattgacacgtattctctatatttggattaaaggagatagagtatgtgaaattaaatgggagaagtatctgatacataacaggcaatacaaatattatcacatagcgtcaacttatttgtgaatattgaaagctcca

SEQ ID NO: 272582 - DNA, 834 bp, Homo sapiens
ccctggaggcagttgcttccctgaggagggtccggctgcggccagggtgttgggaaaacaacattagcccgttacataacacaggcatggaaatgtattcgtgttgaagctttgccaattttagaagaacagattgctgctgaaaccgaatcaggagttatgttgcaatcaatgttgatcagcggtcaaagcattccagatgaacttgtcataaagctaatgttggagaagctcaactccccagaagtctgtcactttggttatattatcactgaaataccatcactttcacaggatgccatgactaccttacagcaaatagaattaattaaaaacttaaacctgaaacctgatgttataatcaatataaagtgtcctgactatgatttgtgccagagaatttctgggcaaagacagcacaataatacgggatacatatacagtagagaccagtgggatcctgaagtcattgagaatcataggaaaaagaagaaagaagcccaaaaggacggaaaaggagaagaggaagaagaggaagaagagcaagaagaagaagaggcatttattgccgaaatgcagatggtggctgaaattcttcatcatctagttcagaggcctgaagattatttggaaaatgttgaaaacattgttaagctttataaggaaacaattctccaaactttagaagaagtaatggctgaacacaatccccagtatctcattgagctaaatggaaataaaccagcagaggagctctttatgatcgtatggatcgattaaatatctgaactaaaaagaggaggtatttaaacaaattcaggtgcaaaggagacc

SEQ ID NO: 272583 - DNA, 1011 bp, Homo sapiens
ccctggaggcagttgcttccctgaggagggtccggctgcggccagtattttgtgtcatgacttctcaagagaagacagaagagtatccttttgcagatatatttgatgaagatgaaactgaaaggaattttttgttgtccaaacctgtttgctttgttgtatttgggaaaccaggtgttgggaaaacaacattagcccgttacataacacaggcatggaaatgtattcgtgttgaagctttgccaattttagaagaacagattgctgctgaaaccgaatcaggagttatgttgcaatcaatgttgatcagcggtcaaagcattccagatgaacttgtcataaagctaatgttggagaagctcaactccccagaagtctgtcactttggttatattatcactgaaataccatcactttcacaggatgccatgactaccttacagcaaatagaattaattaaaaacttaaacctgaaacctgatgttataatcaatataaagtgtcctgactatgatttgtgccagagaatttctgggcaaagacagcacaataatacgggatacatatacagtagagaccagtgggatcctgaagtcattgagaatcataggaaaaagaagaaagaagcccaaaaggacggaaaaggagaagaggaagaagaggaagaagagcaagaagaagaagaggcatttattgccgaaatgcagatggtggctgaaattcttcatcatctagttcagaggcctgaagattatttggaaaatgttgaaaacattgttaagctttataaggaaacaattctccaaactttagaagaagtaatggctgaacacaatccccagtatctcattgagctaaatggaaataaaccagcagaggagctctttatggtgagtgcagtgttaagcaggaatacttcacagcatggaaaatttaaatctattgacagtattgtacttcttttaataaacagaagcatatttatatttgaacaccattatctttgaacaa

SEQ ID NO: 272584 - DNA, 1040 bp, Homo sapiens
atcatagagaggtcgggtagaggctcccgggacctgcgtgctgccgagagaggaagcgaagggcaccatctttgtattttgtgtcatgacttctcaagagaagacagaagagtatccttttgcagatatatttgatgaagatgaaactgaaaggaattttttgttgtccaaacctgtttgctttgttgtatttgggaaaccaggtgttgggaaaacaacattagcccgttacataacacaggcatggaaatgtattcgtgttgaagctttgccaattttagaagaacagattgctgctgaaaccgaatcaggagttatgttgcaatcaatgttgatcagcggtcaaagcattccagatgaacttgtcataaagctaatgttggagaagctcaactccccagaagtctgtcactttggttatattatcactgaaataccatcactttcacaggatgccatgactaccttacagcaaatagaattaattaaaaacttaaacctgaaacctgatgttataatcaatataaagtgtcctgactatgatttgtgccagagaatttctgggcaaagacagcacaataatacgggatacatatacagtagagaccagtgggatcctgaagtcattgagaatcataggaaaaagaagaaagaagcccaaaaggacggaaaaggagaagaggaagaagaggaagaagagcaagaagaagaagaggcatttattgccgaaatgcagatggtggctgaaattcttcatcatctagttcagaggcctgaagattatttggaaaatgttgaaaacattgttaagctttataaggaaacaattctccaaactttagaagaagtaatggctgaacacaatccccagtatctcattgagctaaatggaaataaaccagcagaggagctctttatggtgagtgcagtgttaagcaggaatacttcacagcatggaaaatttaaatctattgacagtattgtacttcttttaataaacagaagcatatttatatttgaacaccattatctttgaacaa

SEQ ID NO: 272585 - DNA, 373 bp, Homo sapiens
ctggagccctgccctcaacccccaagcctggagcagttccggcccaacccagctctccaggtgctccatccagaaccctgaccaggtgctgcaggccatcttgggagttctggcctacccagaagggccggggtgttcactcttggactcatgaagtgactcggagcattaattttggaggccacataaacacgaatttaaatcctagctccactatttacctcctgtgtggccttgggcaagttatataacctctctgaacctgttagctcatctgtaaaaaggagaaaatagaataattttcctctttgagtaattgggaagatttagcaagacaacatgtttgataaactctgcctcaccacctccgaaa

SEQ ID NO: 272586 - DNA, 516 bp, Homo sapiens
ttttcttttttttaacttttttttttaccttttagtgtaaaactgaacatagaaaataaattcatgaagaagggatattttctgagggtgtccagggctgcccaacacctcttgtctaccttctctgtcatagccccatttaaaacactctctctggatgaatacaccaaacctcacagtctttgctctcttgctaggaagaggagcaagagcgtgtttcactcttggctcctgcttacacacctgccgtccaatggaaactactacttaagacatttaaaaatagttgtggtgatagcatgttgtgttttggttggtgatgccagttagtctctgaaaactttctgtgatgagtgtaaaattctacaccttaatctcctttcttgtaggatctgggaagcagtatgcacttgattgcaccaaagattttacgttcatagaaaatttctggcatctgtgtgaagaaagtaaactatatcttccatttaaacaaataaaatatctttttgataaaag

SEQ ID NO: 272587 - DNA, 350 bp, Homo sapiens
aactccagggccattgttttcctgttctccccgctccaaggcctctcctctctccttggcccaactctctgacagtgatgcagttctgaaggccagacgtccaaaatcagaatggcatttgcttgaaggatccaggggagaatccctccttgcttcttccagcttctggtggctcatggcaataccttgacttgtagacatatccctccaatctctacttatgccttcatatcaccttctcttctcttatgagaacagttgtcattggatttaggacccaccctaatcgaagatgatctcacatgtagtttaattacatctataaaatatgcttttcagtaaggtcactt

SEQ ID NO: 272588 - DNA, 405 bp, Homo sapiens
tcaaacggcaagaaagaaagtgtgatgtgtctgtgaatctgctgaatgggccgaggggtgtttttaaaagatcatattgcggggaagaagcaggcactgcagaaacctatggattggggtgctaaaacctacgagcttcccaggaagctgccttttgggagcccgaactatcccagaactttttcctagtagcagatcacaatcaccgtctcttctgtgagcccgcttcaagccagcaatgaaaggacacttctgcacgccagcagtaagagtaggaaaccccactctccctacaacataagggctacacatttgagatcctctcagaggactttttaaaaaaataacatctttcatttatgcttgagcagggagaagagtcattaaaaagaagagatttttaaa

SEQ ID NO: 272589 - DNA, 509 bp, Homo sapiens
gattatgtgatagttctatttttaattttttttaggaacttctatactgttctccatagtggctatattaatttatattcccaccaacagtgttcagagattcctctttgttcccatccttgctagttattgcctgtcttttttgatataagccattttaactagggcaagatgatatttcattgtagttttctctgattagtgatgatcattttttcatatgcctgtttgtcatttgcacgtcttcttttgagaaatgtctattcagatctctggtgcattttacaatagaattttttttttttttttgctattgatttgttgaagcttcttatatattctaattattaattcctgtcagatggatactttgcaaatatttctcccattctgtggtttgttcattttgttgattgtttcctgtgcagttttttagcttgctgtaatcccatttgtctatttttgttgcttttattgcctgtggttttgaggtcttacacaaaaaaatc

SEQ ID NO: 272590 - DNA, 509 bp, Homo sapiens
ctatatattatataatagtgttttatcaatgtgaaatatcctgagtgataattttattgtgatatgtaggggaaaacatttgttcttaggaaacacatgctaaatactaaagaaaatatgaagtttatgatgccagcaatcaactatcaaatggttcagtaaactaaacaataatctagtgttctctgttattattcttgcaatttttcctaagtttgaaaattttcaaaataatacatttgaggaaaagttaacaaggaaacagtctgctcttgtaacagctcactctctcctaaagacaagctaaccggaagccatatccccagccgtgatgtgaggagcacagattcagcaaggaaagttagagatgactcctaagtgtaatggcaccagactgataaagataagtcatgttcctgaaccaggataatctctctttacccactaaatgtaacgacatgatccttctgagttgtaataaatcctatattcataaattagcctaaaaa

SEQ ID NO: 272591 - DNA, 425 bp, Homo sapiens
aagattcaatagaggttcaaaaactttgcacaggtcacaatataaatggttaattttcaaagaaagaatctgaatggagtgtctatattgtgtttatgtggagaagatgtattcccatctttgccaatgcttattttaaaaattcattttaatccaagagaaaataaggtgtgaaaaacaaggaacatgtgaaagaggaccaatgactgtttccccaattattttttagaagtctcagaatcatggagactcaaaatcacttcttacaatctggtaaccaaatttcatatcttggcagttggatgcggtaagagccacagagaaaccacctgatttttgtttcagaaccatattgtatttgcttaaacgtgttttaaaagcctccaaataaataaattgtcagtccaaaccattagcagacagat

SEQ ID NO: 272592 - DNA, 447 bp, Homo sapiens
atcctctaaaacatgcaacaggtactttcattactttacacaatttctttgcaccaaaaacactgccacagggcactcaaatgttgacagaaactattagccccagacaataaatagcctctgccttatttaacattaggtgctaatgaggccaaggttctatcttgatgatgacatttaactttacctttagctcccaattgatctcaaatacaaatactatttcttacaagaagaaattagggctaggatagtatctgtttttactgcatctactgttcctcctgtaaccttcacttcgcaaaagtgtgatttattttttaagggagcataccaaaaataaggtagaaccttggaaatctctcaaattttgacagtactgcataaataccgattttaatatggataaagacatagagaaagatgtgcagttctcaataaaaaaaa

SEQ ID NO: 272593 - DNA, 383 bp, Homo sapiens
gagccagcaaggtttggctggttagattctccagctcagtggcacaatgcccggggttggagccttctgatgtcattctcgtggctgcagtggagtttggtgcagggtggcaagcagttagcataagtggcaactcctaaacttataatagtgttaccttgggctgccttagttcttgctgttctttagccttctcatcaattctgtgaattatcagtatccttccaatgaattgcttttctgttatttgcaatctgaaccctgttttgtacaaaaggaaaatgaggacatccctttttaagaaacacttgggatgttcaagaatcttattttcctggtagtttaagaactcctttgatagagtgagtgctttgtttgacaaa

SEQ ID NO: 272594 - DNA, 361 bp, Homo sapiens
gtaaccacaaagcaaaaacctatagtagatatacaaaagatgaagagaaaggaatccaggcatataattacagaaaatcaccaaatcacaaaggaagacagcaagagaggaagaaaggaacaaaggatctgcattaaaaacaaaacgaaaacagaaaacagtgaacacaaaggcaataataaacctttacctatcaacaattgcctcggatataaatggattaaattatccaatttaaaaacatatatagtcagtgaatggattttttttaagacccagctagctgtatgtgccctgtgagagactcacttccagtataaggacacacacagactaaaagtgaaggaataaaatatggtat

SEQ ID NO: 272595 - DNA, 485 bp, Homo sapiens
catggtttgtgggtaggggttgtgcattcactactgcttctcttggctgtaggtgaaggtttctttggctctgtgctgatactgggtgcaccatcacccaccccctttgtttcttctcctgggtcaagtcatttgcctaatcagtcccaatgtaggaacctggatacttcagttcaaggtgctgaattcaccgtgcttttcattcaggggaagacagctgcttctcattgggcatcttggcctgcccacttcacgtcactttttgtaaaatccacaccactccaggaatatccattacttaacttcgcctgaaataaacagaaggctcattacacttatcatgggctcacttacttcgcctataatgaaggtgccatggaaatgctagtggatgacgtggtccattttcttagggatgagatagaaaaatggtgtatggctttttaatttaattaaaatttttagtttggtttaaatttacattg

SEQ ID NO: 272596 - DNA, 459 bp, Homo sapiens
ctctatcaaataatgtttgctgatgtttaacatgggaatacatccacttcctccatcctgtcgataatgataatgcacaggtggttgtttcttacttgttttgtaaccccttataaagctaccgtgtcattcctcagcattctcttttaactaaatcgtttcatttccttcttgtttgttttactttttggcacagaacaatccagcactttaattttgttaaattttcgttgagaaactttaaaataattcctttttgttaccatcttagagatgtggcttttcatctaacaagcagttactgggtgtctcctgtgtgccagccctaggaatattaaggcgattgaaacacaagtcctgggagctcacagtctcatgaggaggccaaatctagcccatttcctgatgtggaacatgataggtatatttgctttttttttgagagagagagaggaaaaa

SEQ ID NO: 272597 - DNA, 764 bp, Homo sapiens
ggacctgacgtccatcagaccacgggataggactaagggcaagtaaaacagaagaagatggtgtatacaaatgtgatagtgaaggctgtgaccgtatatatgcaacccggtcgaatctcctccgacacatttttaataagcataatgacaaacataaggctcatttgattcgtccaagaaggttaacaccaggccaggaaaatatgtcaagcaaggcaaaccaagaaaaatcaaagtctaaacatcgggggacgaagcacagcagatgtggaaaggaaggaataaaaatgcccaagaccaaacgaaagaaaaaaaataatttagaaaacaagaatgcaaagatggtgcagatggaagaaaataagccttattctctgatgggagcaagatgcgttcgtcccatcagcagggatgccatgataaagagacaggctggggccatagtgccacagggggcacaattcacaggaaggcctcaattccctggtcagagttttcattaagcccaggttcttgtgtggagcctttccctggcctagaaacaactaaaaggtcaggattaagttccagtgcccacttattcttccccatcctggaaaacaacgacagagcagcaatatatttctggagcaacattaagttctggtgctcactgtaagtcttccccagagcaggaaataacaacaggacaatgaatcacttccactgcagtgttttagttctggtgctcattataggtcctcccctgatgggacgaagactgg

SEQ ID NO: 272598 - DNA, 581 bp, Homo sapiens
ggccaacatggtgaaaccccctctctactgaaaatataaaaattagccgggcgtggtagtgcatgcctgtaatcccaactgctagggaggctgaggcaggataattgccaggggatggaggtggcaatgagccacagttggcgccactgcaccactgcactccagcctgggcgacagagcaagactccatctcaaaaatcaattagtcaatcagtcaataaaatagcttctctaactttacttttatcccaagggtagaaatttttcgccagagttggggtcagaattccctagcgtgaacactaaatggttaataaagttagtaaatttttcttatgttcttagtcttacttcctctgttactaagtcaagacttcgtgatgtaaatgatattccctgttatgttttccaaaagacatcatattctaattgtaacattaatatattttgtaaatttttttctttaaaaaaaaaagaaaaactcctaaggagtcataaaattctggtaagtcaaatgttgcctcaaggctactggttggttacccttgctaattgctttctttccaaatcttattattaaa

SEQ ID NO: 272599 - DNA, 296 bp, Homo sapiens
ggatgatggatgctttcaagtggggtccccatgagcctctggtgacctcacttcctcagtgacctcttctgatgttccccaaagcccggtagaaaggaagaaatcacatggaatcctgctggctggacctttgaaatataccgaggactcagctccttcctccaggtccaggctgccgtcctgggattcgcataactatttttcctgcatgcagcactccagcagctgctttatggtccccgggatcctgatcttacttcctctaaagtctgttctcctcccaggagcccagtcat

SEQ ID NO: 272600 - DNA, 469 bp, Homo sapiens
ctcttatttaataggcttataatttcttcaataacatttctatgattttaaaaacacagactatgattcttcgtgacactatgtagggactctggatgaatcacccagcattctcaaggacatatattttagtcacattgcatttatatgatgctttatggattttaaatacatttatgcatatgatctcagctaatcctcacaataaccctgagatgtagataaaatcgtacaagcactttgccagcttaaggagccagtttgcctcaatgatctcaaaaccattctttgctgtcaagttcactgtggcatctttggggacaatcccatggctaccatagtccttggtaattcaggtggcgctaaatttttcttatcaccttgcctattttcattgtttcaaatgcctacttttaaccacacattcaagtttttaatcaaaaatataatttaatctaatttaaagtta

SEQ ID NO: 272601 - DNA, 526 bp, Homo sapiens
ctgattaaccctagtttactggttttaagaaaaatgtggaaaaatgaaaacacaaaatgtacacattcacaaggacagctcttgaactccccaagagtatattcttgagccctggtagagcagctgggttgggttggccttaaaagatgtagtagtaagttatactagagagaacaggctttgaagttagacagccctgtgttcaaatctgtgtactgacattttcttgccttctaatcttgatataaatgcctaacctttctaggccataatcttcttatctctaatatgtccatagtggacctcaaaagagaggttcagattatgtcatagctctataatgtgctgactgggtgaccttggcaagtagcttagcttctctgagcctgtttttctcttgtgaaatgggaatgcttatgtcataggattgttgggagatgtactcaggagtgtacctgtgaaacatagtgggttgatcacatgtgcttgtctctgttccatctaaaaggacagagaagggagttta

SEQ ID NO: 272602 - DNA, 339 bp, Homo sapiens
gaagactgggctgagggaggtttaaggttggattgtttttttttcctgacattaaaaagattcccataaaatgtgtatctgtaccatcagttaaaaaaacaaaaacaggccgggcatggtggctcatgcctgtaatcccagcactttgggaggctgaggcggacggatcacgaagtcaagagatcaagaccgtcttggccaacatagtgaagccccgtctctactaaaaaacataaaaataaaaaaattagcagagcgtgcctgtagtcccagctacttgggaggctgaggcaggagaatcacttgaacctgggaggcggaggttgcagtgagccaaga

SEQ ID NO: 272603 - DNA, 415 bp, Homo sapiens
attctccaaaacctgtggatccattgaaagagtctggaaatctgtgtccatcacatcctgcctccctccccacctctaccttagatgaggctcagaatccttgtcaggggagcagatatcaaagggtcaccctgcgactgcttggccttgaggcaaacactgggaaggactccatagctttccttctgaagtggaggcaggcagcactttcacttggaccccccatcagcatctctgaggcccaccacggctgttgcacacacatcctctctgcccaaacacagaccaaaatatcccagcagcaaagaaacaaagtcttttctctgtgttctcactacttacctggaagaaactgacattgccaaagtgagctttcctataaacccagaggaaacctttgaaaaggaaaataaac

SEQ ID NO: 272604 - DNA, 458 bp, Homo sapiens
agataatgaattggttccctactgttcttcaaaggtgaccaattagagtattttttgattaaatatttcatcttaagataattatatgttctcatgcagtgtaagaaataatacagagagatctggtgtacctttcacccagtttcctccaatggtaccatcttatataactatagtacggtttcacagctggaaaattgagcattcatatgacccacttgtttttgtctgatttcaccagttttatattattcatttgtgtgtctgtgtatatatttagttctgtacaattttgccacaaatgtagatttgtgtaatcactggatttaaaaaagtcttcatgaactcatggatttaaatatattttatggccaggcatggtggctcatgcccacaatcccagcactttgggaagccgaagcaggatgttcgcctgaggccaggagttcaagaccagc

SEQ ID NO: 272605 - DNA, 314 bp, Homo sapiens
aagaacagtttcaggtttagagaaaaaacagagcagattagctgggcatggtggtatgcacctgtagtcccagcttattcatatgcttatttgccatctgcgtatctttttgtgaggtgtctgttcagacctcttgcccacttttcaatcgggttgttttcttattgttgagtcttaacagattagcttaatcagattggcttcgggaggctaaggcgagaggatcgcttgagcgcgggaggcggaggttgcagtgagttgagatcacaccactgcactctagcctaggtgacagagagagaccctgtctcaga

SEQ ID NO: 272606 - DNA, 376 bp, Homo sapiens
ttttcagtcagagaaaccatgtacaaagcatctaatgtgagagtgctatggtctgaatgttgacaaccacccccctccaaattcataggttgaaatgtaattcacagtatgatactattaaaagttaaggtctctggaaggtgattatgtcatgaatacagagccttcatgaaggagattggtgcctttataaaggatgcctgagggggttggtttgtcccttccaccatatgacgactccaccatgtgaagaagaagatgggtctatgaactaggaaatagggcctcatcatatatggaatatgtgagcactttgatctgggacttagcttccagaactgtgaaaaataaatttctgtcatttataagctactta

SEQ ID NO: 272607 - DNA, 360 bp, Homo sapiens
ctccaccaccaccacctagagagaatgagcaggaaacctcagaagaaatggcacccaaaagagccagaagtgtcgcctcagccagctaaggttggaaccacttaccaacgcccagaatcacgtctttccaatcaaacccaatgactgttcatctctgggtttcagtttcctggtttgtaaactcccatgagtaaacaatctctgattatcccgaccacagagagggttcaatcaggtgtgctggtggtcttcaatcaaacatggatttacctcccctattctattcttcaaagagggtgacaaatctgcaactcacttgaaatccatcaataaaaaagattaataaacagatatatgata

SEQ ID NO: 272608 - DNA, 452 bp, Homo sapiens
tttgttggccaaaaggtagaaaaagcccaaatgtacatcaggagtagagtagatttttatatattgtatattgtggtatgttcataaaacataattctttacagcagtgaaataaatgagtcacagcttcaagctccagcttgaatggatctcacaacataatgttaagcaagaagccagacacaaaaagaatacatatggtagtactccgcttatataaagttaaaaaacatgcaagcccgctgctggaagtcaaggtagcggcttcatgtggggaggaagaagaaaggtgattaggaagagaacgagggctttgggatgcttctgggtcatgttctgcttcttgacatggatggttacatgaatgtgttcacttcctgatcattcgttgagccgtacaagcaaatgtgcctactttttgtatctttgtaatgctccaataagatttttta

SEQ ID NO: 272609 - DNA, 376 bp, Homo sapiens
ggaattcaaatggaatactagcaaaatcaatcaaatacaaaacactattggaggaatttaggggaaaaagattgaaatttatagaaaacaaacagcaaagtgacagaagttgttcctaatcaaaaatcattttgaatgtaaatgtatttaatccaccaactgaaagagagattggcagaatggattttaaaaacatgacctaactacatgctatctacaggtgacttaaatccaaaggcacaacgagatttacagtgaaaggatggaaaaatattttccatgcattagtaaccaacagaaagctggcatggctgagattgtgccattgcactccagtctgggcaacaagagcaaaactctgtctcaaaaaaaaaaa

SEQ ID NO: 272610 - DNA, 374 bp, Homo sapiens
cttcaggaaatgacatttgggctgaaatctgaaggatcagttggagggagtcaaagaatttaaggaacttgaagacctgcagacaaaggaaagtttaagtgcaaagttcctgaggcaaggaagagtttaaggtatttcaggaaccatggtcagatgatactgagcaagtgagggagaggtaagcaggagccagaacgtgctgggtcttgaagaccaaaataagtactttggattttattctaagtacaatggaaaatcactgacggtttttgaacagaaggatggcatgatctgaattacatttcaaaaagatgactggctgctgagaggtgaggagcatagtacagtcagaaggccactgctgtgctctgaag

SEQ ID NO: 272611 - DNA, 454 bp, Homo sapiens
acgtgtcaaagaaattatcaccctatgcacaccccactccaagaaaggctaagaaaacaagtcctatgagcggaggtcggagcaacctcttttccgaagcctgaacacaatagatggcaaactattgtccaccttcagctcgctccaaatgccagcagttgcaggagtatgagctgcaacagctcggcacgactagtccaaagacgagcactggaatataagaaaatggtcctggcgcatcctaccctcccccatcgatcaccctcaaacaagtcagttacccggctggtccccacccccctctgcgggccgccaccgcccgcctgggcccggctcgcagaaggtaggagcccggaccggcagagccgaggctccatgtgagccgcgcgggaggcgcagagggggctgcaccggacggaaggttgcaccggtggcgggcgcaagcagcggccgc

SEQ ID NO: 272612 - DNA, 428 bp, Homo sapiens
gtggagatggttggagagtagctgagagagacagaagagtccctgagggctgggggtgagaacatgagagagactggggagtaattcagtgaaattcgtgattttggtggtgtgtcgtgggtgcctggaactgagtccagctggaatctagagaagtttcgagagtagctgaaagagacacaagagtccctgtgggctgagggcaaagacctgagagagaccagggaggacctccgtgaagtctgtgagtctgtaggtgattccggagtgtgggaggctgactccctctgaaacctgggcgtggtgggagagtagctgggacagacaggagagtcccagggggctgggggtgaagacatgagagagactggggagtaactcagtgaaactgctgagtttgtaggtaattcctgggtgcctgcaagtga

SEQ ID NO: 272613 - DNA, 407 bp, Homo sapiens
gggctggccccttctggcacttggggacaagcttctcctcctcgggcggcggtcgcagccttgtggggcacctgtgtgggtctttctgaacgccagctggaatgagagcttttcccgcaggcgaggcgtgcacagaaaagatgcttcgtccttccctcggtgtctgtagcacgatcggaaaggggcccgtcaaggaaaggggttggagtgttgggagcctggggcaggagggtggggtagacgctaggcggctcaagacctgccctgaggaagcagaaggagcgtggggggaccttcggagggcacaggagaggcagtgggaaggccacagttcttctcaggataaaacagccccaaggcccccatgtcttgcatttaacattcttggatgtttctgaccgaagaga

SEQ ID NO: 272614 - DNA, 566 bp, Homo sapiens
tctcaaataaaaaagaaagaacattcgtcactgttggaggcatgagactgtggaggcaggtgcgttgaggccaggagtggaagagggagacaagacagaagggtagtccagtcttgagtttgctttgtggggagtggtggagaggcaaaaacggatctcagagtgaccttcgagtaaagaagacatggggctgtgtggagtggctcacacccataatcccagcactttgggaggtggaggtgggaggatcacttgaggccaggagttcaagacccacctgggcaacatagcaagatcccatctctataaaaatttaaaaaattagctgggtgtggtggtgtgcacctgtaatcccgggtacttgggaggctaaggatggcccgcaagggggtgctgtgcttggactggggaatggccaactgcccagcaatagggagatgacttcgagaagcaaagataggaaggttaagcttgataagacaagaaatgcagcagatgtaatccaaaggcaaaggggggacctgtagcttgaattaagaagtggtgtgggctgggcgcagtgactc

SEQ ID NO: 272615 - DNA, 1045 bp, Homo sapiens
ctcacatcccagtctctgatcagggaaagcagggcacagccttgggaagaatggataagcatggtgtgaagacccccttgtggaagaaggaaacggaagagctccgggccgaggacgcggagcaagaggaagggaaggaggggtcggaggacgaggacgaggacaaccagaggccgctggaggacagcgcgacggagggcgaggagccgccgcgggtagcggaggagggcgaaggccgcgagcggcgctcagtgtcctactgcccgctgcgccaggagtccagcacccagcaggtggcgctgctgcggcgcgcggacagcggcttctggggctggctcggccccttagcgctgctgggcggcctaacagctcccaccgacaggaagcggagcctcccggaggagccgtgcgtgctggagatccggcgacgaccgccgcgccgcgggggctgtgcttgctgcgagctcctcttctgcaagaaatgcaggagtctgcacagccacccagcctatgtggcgcactgcgttctggatcacccggatctgggtaagggcggggggccgctgggaactcctgagcgcccccgctcccagcctttgtgccctccatcatttcctggccccagaccccctaccgaccttctctcttggagcgcggagccctcttcgacgcattccgcaggaccgccccttctcagctgctgcccagagcgcccccatccgtcaagaaggcccactgttggtgcttggttcccatctgtcacctagcgcccccagtgcagagcccagcataacctagagcccgctgtcaacagcgcccaccgagggctccccgcccccacgcagcaccagcgccaccgcacacctgactctgtccgctcacacagcctcaccttcacctcttgggtatttcagatccgctctggcccagtgggcagaggcatcgcctagagaaaataacctcagggttccctcatccctctgacaaacctgcctctttccctgaaaccattcaataaaacctctgatcaaagtgtcaaaaattt

SEQ ID NO: 272616 - DNA, 1077 bp, Homo sapiens
ctcacatcccagtctctgatcagggaaagcagggcacagccttgggaagaatggataagcatgcaggactgccctgacctcctcccggcccgcaggtgtgaagacccccttgtggaagaaggaaacggaagagctccgggccgaggacgcggagcaagaggaagggaaggaggggtcggaggacgaggacgaggacaaccagaggccgctggaggacagcgcgacggagggcgaggagccgccgcgggtagcggaggagggcgaaggccgcgagcggcgctcagtgtcctactgcccgctgcgccaggagtccagcacccagcaggtggcgctgctgcggcgcgcggacagcggcttctggggctggctcggccccttagcgctgctgggcggcctaacagctcccaccgacaggaagcggagcctcccggaggagccgtgcgtgctggagatccggcgacgaccgccgcgccgcgggggctgtgcttgctgcgagctcctcttctgcaagaaatgcaggagtctgcacagccacccagcctatgtggcgcactgcgttctggatcacccggatctgggtaagggcggggggccgctgggaactcctgagcgcccccgctcccagcctttgtgccctccatcatttcctggccccagaccccctaccgaccttctctcttggagcgcggagccctcttcgacgcattccgcaggaccgccccttctcagctgctgcccagagcgcccccatccgtcaagaaggcccactgttggtgcttggttcccatctgtcacctagcgcccccagtgcagagcccagcataacctagagcccgctgtcaacagcgcccaccgagggctccccgcccccacgcagcaccagcgccaccgcacacctgactctgtccgctcacacagcctcaccttcacctcttgggtatttcagatccgctctggcccagtgggcagaggcatcgcctagagaaaataacctcagggttccctcatccctctgacaaacctgcctctttccctgaaaccattcaataaaacctctgatcaaagtgtcaaaaattt

SEQ ID NO: 272617 - DNA, 246 bp, Homo sapiens
ccagtcactccaggctttccgggcaccggaggatgagagaagccctatgctcaggaaagtcacggtggtcactgcctgtcccatgggattacgatggcccaagggtgacaaccgcagaggacctgactcaggagggaaagggctcatgacagccaatcatgcattctcttcccagtgcccctcccagcagcctcccagtggcagcacgaaacaggccacagtaagggtgtttacaccatgggaatg

SEQ ID NO: 272618 - DNA, 210 bp, Homo sapiens
ttttctacaagatttaagaggctaatacattacaaaacaattagactaaaagctaatattactgtaactttggtttgcaatttcacgttttgttttccatataatttaagagactaatgcattttaaaaaccaatttttagatcctgtttttaaacatataatgtacaggccgggcgctgcggctcacgcctgtaatcccagcactttgg

SEQ ID NO: 272619 - DNA, 263 bp, Homo sapiens
ccataggttccctgtgaaggctgaatctaaggagacttagccttgatctagaccaggctgggaatggggctggtctggactacatatttttagcctaattctcaagccctgctgaaattagccaaaaaatagagaagatctgccctagctctgtgtgtcctagctggagaactgtggtaccattgttaatgaccagtcacggctccagattgctttgtttggttgcccaaaccagctgggagaaatgagctgccaaggagagc

SEQ ID NO: 272620 - DNA, 492 bp, Homo sapiens
tactgatagagcatggatgcaggattaatcaaatctgtagccttagagacaggaggcattcctgcctttctggtttgcagacatggagggctgaaaaggatgggggtggggcatggtagtggagattgttagccagtgggttaatggttaatccctgcaacatgccagagatacacctaatctttgatgagacctactgctcagaatgaataatggttaaccattccttacctttgactaagaccatatacctttcatagtttgttttttaaagtatgtggaactgtgaagtttttttttcttttgcaaataacatttgcatatcacagaagttttatgactcattcttggtaaagaaagcaggtgatatccatgaatggtttgtcatcttttagagacgagtagaatgattgctatcgaattttcatttaacttaaacacagctgtgtagagacaatataaagtggtcctttcctcagtacaaaacatgga

SEQ ID NO: 272621 - DNA, 350 bp, Homo sapiens
tatttccttcttaagcaagaggcagataccagtgtcttcacattatttccagaggcaagaagtcctatagtttacgctgagtcacagagttaacagatccacatggctacccaaatagaaacagtgtaactggcttttaaattcaactatttttattaacactttaaattgaagttaataaaataaaatgcttaccaattgaggataatagcacattgataaagcttcagaaagattcataaaggccataattgtttgcataatagaagctcagcatccctattgaaataaaaagtactgattatcttcccagtaagtatggctgagtaggcgtagaaacaatcttatta

SEQ ID NO: 272622 - DNA, 430 bp, Homo sapiens
aatctgcctgcctcagcctcccaaaatgctgggattacagatgtgctcaagagagcaattttagatcagtcatgtcaaagcagacatttccaaatcaagacaaaagctgactttctctaacataatatgttattaattttaagagttcgttattaggtatcatctctggagtaaataggatgtctatgcattttttaaaatctatataatttgaggttttacaattttaacatataagtaatccctcaagtatgtattgtacgctttagttgtccacatactttcacatcagttatttgagaaattgtatataatcagatggaaataaatgagggagtttttttggatttttttttaatccaaactttgtactgcaaatattataagcttatcactgtttttctgccttgattaaagtaactaaatgtac

SEQ ID NO: 272623 - DNA, 596 bp, Homo sapiens
ctgaagggtcctatatatagcatataataagtgttcagcaaacatttattcaactgaatactctacgagctgaccttacatggtctgaggtggagctctgggtcaaagccattctcctaccctgctcaggagatcactttttgctccacctgggcagtggtcatctttatcaatacacaaagaagtccactgataaagagggacttcttcaactctttctcaaccttttccttctaagaccaaggcttgaataggatgggctccctggagtctaagtaataagtatttcaaatatctttactgtaacaaatcttagtatctaccagaagctattctgaagatgaggaaacaaaagtactggcaattcctgacctgaatgccaggttaactcaagggaccaatcgactcccagtacaatagaaactgcaaagccataattttaactcttattatgatacagaaaggaaaacaaaagaatggtttatttaaagactaaaactgcctattttatgaagtcactgtttacattgttggaaactcaattttgcagtcctctaaaacaagttttttctccagaccacttaaggtaaaagaaa

SEQ ID NO: 272624 - DNA, 263 bp, Homo sapiens
gtaattttgttaagcagtaaacaacgtggaagacaggttggtcaggagataagcagttgattccgtgttttttgaagagaacttttatgatagtaggaagaggagggcagtgctggtcctgtagtgcagtcgtgtagtactgtttgctgtgggacaagaggaaggaacagactggcaggaagggactgcagcatggaagggtgctaagtgcgtcactgagtgataagggtgctaagtgcaggaaggcccactggatgggcagg

SEQ ID NO: 272625 - DNA, 395 bp, Homo sapiens
ttttgaagtattttgattaccactctacttgtgtgaataacttttattttccagtgacctatggttttattttgatctagttttttgaaacttttgacatctttgtcatgttcccccaggatgaaaatcctaaattaagtctttttgtattaaataattagacttatttggcagattctttgtaaagtattatcaaatgataattgatactagatctttctgttacaattatgggtacattattgacataaatgttccaaaacttatataaatttacaaaaagctaatttgttatcagtcataactttgattactatattaaatcttaagttatatttgtaggggtatgttattaatgtgaatattctaaagatgatataaaatttatgaaagcc

SEQ ID NO: 272626 - DNA, 432 bp, Homo sapiens
aagacatgatggccatgaagagggaatacaaagatgatttcatgtgtcaaatttctaatgagctcctactatgtgttcagcctagggatacaaatacatggtccacagctggaaagaaaatgacacagaatgggctgggtgcagtggctcgtgcctgtaatcccagcactttggtaggctgaggcggtggattacctgaggtcaggagttcaagaccagcctggccaacatagtgaaaccccatctctaccaaaaatacaaaacttggccgggtggggcggcacacgcctgtagtcccagctactagagaggctgagacaggagaactggttgaacccgggaggtggaggttgtagtgagctgaaaccacgccattgcactctagcctgggtgacagagcgagactctgtttcaaaaaaaaaaaaagaaaaa

SEQ ID NO: 272627 - DNA, 1185 bp, Homo sapiens
gtgtcacttaatgggatatgttctgagaaatgtgttattaggccattttgttattgtgagaacattgtagagagtaccacacaaacctagatggtgtagcctactacgctcctagactatatggtatagcctattgctcctaggttacaaacctgtactgcatgttactgtactgaataccttcagaaattgtaatataatggtaagtatgtatctaaacatatctaaacatagaaaagttacagtaaaaatactggcatcaaaactccgttagatcttaagggaccactgttgtataatgtggtctgctattgaccgaatggtgcatgagtgtatatgatacctcatgagtgatttaggaaatcttctgtgatgattttgagtatacattatttcactgtcgttatctttagttcctaacatctcctaaaatatgccttatgtactggaatcttgttgcattctatacttaagtaagttatctggaaacaagtacaaatatatgttctcattttattttattttgaactcagggtctcactcttttgctcaggctggagtacagtggcacaaacatggctcactgcagccttgacctacctcctgggctcaagagatcttccccatcccagctcccgagtagctgggaccacaggcctgtgccacaatgcttgaccaatttttttaaatttttgtggagatcgggtcttgccacattgtccaggctggtattgaactcctgagcttgggtgatcctcctgccatagcctcccaacgtgctgggattacaggcttaagccactacatccggacagtgctctttatttttaattgaagtggtttaatctctcagcagcagtctttcctaaaataattgcaagacaaaaacaaattctcaaatttgatggcatgaagataagaatctatataatcttaccaaaatctattgaagataaagaaaaaaaatcattcagattgctgattgttttgattttgttgattttgggttgccaaattgtcagtcagtcacctatttgtcttgccaaagacaaaatttttttttcccacctaaccctttccccaagcatcttaaatcagttagtgattcttttggtattcattagtcaaaaatgaagatgtttaaggggaactaccttgttactgcttcacatggccctctttgta

SEQ ID NO: 272628 - DNA, 467 bp, Homo sapiens
agtgcctggctccatccagggtctgaagcatccgaggcggaaagaacttgttccccagtcctttgccagcgtgcgcccccacttagtgcggaagcgtccgcggacgcctcgcagcgaggcgtcgccacttagctcgcccgctcttggggtttctctgactgttgtttccacagaccccaggtttcttttaaaggcttgttgactcactcttctcattcctttcatttcccttccagccccttataaacgagcttctgtggtttccaccaaaaatgcccctgtgtgtctgaattctggcgacactcacttctcccagagtgttctgcaacgcagtttctaatgcgcccagagctaagctttgcgggagtgccttttgaagaaacgagcgctgaaccttctttccacctgtcccccaagttttctccatgggtctttgggtgttggaataaaacccaaactggacaaag

SEQ ID NO: 272629 - DNA, 299 bp, Homo sapiens
gtgtgtttgtgtgtgtgtgagagagagagagagagagaacttccaggcttccagttccctcctccagccacattcaatttcttcccatccttcccatctctctccttgaaagtcccagtggggaaaggtgatctcaccaggcttcaagctgctgcctggatggctctgagcagggctggctgtttcaccccaagctgagcaccatctgatcacctagaggcagtgctggggcaggctgagctctgacctgtaggagggatgctgacagtggctatgtcaagatgggagcctggcttctg

SEQ ID NO: 272630 - DNA, 339 bp, Homo sapiens
ttttttttttctcctctagcaacgccagcctgagatagctaccccagcccgagaaacacaccacttctcagtactaatttctgtcttagtctgtttatacaaccatacgaaatacttgagactgggtagcttataaacaacagaaactatgagttttgaaggatgaaagtccatggtcacagttctggcagattcagtttctggtgaaggcctttcagctgggaggccttgtgccttgcaaaagggtgccttttagctgtgtcctcacatggcagaagggaaatatgctatgtcctcacatggtagaaggcagaggggcagaagggcctgaactcattc

SEQ ID NO: 272631 - DNA, 967 bp, Homo sapiens
cactagaagctcttgggagcatgtggacagttgtggctgctcctgagctgacactaactgctcatgactcctctgtgggagaagtaggtggtttcctagaggaagaagtttgggtaatgaagccacagagatttgctgatacatttgctaggcacgacttctggtcatttagaaagctattttgtggcttcatcaataaggtattccccagctgtgttactccttcgcatgttatctctttccctggaattgaaggcttcctggtctgaggcaaggacaattattccctcactgtcaaccctgatctctggctgcagtaatgagtagaggaaatgaagaaataagaatggaagcataatcatttgtccgaggtcacagagggagatgattacacagctggaatgtaagcctcagtactttactgaatccttggctttgtccatgggcccagctacaggcataaagcttttctcttccccagcagtgacttcgagtaccagctttcaaatttatttgacattgaatctaagctttgtgaccagtatgtagaaggagaagaaggggaggaattacttatcctttggcatacattagcatgcaaataaatcctttctctgcattgtggaagggtctgaaattatcacatatacaatgtatcttttatcaatggccttgcatacaaattttactttgaagaatccagatttagaggtcttctccaaacatttgcattgtttctttttcttaggatcagaacttctacctattgtcattttaagaaaaaagatcatgaattaattaatttattcattatttacacccttatattctttcccaaatgttttaatgtggcttacattgtatacatgtacacaataaatatttatatttaaataagttataatcacagaatgagaatattattacaaccactcatactcattcaaatagcttgattatatcattg

SEQ ID NO: 272632 - DNA, 999 bp, Homo sapiens
cactagaagctcttgggagcatgtggacagttgtggctgctcctgagctgacactaactgctcatgactcctctgtgggagaagtaggtggtttcctagaggaagaagtttgggtaatgaagccacagagatttgctgatacatttgctaggcacgacttctggtcatttagaaagctattttgtggcttcatcaataaggtattccccagctgtgttactccttcgcatgttatctctttccctggaattgaaggcttcctggtctgaggcaaggacaattattccctcactgtcaaccctgatctctggctgcagtaatgagtagaggaaatgaagaaataagaatggaagcataatcatttgtccgaggtcacagagggagatgattacacagctggaataaactctcctccttcaatacctgactacttgcaccatccagcagatatcctctactaccaagtctcaacagatggttcagctggtctttaatgaacaaaaggcatttgtgtaatggactcttattgctcaagaagaatttcttccttcctgaaacatgaggagaaactgacaaaaactgtctccttgaccaaaccctagtcagttgcctataagccctgtaggctgtgaccttagtgtctatccttatcagacacgcattacacaaccatagcaacagtcttgctaagttggtttaaccagaacccctacccttgatatctgatttaatttataattcccctgagtccccgaggtgacatccattcatcctggccagctttcaataagaatcctattggattatttagctagaaatcaccccttacacttaatgcttccttttagtaattttgcatccactaaccccgacttgctcgttggtataaaatcacaagttgtccgtgttgtgtttgggactgattacaattcctatattgagggtctcttttcccatattgcaatagttcctggattaaaatctgcttttgcccattga

SEQ ID NO: 272633 - DNA, 864 bp, Homo sapiens
tatatagtcacagtgcctgtaaccacaccaggaagttagtattgccaccaggcctcacactgtgtgcagtgatgtttcacaggctcacccactgtatatagtgatatttctagtccccttcagtcaggaacggtcccttgcctttctgtctttcctgaccttgacccctccagagcatgtggccgccccttaggctgtctggtatttgctggtgactaggcccagcatgggctttgttgggaggagcaccgtagtgggacacctggtccttgccaggtgcccttttatcaccgggttaaaaaggtgccggtcaggtttttccattgtaaaataattactttgtgcccagattaaatagtaatgaggctgggcgtggtggttcatgcctgtaatcccaggactttgagaggctgaggtgggcggatcactggagctcaggagtgtgagaccagctcaggcaacatagcaaaatcccatctctaccaaaaatttaaaaataaccaggtgtggtggtgtgtgcctgtaatcccagctacttgagaggctgaggtgggaggattgcttgcacccaggaggcggaggtggcagtgagccgagatcatgcccctgtactccagcctaggctacagagagagaccgtatctcaaccaaaaaaaaaaaaaaaaattaatagtgagtgcctgggcaacatagcatgaccttgtttctactaaaaagaaaaacatcagccgggcatggtggtgttggtcccagctacttgggaggcctaagtctaggaggttgaggttgcagtgagctgtgattgcatcattgcactccagcctaggcaacaggatacgatcctgtctcaaaaaaaaaaaattg

SEQ ID NO: 272634 - DNA, 377 bp, Homo sapiens
aggctggagtgcattgacgtggtctccgctcaatgcaatctccactccaaggattgaagtgattctcctgcctcggccccttgggtggttgggattacaggcatgtgccacccacccggctaatttttgtatttttagtcagagagagaccgtatctcaaccaaaaaaaaaaaaaaaaattaatagtgagtgcctgggcaacatagcatgaccttgtttctactaaaaagaaaaacatcagccgggcatggtggtgttggtcccagctacttgggaggcctaagtctaggaggttgaggttgcagtgagctgtgattgcatcattgcactccagcctaggcaacaggatacgatcctgtctcaaaaaaaaaaaattg

SEQ ID NO: 272635 - DNA, 309 bp, Homo sapiens
ttacaggtgtgagccactgcacctggccttttcttccaaaacaatgcaaattcattgcccaaagacttaaccagagagagaccgtatctcaaccaaaaaaaaaaaaaaaaattaatagtgagtgcctgggcaacatagcatgaccttgtttctactaaaaagaaaaacatcagccgggcatggtggtgttggtcccagctacttgggaggcctaagtctaggaggttgaggttgcagtgagctgtgattgcatcattgcactccagcctaggcaacaggatacgatcctgtctcaaaaaaaaaaaattg

SEQ ID NO: 272636 - DNA, 353 bp, Homo sapiens
atagctacttggtattgggcttaagtcctgggtaatgaaataatcaatacaacaaacccccatgatgtgagtttacctatgtaacaaacctgcacatgtaaccctaaacctaaaataaaagttaaaaaataagataaaataaaatgaaaatattacctaccaggcagatatacggtgaatatttaacaagataataatgtatactacttagtaccttgaaggccagtttatatttgaaatatagttaacttttctccaccatcagctggcatgcctaaattgtgttatttcaaatgctggttttcctgggtactaatagtgctgtatataaaatgattccatggtcaaataca

SEQ ID NO: 272637 - DNA, 174 bp, Homo sapiens
agctcctgggcaagcacaggctctcctggggcctcagcccgcgaccccttgtaaggtaagaggtgactactgccctagataatatcttttttttttaaattaaaaaattgtttttagagacagcatgaaggcccttcgtggcatgatagttacacaaatctatacatgtgatta

SEQ ID NO: 272638 - DNA, 416 bp, Homo sapiens
tgtgatctaagagtgatttgcctgtcaccattgctttcaagatatactccagaacttgaaataaaggttccttaaagattatctttcttggctgggtgtggtggctcacacttgtaagcccagtgctttgggaagtcaagtgatcctccctccttagcctcccaaatagctgggactgcaggcacgcgccaccatgttggctagtttaaaaaaaaattatagagatgggagtctcactgtgttgcccaggctggtctccatctcttgacctcaagtgatcctcctgccttggcttcccaaagtgctaggattatagccatgagccactgcacccaaccgaatttgcttttattaccttctccaaattgtgaaagtaataggtgttcattgaagaaaaatagaatgtaagaagtttt

SEQ ID NO: 272639 - DNA, 452 bp, Homo sapiens
gatgattcttcctaaaacgtaaattggatcatgcctctcccccaacagtctcatgcctatggaagggaatcctgtcccccaaggggttctccctcctgtctcctccaagaaccaggcagtgtggggtggggcagcaggacccagggtctcagagctggggcctccccagcctcacttggggcctccaaggctaagttctgtgacctccagggcccaagagtgagttcctctggctgctccagaaagtgaagagagaagagccaaccccggctcgggccacgagccccgaggcactgaccacagccagagcaggcctgctggaagctccgtccctgctgcagatccctgcgccacatgatatcagcaattgctgcaatttcgccctaagtactcttgtttcccctaataatccacgtttcatctccacaataaacattgttagaactcttaaa

SEQ ID NO: 272640 - DNA, 384 bp, Homo sapiens
gagacccagcgttctctgctgtcagtttcctggccctttgcttctttatatcacctcaaactcaccttcaaaaaggaagtaaacaagaaagtcagaatatctatcatatggactacaatttgtgagaaaaggagagcaaaagagagggcctggtggtcgctttctaccccaaagagccatatgcactgagaacggctgagaacctcctctgccaacccagcagcagccttcctaacaccttgtgtttgagaaatgagagacctactgtttattatcacaggtccaggtggtaaaaatccaaagtttatccaagcagatatcttcaatcgtaataccaaatgacaataaattgaggtaaaatgttgctgttgcaaatctacaaat

SEQ ID NO: 272641 - DNA, 284 bp, Homo sapiens
agatgactggtttccctaagctgccaacactgtgattatctgagtgtcaatgacccataggcagtcacagtggtcccgagagccccgtccctgatgcctgggagctctcagtctagtgaagtttggccttgcatatttatagtttatccactctaacatctgggaagtgaagactctggttgctattccactgctcctagccccacactttacggctgttctgatttcccttctctgaagctcttgttcactgaaaggatatcagctttttgctacacccctga

SEQ ID NO: 272642 - DNA, 456 bp, Homo sapiens
gacccctctccttcttgcacccttttctccagcttccctggtttccctgatgttccttaaatgtgacaagctcactcctgccccagggtctttgcaccattggttttcctgcctgcagtactttttgcagatggccccgagacttgcttcctcattttttcagagttctgctcaatatcagcgtctccataataccttccttgactgccctgttatcaatggcaaccccatgtccccagagcttcctatgcccttaagctgcattttaaaatttcacagcatgtatccccatctcattttctatattcgcttgttcgtttattgcccatctcaccggctagaacctgagttccatgaaagtgagaactgtatgcccagctcacctctgcagctgggaagaggccctgctaaaggaatgaatgagactctgctcaataaatatttatagattaaacc

SEQ ID NO: 272643 - DNA, 302 bp, Homo sapiens
attaagttggtattaaccttgtcttttcagatgatgccactgaaaggtaaacataccattctgacatgcatgaaaatgaaacgacaaattgatacacgcagtgcttggaatggatggagtccttctaatgagtgattacctgtggtataactatattgattgtgtttgtacatgtcaaatggggctggcgaggatgaacttgaagaaatcaatcttggaacctgctaggacagcagcctcctggtttcacagtactaaatcatgacttcaaaattttgaagtaaaagaaaactgcaaaactt

SEQ ID NO: 272644 - DNA, 241 bp, Homo sapiens
tgagcaggtgtatgtaatttgtgtgagcatgtgtgtgtgagtaggcgtatgtaattgtgtgagcatgtgtgtgtgagtaggtgtatgtaatcatgtttgtgagcatgtatgtgtatgtgtgagcatgtgtatgtaatttgtgagcatgtgtgtgtgtgagcaggtgcatgtaatcgtgtatgtgggaggtgtatgtaatcgtgtgtgagcatgtgtatgggtaaacgtgtatgagcatgtg

SEQ ID NO: 272645 - DNA, 420 bp, Homo sapiens
gtacatggtagctacaggaaagtagttttttcatcagataaacttagatttgaatcttctggttatgacctgaggcatgtttctaaactctgaaagcctcagtttcttcctctgtccagcagagatagtaattaccttttttggggtttttggacaattaaatgagatacaacctacaaaaggttgaacacaaggcctgaggtgcccaaaactttaagtacatatcatgggaaaccagcgcccttgggttgaaggaagtctggcccgtgggttcctctgggtggacttgccacggtgctttatatgtacaatggaaagagagtgtctggggggccaggggagactttcttatgacttgcagaagttgtgtttggcattatgataagcttttcagtaataaaaccaaaatgcctattaaat

SEQ ID NO: 272646 - DNA, 301 bp, Homo sapiens
gaaaatcattggaaactgttgaattagatgtcctagctctaaaaagttctattaattattaattatacctctacactgagtaatttatagtaatagcttgaatgaccacattcagataatcctgggctatttaaggtcatgttgccaaaaaaaaacttaataggaataattattaaagatgtaattatttgcatttcagttcctgactagctcttacaatttggacatgtgtaaatttcagcttttaaattttggtttgtgtttgaaaaataaaagcatttctcagctgaactattaaaaa

SEQ ID NO: 272647 - DNA, 445 bp, Homo sapiens
cacttcctggctgtgtgagcttgggcaagtcacttaccttctctgtgcctgtttcttcacatgtaaaataggctattgcacggaagaaacaagttggtatatttaaagcaattagaatagtccctggcatggaggcagggtggccgtgctggggaacatctggcattgtattagggcggccctcagctgtggtgtggcagcctctgggcagcacagaatccaatcctaaagggccaccctggagtgattgaggaatccaggctggaaagtagcagcaggaatgggggtgggggtagacagggtcaggctcctagttagtctctgtccttcctactcttaggccttggtagaatctagatgcattaattcaaggaatatttattgattaggtgccatgtgccaggatgctctaggggctggggaaacccaatgggaaaaaaaacaa

SEQ ID NO: 272648 - DNA, 476 bp, Homo sapiens
ataagacccatgtgcagatgtctgaggaaatgcttcttgtttcaaggatcccacagtggggctgcaggggcttatctactctccctcaaggcagggagaagctcagtgtccccaggatgtggaatcacactcagccctacagggactggggagcccaaagtatctgcccactttgggtccagtctcctcccgtgggcctccaagcggccctccatcatgcaagcttcgctctggtcttgcaccctccaagaagtgcttgccagctccctctgttcttctgtatcccccaaagcacccattgcagggtgggggaaacagcatgtgatcaggaaaaccttactgtatggtgtgtaaataggataccatggtctggaaaacccaatattctgtttaaaagtgaaagagttactataaaggccatatgtcagcttccaattttcaaaagacaaagaaatacacactgctaaagttcagtg

SEQ ID NO: 272649 - DNA, 293 bp, Homo sapiens
aaagaaaacttcattaattaaccactttcgtatgtaatatcacaatcttattctagcattcttctcttaaagtgtttacgggccaggcacagtggctcacatctgtagtcccagcacttagggaggctgagggaggattgcctgagcccaggagtttgaaactagcctgggcaatatagcaagatcttgtctctactaaaaatttaaaaaatcagcagggcatagtagtgtgtgcctgtagttgcatttacttgggaggctgaagcaataggattgcttgagcccaggaggaa

SEQ ID NO: 272650 - DNA, 365 bp, Homo sapiens
aaggggtctaacccagatgagatgattatgaaacaaaaaggttccccaaggtggctcctatctgcacatcattttgtgcctgaaggagttatttaattctgtcttgagctggcaaaaggaatgttccaggctttagtgatgatgaaagggtggaagcatcagtttaaataactccccttcctaaggtatataatgtgcctttcacggtgtggagggaatttgtttgtggcagttgttgtttgggttttagtttttaccttgttttcatttcggtgtctttagttttcatttttctcatccacaactagaaatctctcaaataattgtcttccctgaataaattcatcaggcttttgcagctattc

SEQ ID NO: 272651 - DNA, 285 bp, Homo sapiens
ctcactggagccaaaccatgtggcagaaactcctgaaattggtggaaaaagtggaatatggcagattgggtaggtaggagaacaattttggagattttgtttctcatgttaaaatgtctgcattttatttgctgtaccctgcctactctggttttaaggattttttgacttctttgaaaagcactgaataatctcttttccaggtctagattttttgatgagtactgtgtaaaattgtcaatattcaatggattatttaataataaattaagaattacactcata

SEQ ID NO: 272652 - DNA, 518 bp, Homo sapiens
atttaatcaatttcatgacatgttaaaggtagtgaaccaaaaatctatagcatatatatttcaaagaaatgaggtggattgcctttgagattgtgcaaaagataggatgtccttcgttgctggaaatgtttaacatagcattggaagttctgaacatcactctgcgggcagaagaaaattaaggctgtgtaaaatgtaggaagacagatagtgactgcagatgaaataatctaaatactggacaagactgcagccactgcaggcccaaagcctgggtttaaatccaagctttgcactttgaagctgtgtggtcttcacctctcccggtgtctgattcccgctctgtaacatgaaataaataagaaccaacctccagatgtaaataagtgaacacatgagaagcacttagaatcgtgcctagaacatagtaagcaactcaatgaatgtcatttctcattacatttgttaatgtttttatccagcccaatggcagtaaaacatcaatgctcaaagagccc

SEQ ID NO: 272653 - DNA, 361 bp, Homo sapiens
agtcggtttaactcccaaagactagtttctttcctcctggagattaggaaatcaacagaatggcctgtttcagcttacataatcgtggaaccatagaattttaggaatgaaagaagctttgcgatccttggtcccaactcttacactcaggagttccaagaagtttaggtgacatgaccaaggttatacagtaaagcccatgtctcccaccccatctttcctccttttccctaggaaacaaatggctttctaatacctcacattcagagttgattttcttttatacccgtttcctcaggttccctttgttctgaatcaatgtctaaccttttgggaaacaaacacctttctggaatggaag

SEQ ID NO: 272654 - DNA, 407 bp, Homo sapiens
agggatctgagccacagagaggttaggtaacttacccaaggctaaacagctggcaacacaggaaatcaggcacttgaggctgtgcacctaacctttgcactcatcaggcagagaagacttccagccaagaggcctttgtgggccctcatggttgtacaaaccagagtttgctccacagaggtgaattcagcctgctgagcattaaaaggaagtgtttcttgcctgtttctccacctacctccactgaaacttagcaattcccatccgtcaaagtgatttcctctcctcccaaccctcccttttggatgtccagagcagctgccaggagttaaacccctttgggagaaatcaaatgctcactgttgacaatttatgatgaagtgttgccctctccaaatcaactactg

SEQ ID NO: 272655 - DNA, 312 bp, Homo sapiens
tccttatgcccttagtgtggactctggacagagcaatggactaatgagggcgttgggattctagtccgtgctccgtcacgggtgagtccatactacaggcaaatgtatctccctgggtctctctggtctgcacactgaaggggctgcactctatagcccaagcctccacggctccagactccttgaactgaggctgaccgaggcgcatgcacgatcgaggggctcgagcaccaagcgcggctggcccccaggatcggggtctcgcggcacaaagggcgacagggcagccaggccgcgcccacgccccgtgcc

SEQ ID NO: 272656 - DNA, 218 bp, Homo sapiens
gattgattgtggagccctaattaccacggggacaatcctactggcagcctctgcctgagtttcagtccaaagcaaagaactctcggccgagtttagctacatccagtgtaatcttggggaggtctctgtgtatgtttgagactcggtttcccagtctgtgaaatgcgggtactgatgacacctgtcctgtaagggctgtcgccggactgtgtgctggg

SEQ ID NO: 272657 - DNA, 270 bp, Homo sapiens
actgagtgggggaagccccactcaggatagtcttgaaaggtagtggcaaggggaaatcctcccagcaagtagtattccaggaagtccacatggtcagccattttgtgtggaaagaagaagtggcctgcagttagatagacacacagggactcatgggcagtgtgatatatcttggccaggggtcttcgaaggtgaacacttgagaagattggtgagcaacaagggctatgaacatatggaaataaatgaacttatggaagtgagcacaaa

SEQ ID NO: 272658 - DNA, 431 bp, Homo sapiens
ccacggaagtggggcccgtatgattctcggcagacactctcgctcacacacaggccgcaccagcacacgctgtattctaaacctcctacagccttgagaatccttcccttgaaaagcagcacgatttaaaaggagctcccaaggccgggcgcagcggctcacgcctctgatcccagcactgtgggaggccgaagcgggcagatcacgaggtcaggagtttgagaccagcctgaccaacacggagaaaccctgtctatactaaaaatacaaaattagccaggtgtggtggtgggcacatgtaattccagctacttgggaggctgaggtaggagaaatgcttgaactcaagaggcggaggttgcagtgagctgagatcacgtgactgcactacagcctgggagacagtctccatctcaaaaaaaaaaaactcc

SEQ ID NO: 272659 - DNA, 276 bp, Homo sapiens
cacgcctgttatcccagcactctgggaagtcgaggtgggtggatcatttgatcaccgttctgggattacaggcaatgagccaccacacccagcctgaacaagtcacttttgatgctaccatttccatgtttacaaagtgaaaagtaaatcagtcagagtatattagttgcaaacaacagaaacaactctagctagcctgagagaaaaaaaaggtagagggttagtctcctggagagatttggggacctcaaaggaaagattatacaatgtgcctcc

SEQ ID NO: 272660 - DNA, 407 bp, Homo sapiens
gcctctacagaagtttctttacaaattgtaatgtgtaggttcgtcctttatttctttcttatgaaggtgcacgaattggctttactttctggggttgaattttgtataaactcggttgaggaggcttgtcagtttcccttctaacagtaaggtgcttgattaatgtgagagaaaaaaattaatgttggtcattttcagttacaataccaaaattttttctgcatactttactctgagttacttttatatttaatttgaaaggccattgtaggagataaattatcacattttaagttactgtaaatcaatagcttaggtagaaattcatttagtcagatccttcagatattctaggaatttccccttttcacctgcacttcacttctgtgaaaaataaaccgttcatc

SEQ ID NO: 272661 - DNA, 284 bp, Homo sapiens
acaggcaccaacttgggccaatgccaggccacaggtcagactcccaggcctgggactcctctgcccacccacaacaaccactgatgctcctcagcaagagccaacttctggctatgaacgcagcagcacccaggatacagcaaggtgaatgctaggcactcgtcccacagcctggggtgtaggggaggtcagagatacacacaaatcaaactctctcctcactatatatatatatatatatatatatatatacacacacacacacacacacacacacacacaca

SEQ ID NO: 272662 - DNA, 443 bp, Homo sapiens
ctgctccttggctatcccaaccctcttgaggcacagggaaatcaattcccctttctgaaaggcaacatctaccagtaatttctggggactccagtagaaacataccggtctccccaaagagaagagactagataaatacagccaaactaagacccgtggaaaggtcccagcggaagagggaatcgtctctgttcgtccgcccccaggaggccagacttgggacctgtcacttggaaaattctcttgatctccattccccttgtgagggcgggcccacagaagggcaaaccgtcccgggacgtgcccccttccctcgccacctgccagggacagcttcgaacgaggcgggaggacagatgcctacttcagtgttgggaagggaaaggggaaaagaaagatgcaaggacctaagccaaggcgcaaagtccctcagattgcggccg

SEQ ID NO: 272663 - DNA, 369 bp, Homo sapiens
gagctcaggtgggcttggagttgacctgtgatgaagctcgcccctgtgggtgtgaggtgtccacaaggcttcctgtcactgctgcatgtgatctgtagctggttcgcctaggctatgttttgttttctgtattttttttacatcctaagtcttaacttttctttgggatgaaaacacctttgctatctatagacacacttacctgtgtatttggtggcgaaggaaagaacaccttatgtttcttccaggtgtcttttagtcccaaaattcacaaaaatcgcctagtgctaatgtgtctgtcacttgaaagaatattgcataaaatgatttaacgtgtgaagattttaaataaagatcttgttcatgaaa

SEQ ID NO: 272664 - DNA, 406 bp, Homo sapiens
attctagatttcataacttggatatgaaactgtacttcccagtctccaaaataagcttcactgttttctggaacgtgaattagattcagaaagccccttactgcctttagattattgcagcctccccagtgggccccagggatccaggaaaaatatctttgtttttcacctagtcctctcctcagcttttagagggactcttagatctatgtttatgaaaagacttttattagttcttatagttgtagtaatgcatgtttattgtagaaaatttcaaaaatgtagatgaataagaagaataaaacaatcactcagtgtaaaaaacaaaaaaccctgaaaaagtaccattaatattctggagtatatcatccagctagttttagctgtatatacatagagccaaaaa

SEQ ID NO: 272665 - DNA, 144 bp, Homo sapiens
actggcatcaggcactgtgcatatattgtcccccactcaatcagagcatctgtgctattaatatttgctcttttttgtttgtttgtttgtttttggtaaaaggtctttattttttaaagagatccgtaataccaaaaaaaaaaa

SEQ ID NO: 272666 - DNA, 350 bp, Homo sapiens
ctcagttggcacatctataaagtggggctcatcacgccttcctcctagacaggcctaaagctggaatggtacaatgtgcagctgccaggcacattgcacagcatctggcctgtccctagactccttcagttccccctttagctgtggaggagagatggccaggcagaggtgggtggcagggagagaactgagaagccccaagctgaagggaaaacgggggagtccttggtgtccctcccttaccccctccttccatgccaagatagttgctccctgttggtttggagtcagttgcttatctgactctaaaccttcaaaagcctgggtaatgtaccaagaccccatctctt

SEQ ID NO: 272667 - DNA, 500 bp, Homo sapiens
ataataaatattagaggagaaataaatcaaatagagaattaactattgaaaaatcaacaaaactaagacatgatttattgacaaaaaaataaacaaaattctcaaatccttagctacagtagctaaggaaaaagaagattcaaataaaatcagaaatgaaagagaagacattacaaagatgcttcacatagaaaaggataacagataaaattatcaacaattttgtgccaacaaaattgataacctggaagaaataaataaattcctaggaacatacaatttaccacttctaagaagaaataaaaagcctgaatagaccaattacaaataaaaagattggggtagtaataaaaaccttttaacaaagaaaagcccaagacagccaggtgtggtggctcatgcctataatcctagaactttgggaggctgagggaggcagatcacttgagcccagaagtttaaaatgagcctgggaaacatggtaaaaactcgtatctaca

SEQ ID NO: 272668 - DNA, 519 bp, Homo sapiens
tcctttcaggtccatgaagctgattgcttttaaatgtaggtcccttaggagatgacttcatctcaatcttccaatcctctcattttatatatagagagaaacttagtctcaccatcttttataattttctacagaaattaaagtttctcttctgaattataaagtcatgataaaacgtatcttccaaaggacgtaggaattgatctgaaatttcatcaaaagtttatctcaaacgttaaatcatgatcattctggggcacttccacattccagatctacaagtgtcaaagctaagggaactgaacaaaatatatagaactgtatatctcagaaaagagaagtagcagcagttgacaggaagagcaacatcctcaattttcaagatatttacaaagtttgtgtgtgtttttctcttcctaagttccctcttcaaagaaaattattcctccccagttccaataaacttttgctgaccagcacaacctgtccacctttgctattaaagggacaaaaagtaag

SEQ ID NO: 272669 - DNA, 400 bp, Homo sapiens
aaagcagatagattatggcaagtgcacacctggctaccagtgctttctgcaccaggtcctcaagcagggaatgaagagtcttagaaccaatggattccactcctttggatgacctcctggatgactggctccaggccctggagccctcagaatatggatggagagggaaataagcagtgcaagtttgtagacttggtggctcctgcctcctcccctccctggctcagtgaggacgacccccgccactggctctactttccagctgatcacagctatttacctgtcccagtcttgagtaaggcacaaaatatttacagaaaacagatgtctttcagaggacttgctgctaagtgtaatagtgaagattacttgcattactgctactttccaatcaattaaa

SEQ ID NO: 272670 - DNA, 442 bp, Homo sapiens
ttgccacaggattaaaatggtccatgttttagaagcattagttttattctttgatgagtaattaaaaatttttaatataaaaagacacagggatcattgtgagatcaaggtaaagttgacaggaacttaaaagataaatttggttatatactttgaaaggtttcctatattctagagagttactttagtggagaggtttagtttgcaatatgggatattttcagattttaccattcagtaaatagaaaagtaacaattacattggccaattttagtcatttttctgtctcatttgagcagatctgataactttgtatgttttacaaagtgttgtttggatgtttgagttattggtcattaagagataacattttagggaggccaagacggatggatcacgaggtcaggagatcgagaccgtcctgactccatctcaaaaaaa

SEQ ID NO: 272671 - DNA, 367 bp, Homo sapiens
tggtcgagctcttcccagcctagcagccatgagtttcacactaaatcctggcccaccccacagaagggccctgggtgcacacagtcctcccagccaagcgatttggtgacgctgtgacgtgtttcaggaagttcaattttaactctgttcccacccttcgctccaggacttataattctataaattaatcctgagttaattatcccaaatgcaaagatttacatgcaaagatgtttccccaaagctttcacttggtacatccacagatacacacacccacatataaacaaggagtaggtgcaggcaacctgatgcccagcagaggctgattccaacactggacaggatgacctcaggggcatacaca

SEQ ID NO: 272672 - DNA, 398 bp, Homo sapiens
agtgtttgctgttgctgtcttgaaattttaataattttaaaacaaggagccctgtgttttcatatttcattggcccagaaagttctatatgtggttccacggtctggcattatttaacacagctgagcaaactcaatgtttcagggatttcacttctagataaaaacccaactgcagctcatatctatattcaccaaaagatattacagaaatatttatctcaacatattgtctattattcataacaggcaaaaatctggaaacaatcccattttcatcaccaatgaagaaacaaatgaattgagctatattcatacaaagaaatactacacagtgaagaaaattcatagtctagtgctataaattatagtgaactaatatcaccaacataatattag

SEQ ID NO: 272673 - DNA, 401 bp, Homo sapiens
acgcatgcagaatttattgcctttttctggccaaacctgattccaattaggttaacttcctctgttaactacctcctctcctccccaacctgaagttgtgacatgttgtctctgctgtagcgtccagatggccaaagcatggggcagggctgaccctgatgccccatgccaggcccctgcccctagcccctgcagccatctgggtccgtgtggatccatgtgggatctcagtagctgcccccttccagttccccacagaggaggaaaaacgtcagaaaagggaagtggggttaagatggtgcagacgagttagtgggtgcagcgcaccagcatggcacatgtatacatatgtaactaacctgcacaatgtgcacatgtaccctaaaacctaaagtataata

SEQ ID NO: 272674 - DNA, 309 bp, Homo sapiens
gatcctggataagaagctgagaaccatccaagagtcctggtccaaggacacagtgagctccacaatggacttgagcacgtccactccacgagaagcagaggaggaacctctggtgcctgagatgtcccatgacacaatccgacttcagcttaataggaaattgaacattttctggagagaaaagcgctctgggaatagatgagagtggagaagaggaggtctatgcctctctgtgcaatgctgcctgctgcccctggccctgcctgtcccatccccatggctcactaagcccactgtggctccctgtcc

SEQ ID NO: 272675 - DNA, 987 bp, Homo sapiens
aaaggactgtaagatgacttcaaaggcttaagggtaagccactgggcagatgctagctttgttttaggagagagaagaaatcagtttgggacatgtttatcttgaagtcctccagggcatccacaagacaaacacatctgcgggacagagatgccaggatgggcagggagctccaggacagagagatttggtagtcacccacctagagatgctggctgatgctggaagaaaaacgagagcagaggactaaactttggggaacccctagtttagaaagcaggaggaaaatttaagggaaaaaagaacgggacacaaaggagcacaaagcaccttttcaacctgctctcatatgtttcacaactctcagagactaaataacctgccaaaaggtcacaatcagcagtgggacacatgggaaaaaaaaaaaaaaatcaaggactaatggcaatgtgtaacaataaaatatctgaaatttttacccacaaaaatttaccctggagaaataaactggagaaagggggtggagggggtgtggcacataaaaagttttccctctggcattaactctaatagtgaaaaataaaacctaaatttctagctgaggaatagttaaatgtatcacaaaaagccatcataaaagaaaaaatttactacctaaacttttaaaacttcataattgggggaagaacattaaagtaatatggcaaagggtcaacatttattgattgattgacaggacagggtcttgctttgtcacccaggctggagtgcagtggcacaatctcaactcactgcaacctctacctcccagtctcaagcgatcctcccacctcagcctcctgagtagttgggactataggcatgccaccctgcccaactaatttttgtgtattttgtagagacggggttttgccatgttgcccaggctggtctcaaactcctggactcgagcaatctgacctgcccatcttggcctcacaaagggct

SEQ ID NO: 272676 - DNA, 557 bp, Homo sapiens
tccttttcaggacttggaagctaaggcccagagaggaggagaaacttgatcaaagtcaatcagacaatgcagaatcgagaaaagtacctggacctctatgcccatgcttctagcagccagcctcctaaaatacctctagttgaagccaaagttagaatccttctacgaaactacaggattaaaatggaatggttacatgacccaggcttgaccaatcagatcatccaaaccctttgccacagtgattggtccagggatacatgcatgagccagctcaggtaaatgagactcaattataagaattttgttagcgcaattgggaaaaagaagttttctttccatgagaactatcagctataagaatgttggatgcttccatctgctggagtccatgaagaaggtccatgaaaatgaagccagcacaacaacacagagctaagacatacaaagagatggagattaaattgaatggaacttttaagcccctacatgcccttgaagccagatatccctgaacttttaatttatattagttgataaagtccttctttagctta

SEQ ID NO: 272677 - DNA, 535 bp, Homo sapiens
aggtgtctggctttggcagccagttctccccagactgcgtcttgcttcatatgtgccctttagataagagggcctaacaggctaatgggagcctaatggtaagtggggctagactcagactagaaatttggcaggacgatgccccgggatctaggctgttccattactattcccaaaaggggaacaatgctgaatagagatctgaagtagaatcagcctgtccctgggacagggtaaggggagaggtggggagtgagagggctcaagacaaatgatgatacaccttgttcagatctcctcttcaaggtctctgcagacagaaaagtgccattctcggcagcccccgggacagttccacgtcaggctcatccctccctgtacccaccatggcctaaaacgcaggtttgactgtactaggaatcagggatgtttgcactcagctacagtatatctccatagccatgtgtcagtgacttcagcgttccaaaaacctggaaagaaatctgctgtccaaacaaatccgaaatatttgcaa

SEQ ID NO: 272678 - DNA, 309 bp, Homo sapiens
tcgtctgttcattcggcaaacactcatgggctgcctgtcttgtgccaagccctgtgggggccctggggacacaggcatgctccccgcccccaggtagctcagagcaggtgggaggcagctgatcactaccaggctggatgaagtgggcaggcagtgtgagtccagggaggccttcctccccgtcccgtcctggggcgagggagggctctggcagggctgaaggccgactgggcaggagggcatagaaaggaggaacattctatcccctgcgggaggaacaggaggtttccagtaccccctccctctgtc

SEQ ID NO: 272679 - DNA, 147 bp, Homo sapiens
agggtaggggtcccaggagcttgcctggggctgttgcttggagctgttctggggggaggcagggatggggtaggagggcatagaaaggaggaacattctatcccctgcgggaggaacaggaggtttccagtaccccctccctctgtc

SEQ ID NO: 272680 - DNA, 409 bp, Homo sapiens
ttcattttttatcatgagtactctttgtttattactagcattgcaagttctcccctgaggcgcagagcccagaagacatcagcgtggaatgaaaagagtcaaggatggagcccccacaggacttagcaagaatgccaagtaagggctgtataggagggtggccagcacaggccctgaggcctgggaggaaggggaagggcttggaggctttgcagaccctcagactcttgggcctcgagcagtacccgcagacacaagtcctagtgctggaatattgtgcacacatctgctgcagaatgccttgggagccaaaggatttgatgaagctcaaatcagagtagatagaaagcaattatgtttttgcatcctcagctcctgccaccctgcacctccctggggatgcacttgt

SEQ ID NO: 272681 - DNA, 624 bp, Homo sapiens
gtgattctggaatttgctatttgatacaagcaaacgaagagatggaaggggctgttcaccactcagtctgcaagcaagcctgtcgtgcccatctgccaagaggagtccttgtgtgcctccaaaatggcctggtccttaacttgatctgcttggactgattgcaaacagtggcttagcttcctctagaccagagtacattctgtgctcccaaaacagaatgctacacatgggaacaagggaaagggaggctttgagaggtcagccagcaaggcccctgcttcaagcctaaaaccaacgtaattaggtgaagattgagcaggataaggctttgcaaggaacatccctgccacgtcaaggtgatcccaggtacgtgaattggctccttttgagtcttcctacaactcttggaggcaaatagggcgggtattattactctagttctaccaagggagaaactaagttctagaagtcaactaaggaagttatgtaacttactggcggacaggacacaagaaacctcaaattcctgacatctgttccagtttttcccatcaccccatgttgcccttcagcagggcttaagcaaaacagccaacgcaagtcctagcctttccagctgggctg

SEQ ID NO: 272682 - DNA, 647 bp, Homo sapiens
gtgattctggaatttgctatttgatacaagcaaacgaagagatggaaggggctgttcaccactcagtctgcaagcaagcctgtcgtgcccatctgccaagaggagtccttgtgtgcctccaaaatggcctggtccttaacttgatctgcttggactgattgcaaacagtggcttagcttcctctagaccagagtacattctgtgctcccaaaacagaatgctacacatgggaacaagggaaagggaggctttgagaggtcagccagcaaggcccctgcttcaagcctaaaaccaacgtaattaggtgaagattgagcaggataaggctttgcaaggaacatccctgccacgtcaaggtgatcccagcattgcaagttctcccctgaggcgcagagcccagaagacatcagcgtggaatgaaaagagtcaaggatggagcccccacaggacttagcaagaatgccaagtacatcgtgctgtctcctcccgcctccatgctggtgcatatgccgcccttcctccctggaatgccctcgtcttccagaggctgcttcatttgagagccttctctgattcatccaggcaaattaacagataataactgttttagctactaaatattaaactctctcaaggcagggtctata

SEQ ID NO: 272683 - DNA, 359 bp, Homo sapiens
tctacgatggcagccccccttttcattcatgtggcaactttaaaaaaatatttgctctatcaggttttgtctaactcttgcttcctccttaagtcctaggttacatgttcattactcattaacagcttcctggtgcccagactaggttagatcaccctgttctgagctcctatatttgcctttcttagcattcatcacatactcgtagacatttgccatgagctaccttccttgtcagcctgaaggcttcaaaagtgaccctgtctgctgtgttcatcactgtacccagggggagtgtcaaaataacagaggcctagtgagtgctctataattgtttgttgaactaacaattgaatttt

SEQ ID NO: 272684 - DNA, 490 bp, Homo sapiens
agcaactgaatatgaggttagaatgtgaaactgaatttaaaggtgtaacttgggcctgactgaaatatagcaatttagcagaagtgggattaattatgtagccttacctagttgtacacaagatcaggctgggactgaaattctacaatatgactccataccaccaaaagaattccagccctctgagcagtaggaaagagagttttgttttcttgtaaccagaacataaacttttgatagtcataacctttatttcagtctataaatttagatattgatggggttcaaaacattctatccccaaatatggcaccatggaatttgagcaaacggcaaaagtagaaagatcaccctttgactttctcctgccctcctcctctgaaatcaggtcaagagcccctcatttgagaggtgctgtccctatgcccagaggaaagaacatccttatctataaagacacaaatatataaaaaataatctgaacagtagg

SEQ ID NO: 272685 - DNA, 202 bp, Homo sapiens
ctcaatcccttccactggtagcaaaggccctggatccctgtcttctgccaagatggtgccaaatagctcaaccatacaaaggaaatggatataaaacttaattgggacccagagacatctaatctctaagttaaagcaccactccttttactcataaccattggaggcatcccaaagtctagaaaagccgaaatgaccctca

SEQ ID NO: 272686 - DNA, 369 bp, Homo sapiens
gcatgtccacctgcataattatgaccagtgtattgaaagcacatttcatttagttttgcaacagccgatgaggtagattctaccaacattgttttacggaagaacaaatggaagcctggaaaaataaattgtctacctcacacacttcgcaggtggtaaacacaggatttgaactaagacatacttgattttaaagtgtttgcttttcctttgcactactgcatctgcgatgtttgcactcagacactctagaatatttggtgttgcatgtttttgccccaagaaagaacccattaaaatgaaactttccagttcgtaagctttgccctcaagaagggaaagaacttcttgcaaggtttctgaaacaaa

SEQ ID NO: 272687 - DNA, 249 bp, Homo sapiens
ttgtcattttaattctttctttaagaaaagactcgggaataaaacaatggcatttttaagaagaaagacacagtcatcccagggtttaacagcagcagcctctcaaagaggccgtaaacaacaaggctgtctctatccgcccgttgtccggtgtctcggacctcacaggagcccttttcaagcatctatttattggccacgcacattgtggcccaaacaaagctcgcctgggcctaaccccacacacca

SEQ ID NO: 272688 - DNA, 152 bp, Homo sapiens
tggggagcaaacttgattatgtttaaagtcacatacttggagagtttatgattttatgtagtatgagagaactcttctagctagctaacattaatgaaggggtctggacatatgattctaaatttctgacaggtagtaactttaaaccagaa

SEQ ID NO: 272689 - DNA, 459 bp, Homo sapiens
cattattagccccaattttagctgaggaaactgaagctcaaagagattaacttacctattcaatgtccacagacggcaggtagagtcaggatctgaatccaggtctttttaattctgtgctctttttactatatcacaaataaagttcttttatctgcattcttttaaaacatgtttttggatattagagtaatacaaatatcattctagaaaatttggaaaatataaagcagtataaaaggataatgaaaataaaaatcagttgtgatcttgccacctagaaacaatcactgttaaaatgttggtgtatttcttctcaattttttttcaatgcatataatgaaagcaaaagcaaatatttgttgagcacttgctttgttccagacattgtccttagctcctttcttgtgtaatttattttattatcatagaaaatcaataaagtgagtattgttatta

SEQ ID NO: 272690 - DNA, 423 bp, Homo sapiens
gaagctgcatcatctaatattctgttctcacttatttggcaaacattatttgagtgttgctatgtgtcagatacagtgctaagcagggattacactgtgaacaagttaggatcattaggcacaaatccttaaggaggttatactccgatgtatgggtcacaaactttctgttaggggccagacagtaaatatttaagctttacaggtcatttggtctctgtcacaactactcacttctgtcttgtatcacaaaagcagccataggcaatgtgtaaagagataaatgttactctgttccaatacagctttatttatggacacatttgaatttcatataattttcacatgtcacaagatatttttttgtttgttttcccaaccatttgaaactgtcaaaataattcttagcttgcaatctattat

SEQ ID NO: 272691 - DNA, 389 bp, Homo sapiens
atagtgtgcaccagaaagccagtgcccggttccttgggatcttagacacggtatcagaatcttaaactagcagtccagaaaatcctcagtcttcttctatgagatatttccaccattcatggtgtaccccgcatagatgtttgttcctgtactcctatgatacccttcagtgtttggggaacacagcattgttggacctataggggagactacaggtttccaagtcattatctatgtttaaattctgctcccctcagacaagtacttaattctttaagggttcctttaagggattctttaagattactctaagatgcagagtaataactacctttccgggttgttgataatattatcaataaagtgtgtaaaacacctcaaacagtagt

SEQ ID NO: 272692 - DNA, 510 bp, Homo sapiens
gccccacctcccacattggggattacaattgaaagtgagatttgctgagggacacagatctgaaccatatcaagacaatatagtgagaccccatttctacagaaaacttaaaaaattagtcacttgtggtggcacatgccagtagtctttgtttcttgtgaggctgaggtggtaggatcagttgagcccaggagttaaaggttacagtgaattacgatcataccactgcactacagcctgggtgacagagtgagaccctactggaaaaaaaaaataaaccaatattgatccattattattaacccaagtcatattttattcagattcccatactttttagctgatgggagcaagatgcgcgcatgttgcgcccatcagcagaagctcaaaagacagagaatggccataacctagaaaaatctaaaatcgggaaaaactctcccacccaaagagccaaagaggtgggcctgcacagcggcaagtgctgctgtgcacagaagacaggaaccg

SEQ ID NO: 272693 - DNA, 459 bp, Homo sapiens
acatccgagattctgaattcttttatcaggggtgtggcctgtgcattgagagtttttaaagctctccaggtgattttaatatgcaattagatttgagaaccatgattttagacttaaggggctttagaagtaaatgtctttaaattctgtgataatacatcattcataggctattcaggctgtactaaaacatagagaaaaaacaaagacaattattgagttcattttatgaagcaagaacaatcttaataacaaaagataaaaacctttaaaaagacgcgaagctatgatctttttatgaatataggtgtaaaatcacaaaatattataaaaatattttaaccacatattaaaagagtaggctaaatagaatttactttaggaattgaagaatggtttaatattgggaaatttattattgtaatgcctgggcaacagagcgagactccgtctccaaaa

SEQ ID NO: 272694 - DNA, 384 bp, Homo sapiens
cagcaagagcccaagacttgttttgcatactaactttattcctgacttcatcttattttctctaaccttattctcctttacctgattttccttacctaataattttatcatatactaccttgggtataacagtaaatctcataaaatctcttttgaaaaactaaaaaaataaatacaaaatacaaatggaagttaatgtatattataaatagctctctaatttatttgtaatgtgcaattccctaacttctttctaaggcaagcccctacatttattctcttgattccatcctttcccatctcctctgcaccttgctcagctgcttatttgtgttccttttcttatggctgtctcatccacaggatcctccactcagaaatatt

SEQ ID NO: 272695 - DNA, 644 bp, Homo sapiens
gagatgcggccgcttcgccctctgcagtcaagatgctgggcgcgtcgaggactgggatttcaaatatgcgtgcattagagaatgattttttcaattctcccccaagaaaaactgttcagtttggtggaactgtgacagaagtcttgctgaagtacaaaacgggtgaaacaaatgactttgagttgttgaagaaccagctgttagatccagacataaaggtaattaattttgtgtttgatcattagcaaaattattgccactttatacagacatagtttgctctttgggtcccattctgttctgcagaacttgctctctccatggtcctcccttactttaatctggtggttctcaaccagggacagttttaccccctagaagacatttggtgatggctgcagatatttttgtcacaattgggaggaaagggtgctactggcatttagtgggtgaatgacagagatgctgctaaacatctcacagtgcacagggcagcctcccataaccaagagtgatccagccccaaatgacaacagtgttgaggctgggaaaccctgctctaatgcttcctttctattagattactacctctttcctccatgctgcatgcaactcttttgtctctttaaagctaaaacaaacca

SEQ ID NO: 272696 - DNA, 735 bp, Homo sapiens
gagatgcggccgcttcgccctctgcagtcaagatgctgggcgcgtcgaggactgggatttcaaatatgcgtgcattagagaatgattttttcaattctcccccaagaaaaactgttcagtttggtggaactgtgacagaagtcttgctgaagtacaaaacgggtgaaacaaatgactttgagttgttgaagaaccagctgttagatccagacataaaggggatgaccagatcatcaactggctgctagaattccgttcttctatcatgtacttgacaaaagactttgagcaacttatcagtattatattgagattgccttggttgaatagaagtcaaacagtagtggaagagtatttggcttttcttggtaatcttgtatcagcacagactgttttcctcagaccgtgtctcagcatgattgcttcccattttgtgcctccccgagtgatcattaaggaaggcgatgtagatgtttcagattctgatgatgaagatgataatcttcctgcaaattttgacacatgtcacagagccttgcaaataatagcaagatatgtaccattgacaccgtggtttctcatgccaatactggtggaaaaatttccatttgttcgaaaatcagagagaacactggaatgttacgttcataacttactaaggattagtgtatattttccaaccttgaggcatgaaattctggagcttattattgaaaaactactcaagttggatgt

SEQ ID NO: 272697 - DNA, 467 bp, Homo sapiens
ctgtggacccagctacttgagaggctgaggcagaagaattgcttgagcccaggaattcgaggctgcagtgagctatgactgcaccactccactccagcctgggcaacatagcaagacccctgtctgtaaaaacaaaaaaagtggtatagtatctacttggtcctgcccatttagcaagcatgagatgctaaagctctcattatttgttgctaagttctctgtgaatctgagtcagctggttattttccctcttcacagaggaggtatgtgcttctctgtgcttggcagtctgggtgaggagcaaggtggcgaggtgctactaaggccaaatacaaggtctgcctcccttccatgacagtctgcagacatggtttcagggccaggtctgggcactgcttgaaacagtactttctgaaggaaagtatcacagaaggaaactgccttgtaagaataaaaggagaacttca

SEQ ID NO: 272698 - DNA, 461 bp, Homo sapiens
aggccaaggagcaaaaagaagaggtgacctgtagactatatgatcaccaggcaagcaaggggcggggcccaactcatagtcctgcgctcatttaggggtacaagagccttcaagctcctttagtcattcagcttatttatttattctattaaacacaactatattcttaatgtatattattcaagccatacataattagtgggagcaaaaggtgaagtgtccactactctcctctcgatgccacttctgttctcgatgccacttgactaccgcaatgagacacctgaagcaagaggcagatgtgattgagttaaggctcttgagatgggggaattattctagatgctcaggtgggccccaaaatgtaatcacccgtgtccttatcagaaggaggcaggggtggatttaacactctcaccccttttgctcagcattttataaacctatgtgtatttgcacaa

SEQ ID NO: 272699 - DNA, 375 bp, Homo sapiens
cattttcttggagattaacatcaggatcctcttgatttatgcaaatttatgcagccagcctgaatttctccccagaaaatgggtttttatttttttaaccacatggtcaagttgcaaattttccaaacttttaatgtcttctttccttttaaacataaattccaatttcaaaccatctctttgtgaatgcatgtgactgtacacttttagaaactgccaggtcagggcgtggtggtgcatgcctgtaatcccagctacttgagaggctgaggcaggagaatcgcttgaacctgggagctagaggttgcagtgagccaaaatcacaccactgcactccagtctgggtgacagagcgagactccgtctcaaaaaaaa

SEQ ID NO: 272700 - DNA, 225 bp, Homo sapiens
taaataatgagatgaactaaggatattcccctagataatacttaagtgacccttaccccaaaatagtattgaaagaatgtactaccatcattttaccttatttttgagtttctgatactttttttcagagtctcccctcaccaaaaattgttcttttttaacttgtattttaggttcaagggtacatgtgcaggtttgctatatagataaattgtgtgtcatggg

SEQ ID NO: 272701 - DNA, 381 bp, Homo sapiens
gccataaaaaatgatgagttcatgtcttttgtagggacatggatgaaattggaaatcatcattctcagtaaactatcgccaagaacaaaaaaccaaacaccgcatattctcaggatagtattgggagatatacctaatgctagatgacgagttagtgggtgcagcgcaccagcatggcacatgtatacatatgtaactaacctgcacaatgtgcacatgtaccctaaaacttaaaagtataataaataaatttaaaaaaaaaagattacaagttcttcagtgtaagcaaaatatcatggactcaaaaagtcatgagatgtgatcaaaagccaatgagccagaaaaggcaaatatggctgtacaagttgctcatttctgtga

SEQ ID NO: 272702 - DNA, 433 bp, Homo sapiens
ctttggaaaataggaattgctttgcaaaaaatactgagttttcagtgaaaattaattacactataaatctgaaagtaatattttctaatacattttctgtaactaaattttacacttttcacatattttatattttccttaaaaactttccaaattgttgtttttttttctgagtgttgcttaaaaatcatgtttttgcaattaaactaaagagcttctgcacagcaaaagaaactaccatcagagtgaacaggcaacctacagaatgggagaaaatttttgcaacctactcatctgacaaagggctaatatccagaatctgcaaagaactcaaacaaatttacaggaaaaaaacaaccccatcaaaaagtgggcaaaggatatgaacagacacttctcaaaagaggacatttatgcagccaaaaaacacatg

SEQ ID NO: 272703 - DNA, 562 bp, Homo sapiens
tgcttcaggaaggaaaataagcacatgtcaacttgggtcagatcaagcatttcaagagtagtgctcacagactcttagtaagaataaaaagtaaaaaccagaacagaatagttcttacaaaatctaccttcataaaccagaaataaacatgataagttagcctctaatgtaagttagaggcatgcataaaatgcatgaaatgcaactctggttttcaatagtttctttgccttttaaaacaagtctaatgattgaaagccttggcccctttgatttttaaatattgcgctcaaagcgatcatgccacagcgatgtcaaaatatgaaaactaagcatgcataaaacaaaaggtgaatgagaacagagatgtaaattgggtaggtgacttggtcaagtccatagagctcatcgagagcacagccagaagaaagaatgggaaaagttcaagaattccattgttctcactctcctaagattgaaagaatcctaatatgacacaagcaggtcagcttttaaacttaacctcagaaatagtatgatttcaaagacaataatttttctt

SEQ ID NO: 272704 - DNA, 360 bp, Homo sapiens
ggtgatgcaggcactcttttaacttaacaagtggcattactcaaagttgtgcatttgccaggagctctgcccagctgccttcgttgtttggagagccaactgcttgactcctatatgtaaaattctgggggcaagcattctatcttcatctacccccaattcaattaagcacttggccagacattgggcaggtcccaaactcttcatggtgacattttgctcagtctgtggtagggtcatctgaacactcgtaggtcctggggagcgcttcattttagacaatcctgacattctatttatattcaacaagtctgtatcacttacgaaataaaatatatccagagccatagaaggaaaaag

SEQ ID NO: 272705 - DNA, 201 bp, Homo sapiens
aaatattctccatggtcttcatggcctaatggttttaagttatacacacagtatttcacttaaaatattatggaaagcagcacctggagctttaaacaagttacttagtttatatctgtagtttataaatcatgatgtgttaaactttattatgatcttacaatttgaatttaattcttttataatgtctctaggtcctcc

SEQ ID NO: 272706 - DNA, 564 bp, Homo sapiens
agttatgggctgacattcatggtcttgcaggcaaaactcaagttcctaggtaggactgagaagtggcatgagccactgtgctcagcctcagtttattttttactcataaataactcagatttgatttcttcttatgggtttgctggaagtaaaaatcacattcacaaccactgaagccagacatttgattactcttaacaattaacagtattatttattaggaaagtaatgctgtaagagtcagcaaaatggggcctggcttcccggggctttgtcctagtcagcaacttgccttgcactgccctcttcctgccacctgtgtccagcctgagcaagaaaagatctgatgctcagggaatccctcattgggaaaatttaaatatggaccgtatagtagatgataatattgaaattaggttatctttttattagatgtgatgatggtaatgtgataatgtaggtgaatgttcttatttttaggtgaggcgtggggaatgtttccggatggaatattctatgtcttcaacttactttcaaaaaaacaatacagcaagtcctcaaata

SEQ ID NO: 272707 - DNA, 398 bp, Homo sapiens
aaaggaaagagagaaagagacaggaagtcaaagagacagagaaagagacagagagaggaagaaacagagagtcaaagagaaagagacaaagagaaggagtcagagagaaagagggacagacacagaaagtcagagagtcagaaagagaggaagagacaaagaagaagtcaaagagaaagagagatggaagtagtaaggaaaaaacagtgtatcccattcctttaaaagccagagtaaatttctgtctacccagccaaggcatgtttttcttaggtggaacatcaacctatatctgcctccccactaactggacgggcacctgcaccttagtctttctaagtcccaacattaacattgccccaggaaatcagaccttatcagtacccctcaaagctcaa

SEQ ID NO: 272708 - DNA, 413 bp, Homo sapiens
ccctttaataacctgcagcttattgggaagcctctgcttaagtcatgtctagggatgagggcctcccctgaggagtggtgacactttttggacagggttttattgttggaattctccccattaagttaaagccttttatcaccaaaccaaaaggcactgcctcagtgacccttattatgatccataaggcacttctataactttcctaggtttacaataagaacaggagtgtactatcctaattagatattaaggcattagtgttactagttctattaataccattattttgaccaaaatcctcaattccagacagatgtctactttcctcagccatttatctttctcaggctgtgctttcagacaagtatctttatattatatgtagaataaaaagagaattagactaagag

SEQ ID NO: 272709 - DNA, 116 bp, Homo sapiens
caagaaaagggctttacttgcgctggagaagacttccgctcatgcacggccctcactaacttggagctgagctgcttgctgtacacgagctgtgcacccaagtgagcctctgtagt

SEQ ID NO: 272710 - DNA, 652 bp, Homo sapiens
ttgggaatagaatcaggagcccagagccacggagtgggaggatgcacaaataatagcatcaattaacgtgttattgcaagagaaggtaagtgctctgaaggaaagggtcaaggttctgtgagagtatgtaacaaaggaatgctaagagtttcttgcaataactcttagttacaataatttgtggcgcattcttgtaaaattacagcttatacttctgtagcacttgcactttataaagcactttcatccgtattatttcacttgctttggctgcgcaatagaatatttattatgatgatgtcctcttacagacacagaggcttggagaaattaagaaactgggtaagttcctttacaagtaagcggcagacagaatttaaacctaggtctgtcaaattccctacccctactcccattttgggcaagattttaaaaaacaaaatatttcattcacacggaaaagtagaggataatataacttctccaggttaagaaacaaacatcacctatacatttgaaaagccggtatatcccttcctgagggcatttccctccttcctttctcagaggtcaccactttgctgactttggtatttatcaatcccatgcctattttaatactttacatacagcatatatccagaaaggaaaa

SEQ ID NO: 272711 - DNA, 427 bp, Homo sapiens
acttaaacacaaaactccttcgagcactggttctcgaagtgtgatcctcagaccagcggcagcaacagcacccatgacttactaaaaatgtgcattctgtggctgggctcgacggcccatgcctgtaatcccagcgctttgggaggccgaggcaggaggatggcttgagcccaggaggtcgaggctgcagtgagccatgatcatgacactgcactccaggctgataacagagtgagaccctgtctcaaaaacaaaacatattctgagaccggaccccagactcactgaatcagaaattctaggggcaggacccaggaatctgaggggtgtgagtgtgtgtgtgtgtgtgtgtgtgtgtgtgtgtgtgtgtgtgtgtgtttgagatggagttttgctccagcctgggcaacaagagcaaaactgtccc

SEQ ID NO: 272712 - DNA, 405 bp, Homo sapiens
caagaaatgttatttttaaaaacatttgatatatactcagtataacaaaaaatgtaagatgtttctatgtacttttaactgtcatcaaataggtggaatatgtttagtgatggctgtactgctaggggaaaaagaatggcaagaaaaatagtaggaagagaggattttataaaggtagttttaaaatattcaaatattcaaatattcgaggtatattatgaagaaaaatacaaaaattccagcatcttttaaagtagtattgattactgtcataaatattgttattttatcccagcgtgcatgaatgtgtttgtgttctccccacccgcttctttctttctctctctctttcaaaccagaaatatgcttactctctgagtatatgagtaacacatgcctattgta

SEQ ID NO: 272713 - DNA, 455 bp, Homo sapiens
ttatctatatctgttccaaacgggaaataatccaaataccagtcaacagtagataaagattcttgaacatgtttgacttgtatattcttgactttttaatgtggaaattgagacctcaaactcactataccataggggtggaattccagcaattctctgtacaacccctgcacaattccaagaagaaggcaaaagaagagagacgtggatattttgcttagttagccgtcttgaactttcccttatttttattcctctgcttttaggaaatcccacttgaaaagtagctattttctcctttgcaagtctatctttttcaacaaaaatcttaagcaaaatataaaaagccaataccaattgattcctaaaatgaatctatcaagtttcactttttttttttcctgaggaagccgagcatattgactcattctagaccctaaaaatatgcctacatc

SEQ ID NO: 272714 - DNA, 283 bp, Homo sapiens
aaagggcaagcaggcgtggggaccacagtggccttactgtggagtcagacactctgtgcgccaggagttcccaacatgctagtcctgaaaatgcaatacaacaagaacacagtctgaaaacctgacactgaatccatgggacaacccagaaccaatgggtgctgcacccacataccttctgctcaggggaagggcccgtttcaaggagcacaaaggcaaagcctcaccagatcagaggaaaagaggcaaagggatgggacagttcccaacaggctaataagaa

SEQ ID NO: 272715 - DNA, 270 bp, Homo sapiens
actgtaaactttaacaaaatttggtgttgaaacagctttaggctacatggaaaatacttgagtaactatagaaatatatgctgtcaaattattatatgtgatataatttaatatcctgtatttatattcatgttttatagattttatttattccgttaatttttgtttctgtcaaaatttgatgaaagaaatgtttctcatcacgtataaattgatgatcttctgactaagcctatttggtagccccagattgagcactatgaagttttt

SEQ ID NO: 272716 - DNA, 385 bp, Homo sapiens
aaataatcaacaaaaaaattacctccaccctaaacaatagagatttgtctcatatatatataaaacatttaggggtgggcagcccagagatgctgccactgctggatgatgccactagggatctagaatcttttcatctcctcacactgtcatactcagcctgtaagctaccctcccagatttgtaccctcataggaacaagatggctgctgctctgccaagcctttcatccatgttccaggcagtaagaaaaggggaagacaatagggcaaagggagaaacaggaacaagtgtctgtatcaagaaaataggcgtgagccactgcacctggccctttatttgttttttaattctccctaagaagtttaaggtacaaataatcaac

SEQ ID NO: 272717 - DNA, 393 bp, Homo sapiens
gccacaccttcgcctttgccctagatgggccttctgcctggaatcctgtgccctttctcctactctctcggaagctgtcttccttagccatcagaattattcctgattcgggccaagcacagtggctcacacctgtaatcccagcactttgggagtccgaggcgggtggatcacctgaggacaggagttcgagaccagcctggccaacatagcgaaacccggtctctactaaaaatacaaaaactagctgggcgttgtggcatgtgcttgtaatcccagctactagggaggctgaggcaggagaatcacttgaacctgggaggcggaggttgcagtgagccgagatcgtgccactgcactccagcctgggcaacagagcaagactccgtctca

SEQ ID NO: 272718 - DNA, 490 bp, Homo sapiens
gaaagcaatacacccactgcaaacaaagtatttcactttacgtagtgcctgccctttagcagaagagggatgctgacaaaatcaggtttagctgaaaggatcaagactaaacgtttcatttccaaagtgagggaatgtgagtcgttgaacctaaacttccatacaataaattgctgcgtgcgttagtttctagctcttaaccttaagtttctatgttgaaagaggaagtcgaatacgtaagtcattgaactgagtcagaacctccgtatctggcagttgaaataaagaccctgtgtatgacttgttgcaagggatcaaagtaaaaagaaccctcggtgtggggggtgggggggtgggggcgtgagggaggtgtgcagcagaaattaaatttaaaaaagtattaacagagttttggatagagggagagaggggattggagtggtccctgatttggagttggtgaaaactaaataaagaaaagtttatattg

SEQ ID NO: 272719 - DNA, 331 bp, Homo sapiens
cccccaaggtgtccagttcgacatagcttttaacatagcttttcaaggccaggcgtggtggctcacacctgtaatcccagcacttcgggaggccgaggcaggtggatcacaagttcaggagattgagaccatcctggttaacacggtgaaaccccgtctctactaaaaatacaaaaaacaattagccaggtgtggtggcggtcacctgtagtcccagctactcgggaggctgaggcaggagaatggcgtgaacccgggaggcggagcttgcagtgagccgagatcatgccactgcactccagcctgggcaacagagcgagactccgtctca

SEQ ID NO: 272720 - DNA, 207 bp, Homo sapiens
tgtatcacatgaggctcttaaggctaaatttaagttataagggtctgcagatgccctcaaggccgactttgactttggtgttcgtacttctgtgagtagcttcatggtttccagtttgttattctgatagaaatactaatattaaatgtcatttctgtattttttataatttatacttaaatatttgattaacacagcttacatatt

SEQ ID NO: 272721 - DNA, 573 bp, Homo sapiens
ctgagaacacacaggcaggcaacaccttaaaatcccatctcagtcagcaatgactcctcatagggccaccacgagcttaaatgtcacttaaatgtccctatttgccagcctggacttcggtgtggtgatatcatggtgcattcccaggagggaagtgcttggtcaagacttctgcttgggttcgactgtcggttctggtttcacatgcactgtgtgaacacgcttcatacagagggtcagcaccgcactgtgtgaacatgcttcatgcagagagcctgtactgcaccaggtgaacacacttcatacagagagtcagcaccgcaccgtgtgaacatgcttcatacagagagtcagcaccgcactgtgtgaacacgcttcatacagagagtcagcaccgcaccgtgtgaacacacttcatacagagagtcagtactgcaccgtgtgaacatgcttcatacagaagatcagcacctcactgtgtgaacacacttcatacagaaggtcagcaatgcaccgtgtgaacacacttcatacagagagtcagcactgcactgtgtgaacatgcttcataca

SEQ ID NO: 272722 - DNA, 416 bp, Homo sapiens
catttcctctgtgaagtcttcctcactttccctggcggagcaagtttttccttttgtagcacttgatacgtctcatcttttaccaccttctcattgtattataggtatttacccacatgtttatctagtttagtggttttcagccaggggcaattttgccccactttggatgtttggcaatgtttggaaatatttttgtttggcacatgcgagtagagggtggtgctggcagctagtgggtagaggctatggagttgccaaacatcctacaatgcacagatggctctccacaacaaagaattctccctctctgaatgtcaggattgctgagattcagaaactgctttgtccatgacatttgagggcagggagcttgcagctacacatataagacataataaatggtaaacatatca

SEQ ID NO: 272723 - DNA, 665 bp, Homo sapiens
gctgtcaagcagagagctaaggactgtgcgaagcaactggtgtgaagcgttatccaagggccggggcaatggctcatgcctgtattctcagcacttcgggaggccgaggcaggaggattgcttgagcccaagagttccagaccagcctgggaaacaaaatgagaccccctctttgcaaaaaaatacaaaactagccaagcatggtggcacacctgtggtcccagctacgtgggaggctgaggctggaggatcatttgaacctgggagcttgagactgcagtgagctatgatcgcaccactgcactccagcctggaagacagtgagaccctttctagtaatttctaatttctatatatatataatcacacatcctggcagggacatgtcagccacgcgtgtggggggcgggggaaggggacgcacatgcccgcaggcctaggaaccaggcagcaccagctcacgtctgggggccatggggacctgggggcaatggttgaggactcaaaaccgacgccacccagctgaaaggctcccactggccagagctggaacagctttagtcatgaaactaacagtattgaatgtaacccaaagtacaaaacaaacatctctaagtccacgctgccgaaagtatttggataaattaataaatgagagaggagac

SEQ ID NO: 272724 - DNA, 348 bp, Homo sapiens
ccaggagacagtttggctgagggaagtaatggaagatcagtgtgtgccggaattggggcttggtactgaggtaaggtggagggagatgggagaggctgggcttggctgcttgcttggtggcgtgacctcaggcaggtcactcaccctcggcaagcctcagttcctcagctgtagcgtggcgccaggctaaccgatgcctttcttcctagctagttgaggactggcaatgaagaagccactattttatgtatttatttagagatggggtcttgctatgctgcccaggctggtctcaaattgctggcctcaagcccattattttgaacataaagctttaaacaaatgtca

SEQ ID NO: 272725 - DNA, 312 bp, Homo sapiens
taaatgaaaatgaaaatatgactcatcaaaatttgtgggttgcagcatacccacatttggtcattagacaacatacttccaaacaacacatgggtcaaagaagtctcaagataaattttaaaaaatattttgaactaaataaaaatgaaaatatggcttatcaaaatgtatgggatgcagcaaaagcagtgctagaggaaaatttatagtattgaatgaatatattagaaaagaagaaatatgtaaaattaaaaatctaagcttccaccttaggaaactagagaaagaagaattacataaacctaaaacaga

SEQ ID NO: 272726 - DNA, 430 bp, Homo sapiens
ccctaacaaatggccacaatcaactactacaaatttctcctaattagttttagtctgcacttctgtcacctttaggagagagccaaagattttaaccttcaaaattatcagcaatgcatgtcagaaagcatttcaaagaagagtcaaagtgcatgtagaaactaattgctgtatctgaaagtgctgtttgaagaatttttcagtcttcagagaagcaagttccccaccccttgggaaaactagtcttcaaactaaaagtttccccaaatcatatacctgagaaaaatgttaaaacagacttacccaaaaaggcaaagaaataaaactgtaagaataaataaatcagaaatcagatgtctctcccctgtttaaaatcctccaacagcttcctactttacttggaataaaacgcaattcctttaccatcacc

SEQ ID NO: 272727 - DNA, 457 bp, Homo sapiens
tttttagtagacacgggggtttcaccatgttggccaggctggtctcaaactcctgacctcaagtgatcgcccaccttgacctcccaaagtgctgagattacaggcttgagccaccgcatctggcctattccacttttttaatgaatgtgtttacagctattaatttctctcagcactgttttgctgcatctcatatgttttggtatgctgtgtttgtattttcataaatcttaaggtattttccagtttcccttgtattccttctttgacctattgttgttgtttaaaagtgtgtggtttaatttctacatatttgtgagttttccagttttccttctgttattgatttctagtttcattccattgtggtcagaaaatatattttgtatttcagtctttttaaatgtgttagtgtttgtgttgtggcctaacatacagtctgtcctgtagaatgttc

SEQ ID NO: 272728 - DNA, 303 bp, Homo sapiens
aagaaagcagcagggcatttttaaagtgttgaaagaaaaaactgtccatctagaattctgtttccagggaaaatacccttcaagaatgaagctgaagtaaggccattctcaaataaagaaaactaagggaattcatgggctgcacacctactctaaaattagaattgttaaagatcttcagacagaaaggaaatgagactagaagataacctggaacatccgggctgaaggaagagcaacagaagttgtaaatataatagactattcttctcctcgagttctttaaaacatttctgacaattg

SEQ ID NO: 272729 - DNA, 534 bp, Homo sapiens
aagactgagcattagactggattttttcaatagtcttagcaggactatggttaatgtgaactacagtgctgtttatgttgtcttgaaaaattgtactgatggtaaaaataaacaaagataaggggatgagatactgtaatcatatgggagatcttgaattaaagagttatctaatcaatgacataaatagtattaggaagtgaaattgatacaaacataccttgttttttgtcctttgctttattgcacgtcacagatagttttttacaaattgaaggtttgtggcaaccctgcattaagcaagtctgttggcaccattttcccaacagcatgtgctcactttgtgtctctgtgtcacattttggtaggtctcacaatatttcaaacttttattactattattattattattattattgttatctgttatggtgatctgcctttagtatttttgatgttactgttgtaattgttttggggcatcacggaccacaaccatctaagaagacaaacaataaatgtatttgttctaac

SEQ ID NO: 272730 - DNA, 397 bp, Homo sapiens
ggcttctgcctccatcccaaatcctgcctgcacatctgggaggggaggaaaagacccccatggggccacaacagatggggacagggtgggagcagagggaaaggaggagaggagaggaagtcaagaagaaaaataaaaacaagcagcagagaccatctgaatcccgggaggcaggcaacatgcaaagcccagagacacaaccggttcagctcacgtcgcaaattgagtgctgccagaagccagcaagccaggagggacggaggagcgagggccacatggctgtgtcctttcagaccgtgtaggacaatgctcttccagaccagctctgaactggttcctgaggtcagggcagacactacactgagggtcactggagcaaccagacagaagctggggc

SEQ ID NO: 272731 - DNA, 296 bp, Homo sapiens
tggtgagggccttcttcctcatcataacatggtggaggacatcacatggcaagaggtcaagagcttgccagctcagatctctctttttcttcttataaagccaccattctcatcagagggcctcatctgatggccttatctaatcctgattttttcccaaaggccccaccttcaaatgccatcaacacacgaatttggggattaaatttccaacacatgaaatttgggggacacattcaaaccacagcatgccaaaagtctttggcatcaatagtgaccttattcatgtgactgca

SEQ ID NO: 272732 - DNA, 269 bp, Homo sapiens
aaacattcagattactactgtaaactctgttaactttttttttttaaatagaggttcaggaaaatctcaagaaactgaaatttagaatattggactacctataaaaaagcagtataaagggtgcctgaaatcgaactgctcactgacatttgtagggaggtttgatttataacaaataagttgatcaaagaagagtgattgttccaagttagagatctttgtgtgggttagggagtccgattgtaattggatgggaaataaatattttt

SEQ ID NO: 272733 - DNA, 510 bp, Homo sapiens
tggttttctagagaatgaagatctagaaaacaaggatacctctttattggcttctgccaccgatccagaaccctgctcctcaccccacagaggccacagatggtatctccagtgagtaaggatgccacggaagatctgcggaaagcaactggtcctttggaggctcaggccttggtgaaacaggatttgctgcctgcagaccaggcccaggtcctcaatgagatggctaagtatcaagttccacagaggtctggggacatcgttatgatccagtctgaacatacaggagctatagatgttctttcagctgatttggaatctgcagatcttctgggggaccacaggaaagtctccccacctctgatggctcctccatgcatctggacctttgccaaggtgaaggaattcaaaagcaagctgggcaaagagaagaacagccgtctggtggtgaagcgtggtgaggtggtgaccatccgggtacctactcatccagaggggaagcgtgtctgc

SEQ ID NO: 272734 - DNA, 341 bp, Homo sapiens
tcttaatgtgatttaaataccgtgactgagttgcattcagtatctgcctggtcaccaagtccaatgcgacatcctcctctatagagatgtattctagcaaaagacttctgcatccaccatctggccccagactaagaacacatctcactgaatgacacataacccagtgggatgcaccaaatttgcttaaccatgagcacatcatcttctcataacaaaagctgaatatgaccctaattttatattctgtaaactctgttgtggaaattattaaaacaactgtcttctgggtagtcctgtaaacattcactgatcttttttcctttattgaagccacaatt

SEQ ID NO: 272735 - DNA, 437 bp, Homo sapiens
cccggtggggcgccgcgagccgactgtcggtgtttgcagaagggcaagtatagtttaggagcgtcctgaagttccaggggcaaataggcccccagatgagctaagttgtaagcagaacgctgttcctttggccaaggctgttgctgcacgggcttttcaaaagcgactcattatgaagaagaataaatatgtgggctcatgaagcaaaattatctttgggatgaggcaggttcacttggtagactactggcagtggcgagagaagggaaatgggggctgatacccagccgtgggctatgtgggtggggctctatatatgtccatacaggggtaactccgaaggttttaaaaatgagtaaggaatcattaacaaatatttaactgtcttcctagtgccagaaataaccaccttaaatgggaaacattttagttgagca

SEQ ID NO: 272736 - DNA, 601 bp, Homo sapiens
ccctgcctcctccgagctgcctcctgatacccacttcctcctcagtactgtgcagggagggagccgcagctacagaggatttcatgttcccagcacagctgcttgctggctctgctgtttcaggcaagttagttaacctgagtctcaactcctccactcatcctgcacatgtttattgagcgtctgctatgtggaacctacattctagccggggaggcagagagggtgtagtaacctcagtaagcagtggcagtggaaatcatgtttggaggtgacccatcctaaggagctggataagggcgattggaagtcggggcagctgaagtgggcaggcagcagtataaaacagggtggacagggctgggcatggtggctcacacctataatcctagcactttgggaggccgaggcaggcagatcacttgagcccaggagtttaagaccagcctgggcaacagagggagaccccatctctacaaaaaatacaaacattagctgggtgtggtggcatacacccgtagttctagctgctctggagggctgaggtgggaggattgtttgagcccaggcaggtcgaggctgcagtgagctgtgatcgtgc

SEQ ID NO: 272737 - DNA, 462 bp, Homo sapiens
actgatcctgagctccccaggcaagcagcatgtgggtaaggacggttctccgtgttgtggtcaccacggggtaaagagcgcctccaaaatgattatagaactggaactgcagtacagtgggagtatttgtccattttgtaaaggacaaagcattcctctaaaaaaaagtgagcacaataaaattcccacgcaaatgcgagtgtttaggtcaaattgtgacctcctgggtattatttaggcgtttacatatacattatattattacttccaaggaattccaaatgtacttaaaaaaataaagttcaaattaaatgaatatatatgtatgtacacacacatatatacacacatattcatgtaatcattccctatgagtttatcatagttgtgttaataataaattcttagttaaaattcacccccacataccttaccttacattaagaagaaagaaatctgaaa

SEQ ID NO: 272738 - DNA, 1142 bp, Homo sapiens
gtgagaacctcagctgcaagtgagactggaaaaatggctctcagagttcccgcctctgcagtagaggaagacactccagaaggagttgagaatgggtgctgagtgcctcttcaggatgtctgtcacacctcaggaaacctgccaggaataccaaagggagtgaaaaatccaaggaatacttgtcattgaaattagggcccacctggataatccatgatgatctcatctcaagatccttaacttaatgacatctgcagagactggtttatcaaataagggactgtggctatatcgctgacctcaagaaaacctgcggacaaaatctgctaaagaagtatcagcatctatttcaaaagttagccattattttaagaagactgtgctggaagacgggtatttaacacaaacagatgcaaaagatacggggtttcaccgtgttgaccagactgattttgaacttctgggctcaatcagtccacctgcctcggcctcccaaagtgctgagattataggtgtgagcccctgcgcctggccagggatgccgttcttcactctccaattgagcagccattatatatcaggcactataggagttcctggaggatactggtctgaagttagcatgatcttgactcaagaaacttatagtcctgataagaacttccaccagaattccagataaggcagcacaggccttgctgtttgcccatgtccatgcggtcagctctcttgggtaccgtggcatgcagatgcagacgctcacccaagacaccctgtagtgctgattactggctgaagacactgaatatctgatatagtttggatgtttgacccctccaaatctcatgttgaaactagattcccagtgttggaggtggggcccggtgggaggtgtttggattgtgggattggatcccttatggccatcttggtgccatccttgtggtaatgagcaagttctttatctactagttcctgagcgatctggttgctaaaaagagtctagcagcatcatccgctccctctcctcctctcttaccatgtgatatgcacacaccggctacccttcacctactgctccagcaccacgcttcatgtacagcctgtagaactctgagccaaataaacctcttttctttata

SEQ ID NO: 272739 - DNA, 1197 bp, Homo sapiens
gtgagaacctcagctgcaagtgagactggaaaaatggctctcagagttcccgcctctgcagtagaggaagacactccagaaggagttgagaatgggtgctgagtgcctcttcaggatgtctgtcacacctcaggaaacctgccaggaataccaaagggagtgaaaaatccaaggaatacttgtcattgaaattagggcccacctggataatccatgatgatctcatctcaagatccttaacttaatgacatctgcagagactggtttatcaaataagggactgtggctatatcgctgacctcaagaaaacctgcggacaaaatctgctaaagaagtatcagcatctatttcaaaagttagccattattttaagaagactgtgctggaagacgggtatttaacacaaacagatgcaaaagatacggggtttcaccgtgttgaccagactgattttgaacttctgggctcaatcagtccacctgcctcggcctcccaaagtgctgagattataggtgtgagcccctgcgcctggccagggatgccgttcttcactctccacactccaaccagcaatgaaggagatctgaggtctcggcatcctcattcacacctgattgagcagccattatatatcaggcactataggagttcctggaggatactggtctgaagttagcatgatcttgactcaagaaacttatagtcctgataagaacttccaccagaattccagataaggcagcacaggccttgctgtttgcccatgtccatgcggtcagctctcttgggtaccgtggcatgcagatgcagacgctcacccaagacaccctgtagtgctgattactggctgaagacactgaatatctgatatagtttggatgtttgacccctccaaatctcatgttgaaactagattcccagtgttggaggtggggcccggtgggaggtgtttggattgtgggattggatcccttatggccatcttggtgccatccttgtggtaatgagcaagttctttatctactagttcctgagcgatctggttgctaaaaagagtctagcagcatcatccgctccctctcctcctctcttaccatgtgatatgcacacaccggctacccttcacctactgctccagcaccacgcttcatgtacagcctgtagaactctgagccaaataaacctcttttctttata

SEQ ID NO: 272740 - DNA, 632 bp, Homo sapiens
gaaaactttccagaaagaagagaaaatataatgaatacttgtcattgaaattagggcccacctggataatccatgatgatctcatctcaagatccttaacttaatgacatctgcagagactggtttatcaaataaggaaggacatgttcacttccccttctgccatgattgtaagtttcctgaggcctccccagccatgtggaacggtgagtcaattagacctctttcctttataaattacccagtctcaagtatttcttcataacagcatgaaatgagctaatacagtggagtatattgcatggtgaaaatttaatatttttaattgtatagttaaaacacgggcgaggacctggattaaagagtagtatatatatattatatgttctgaaaagcaaaattatgcaatcaaaaagaaaagagaggggaagagagaaagaaaggagaaagcagagaagtagaattaacagttaggtagataatgggtgaaggagaagagtataaatggtcataccagacaatagaatgttcagtaagaagaaaaggaagttagaagggattaaaatggaataaatacaaccactggaacaaacatacaaacattctgaaatgccaaaagaaatgaaaaaaaa

SEQ ID NO: 272741 - DNA, 519 bp, Homo sapiens
gtgagaacctcagctgcaagtgagactggaaaaatggctctcagagttcccgcctctgcagtagaggaagacactccagaaggagttgagaatgggtgctgagtgcctcttcaggatgtctgtcacacctcaggaaacctgccaggaataccaaagggagtgaaaaatccaagggttgggaagccctgggacattgaagttacaactggacgataaaaacagagttttttccttgtgacgtgaccactgtgatgtaaagctgtatctccttcatttcatcaagaaattcttaaaattctcccccaacgtgctttcatctttcccttcattgccaactctgtgaatacttgtcattgaaattagggcccacctggataatccatgatgatctcatctcaagatccttaacttaatgacatctgcagagactggtttatcaaataagggactgtggctatatcgctgacctcaagaaaacctgcggacaaaatctgctaaagaagtatcagcatctatttc

SEQ ID NO: 272742 - DNA, 416 bp, Homo sapiens
gtgagaacctcagctgcaagtgagactggaaaaatggctctcagagttcccgcctctgcagtagaggaagacactccagaaggagttgagaatgggtgctgagtgcctcttcaggatgtctgtcacacctcaggaaacctgccaggaataccaaagggagtgaaaaatccaagggttgggaagccctgggacattgaagttacaactggacgataaaaacagagttttttccttgtgacgtgaccactgtgatgtaaagctgtatctccttcatttcatcaagaaattcttaagaagtaccacgccttttctttgaatctgattctcctccaagaagcaatgcttctctgaggctttcacctttgctcacatcaaagcccccacactgaataaataccatccttacatgcccttcc

SEQ ID NO: 272743 - DNA, 466 bp, Homo sapiens
gtgagaacctcagctgcaagtgagactggaaaaatggctctcagagttcccgcctctgcagtagaggaagacactccagaaggagttgagaatgggtgctgagtgcctcttcaggatgtctgtcacacctcaggaaacctgccaggaataccaaagggagtgaaaaatccaagggttgggaagccctgggacattgaagttacaactggacgataaaaacagagttttttccttgtgacgtgaccactgtgatgtaaagctgtatctccttcatttcatcaagaaattcttaaaattctcccccaacgtgctttcatctttcccttcattgccaactctgtaagaagtaccacgccttttctttgaatctgattctcctccaagaagcaatgcttctctgaggctttcacctttgctcacatcaaagcccccacactgaataaataccatccttacatgcccttcc

SEQ ID NO: 272744 - DNA, 823 bp, Homo sapiens
gctaggccgaaacgcctgtatttaaagggatagtaactcggactcgttctgcaatatccccacaagggcctgactgagcgagcgagcatggacggccgcggggctttctggacagtggccattcccagagccaggcaggaaggcctcgggaggctggggctcccgttcccggtgaagcggacgccgccagcgccccagaacccaggaggaagcacacaggccccacagagagtggttggcaagagtcactcggggattaggatgccggccaaatcgcggaatttgaggctggaatccaagctcaacaggactgctgtgtgtgaagcactcaagagggcccctacaaccaacctgccaggagtcggctcctgaaaacagggtcggaaaaggggtctggcactcttcctcatgcttacgagatggctgctggaattccaggaatcacatgcaaattctagtcaggagcaaagaggaagagacacagtgaaaaggggtatacagcggcagaaggaagctcctcaaatgaactctgctagaactctagccagtagcttctccttctatcacagtggccagaactgtgacaagtgaccatccttaggggaaaaaagatgctgagaaatgtgaattttgttgccaccttacattttcaaaggagttccattcgtaagtacagaacgctcagagaagaggcagcagatctaggatatggagcagcagctcttaagggcacagtgggaaggtttcaagactgaggaggatcttggatttgggtaggggaaggcagttcacagtattgtggaggaaatgctgtgaaagagaa

SEQ ID NO: 272745 - DNA, 576 bp, Homo sapiens
gctaggccgaaacgcctgtatttaaagggatagtaactcggactcgttctgcaatatccccacaagggcctgactgagcgagcgagcatggacggccgcggggctttctggacagtggccattcccagagccaggcaggaaggcctcgggaggctggggctcccgttcccggtgaagcggacgccgccagcgccccagaacccaggaggaagcacacaggccccacagagagtggttggcaagagtcactcggggattaggatgccggccaaatcgcggaatttgaggctggaatccaagctcaacaggactgctgtgtgtgaagcactcaagagggcccctacaaccaacctgccaggagtcggctcctgaaaacagggtcggaaaagatctcagtcctctatctgtgaaacggaattcggccttgcctgtccacgaaatgaagacaaggcatctcgtgtgtgttaagatgaaacaagatcttagcaagagagtaatgatttcttttttaaaacattttttactgtagtaaaatgtactataacgtaaaattaccatttcaatcatttgtaagtt

SEQ ID NO: 272746 - DNA, 790 bp, Homo sapiens
gctaggccgaaacgcctgtatttaaagggatagtaactcggactcgttctgcaatatccccacaagggcctgactgagcgagcgagcatggacggccgcggggctttctggacagtggccattcccagagccaggcaggaaggcctcgggaggctggggctcccgttcccggtgaagcggacgccgccagcgccccagaacccaggaggaagcacacaggccccacagagagtggttggcaagagtcactcggggattaggatgccggccaaatcgcggaatttgaggctggaatccaagctcaacaggactgctgtgtgtgaagcactcaagagggcccctacaaccaacctgccaggagtcggctcctgaaaacagggtcggaaaaggtcagtgcccatcagactcgagctgtcggcaaaaagctggagaggttaggagctttgtctatctcaagggtaacaaactgctttgaccctgagggctctgaagacgactttccctcaccgcagctctcaagacaacagggatcagactcagaaagacactgcctgtataaggctcttgtttgtcttgtttttaattcctgccctctgcctccagatctcagtcctctatctgtgaaacggaattcggccttgcctgtccacgaaatgaagacaaggcatctcgtgtgtgttaagatgaaacaagatcttagcaagagagtaatgatttcttttttaaaacattttttactgtagtaaaatgtactataacgtaaaattaccatttcaatcatttgtaagtt

SEQ ID NO: 272747 - DNA, 635 bp, Homo sapiens
cgggaccgccagtgctgtctcctcgtcagatgctgcttctggtctccccgcagaagatgccactggagttgccttttcaaggatggggacatttgaaggccctggacgctcagctctgaggctggctgggatctcactagcaccccctggtggaggccggagccaggctgacgcgggaaagtggggcacggaagcgctgcggattggaccggcggcagctaggccgaaacgcctgtatttaaagggatagtaactcggactcgttctgcaatatccccacaagggcctgactgagcgagcgagcatggacggccgcggggctttctggacagtggccattcccagagccaggcaggaaggcctcgggaggctggggctcccgttcccggtgaagcggacgccgccagcgccccagaacccaggaggaagcacacaggccccacagagagtggttggcaagagtcactcggggattaggatgccggccaaatcgcggaatttgaggctggaatccaagctcaacaggaaagtagtgaaatacaaatggggaaaacagggctctggagcggggagggagctggtgccggcatttcccaccaacgccggtttaggaagacgggaccgatgccggccgc

SEQ ID NO: 272748 - DNA, 420 bp, Homo sapiens
cagttcctctaacatctcataactgatgtttagaaaagaagcctatacactgaaaagaacagttctactgaaagaagcagcctgaaatattcttcagccataactagtcctgactcagactagtatattcaaaagaccagtgtcagtttccaggaggcctctgccatcatgttcagattctatgcttgctggttacagaagatataaaaaaatgcaatgctacattattacacgcattttcaaaagtctgtctatcctactctatcttacctcctagttctagacaacacagtttagagttaagcattctataaatctaaatgtttccaacattttaataacatctttgtttttttcattgtttctcatgtcttaactctgatgtttagaaataaatatcaacaatatattgatacaaaa

SEQ ID NO: 272749 - DNA, 506 bp, Homo sapiens
gtgagacatcagacactgattgtgaaattggaagatcacatttatgttgttttcagccactaaatttggagcaatttgtcacagctgggtagaaaaccaacacaatttcatttaaagacacttgaactctgatttttctcaatagtgaaataattctgagcaaatatgggtttacagaatcacaatctcataatactgagagcttaaaaagcctcgggggttgaactggtccactgttgagcataaggtgggtaagacagtgttatcccactttagggattgtccaactgaggccaagaaggcaagcgacttgcaggaagccagtgggagcagagcgtgagcccaattgccttgtccctgctgctgggagcaccgagccgtcttcagtgacacagcctccagctctacccagggcttctcacggcttctgggaacaccaggtcctcttactaaaagcccgcctaggaaaattgcctaggtaaagttgttggctttcgctcgtgccg

SEQ ID NO: 272750 - DNA, 583 bp, Homo sapiens
cacggggtgcggaactcccaaatatagagaaatggtatgggtgctggctggcacagagtacgggatgcagccatcagcccccttcccaccactcccttctgctccagacagaaaactaggaatcaccttagattctcttcttccctcacttaggacatcaacaagcagttgatctccaaaacagtcttgactctctccaccttttgtctccagtgtcaatagcttcctatggccaacgctgttcattccatctggattactgtgattgcctcctaacttctctttcctcttccacacactcttctttccagtctgcattccccaaagcagcaggaacaggtttctctgtaagtcatcctataaaacttctgtgctttaatgccttcagtggcttcttttttgcaccaagaataaaatctggaatctgcatgttggcctctgaggagtatgatcttatgtctccttcttctgcgtaggatgtgattttttttttttttttttggctgaggcaggaaatttgtttgaccctgggaggctgaggttgcattgacccgaattcgccccttggcaccccagttgggcc

SEQ ID NO: 272751 - DNA, 1031 bp, Homo sapiens
agtctcgccctgttgtccaggctggagtacagtggcgccatcttggctaactgcaacctccacctccccggttcaagcaattctcctacctcagcctcctgagtagctgggactacaggcagccgccaccatgaccagctaatttttttttttacttttagtagagatggggtttcaccatgttagccaggatggtctcgaactcctgaccttgtgatccgcccacctcagcctccctaggtgctgggattacaggcgtgagcaaccacccggccttattgttcttatattaaaacaaaagaacctagaaaaaattgcttggttaaattgtagagaggaagggagggaaggaaaatgaaggcttttcttctttgttctttaaaagtccaagcactttctttcagaatcaaaatgtagagaggcagtcagtcttggagcatgcttttgcattttaggatactactcattaattcagttttaaagcattcactgggttgagcacaattttaaaaaggttctgactcacccagatcctgtttgaagctcaactcattttgattgaaagagatttgagacaagaatttcagaagagaaaaatgtgtgttacacctggacatatatacacatgtaacagggattgtattccttctagtctaagacaagagattctatggtaaattatttaaaaaaattagttttttttctagcattgtattgtcaccagaaagaagagtgctgaattctctgtttctgcatttcccaataataaatctcctaggagagataactttttgcagttgtgccccccacccattttctctgtggcttgctttatttcccacatatgaatacacacacagcagatacatcatgcacaaactttttttaatgtgtaatctgtaaatctaggcccattaagttttcattgaagttgggaaactgttgaggacttacttttgttcttcaccatgcgtgcactttgccaaggatctttggtaaccaataaaacgatcatgttcactctgaaaaaa

SEQ ID NO: 272752 - DNA, 633 bp, Homo sapiens
tcccacctcagcctcctgagtagctgggattacaggcacacgctaccacgcccagcttatttttgtatttttagtagagatggagtttcaccatgttggccaggctggtctcaaactcctgacttcaagtgatccgcccatcttggcctcccaaagtgttgggattataggcatgagccaccatccccggccgataattactctttatttccccgtactcccactttggggcacttaatctctctaccctcagtttctttatctgtacaatggggcacccacttaatctgaatagcagtgtaaagtagtatctcatgaagttgttacaaggattaaataagttgggtactacatataaatatgcattggcacctactaatttctcagatgttacctgtgacatttatactgcttaccaggaatatattcatgggttcagagagtatcccgatatctctctgtatattaagtagactcctacccaaaattcattttaaatgagcagggtctatggttggtattaaaggagtagtagttctcactgaaggtcaggcttgcatatttgaggtcacttcagcagtctggactgtagcacctttaccctgtctacctcacctcccttagcagctcagc

SEQ ID NO: 272753 - DNA, 1020 bp, Homo sapiens
gggcttttattattttaactggaaatttgaaacaccatattaacaaacaagttttttttctaattgcctatttttattggggtttatattgaaatgtgcactttatgcgtttattttcatgagagaatgtgtgcatggttatgatgttttttaaggaatgccattggcatcctcctttgtatgtctcctgaggagggaaaaccatagcaatgtcgactctacgaaaagtatcttcctttaattaccctggaaagggaggcaaacaacagcttcccccgttttcagagtgctgtcatacagttttagttatttatataaaagaaacctgtcacttaaagttgatttaaacctggtaaattgctcttccttccatcagtagtttataggagctgtgtgctttagctttctctttttatctaagcttccagaaagctcagaactaagatgtctgcttaaaagttcagcatagcccaggtgttccagtagttacctacgtaattcattatttggtttataaaatacataagattggaaaaggaattaggtagactaatgaatttctattttatctccagtagacatgtcattttagtgttatacagtttgatggaaatatatataccattttatatacacactgatttagtcatcttaaaatccttcacaaccaaattattattaaatgaaataatagtttcatagaagctttaaagtatcaggcctttcatttactcttctgattgtagtaaatgattaaaactctggtaataaataggaaaaaaacaatgccaagcccaagcaatctgtgttgctatttatcaattccttggtatcttttctttttttaaaaaaaaaaaaggtagggggtgagggcattcgttcattttatgctgacctttagtagagcataatcatcaagttgagcttgtaaatatgacctgttttctttagccctggaagctctagaataacagagtgcttttaaaaaaaaaattaacttttaatttaaatttaattaaa

SEQ ID NO: 272754 - DNA, 119 bp, Homo sapiens
ccagtacctggctgagctgctgaagctgcactacatgcaggaatctccagggaccagccaccccatgctcaggtttgactatgtccccagctttttgtataaaatctgaggtcggtccc

SEQ ID NO: 272755 - DNA, 294 bp, Homo sapiens
gtgagggcactgcatggcgagagggtaacctggatcacaccaatgtgggatgcttgttgccaggctccacacacagtggataaaaccagccttctctcgtgagtgaggcctagacctgcagggtgggaagaggcaggactgggagaaggggggctgggaggaagatgacatcggatctgtctgcagaaatcatctgtcaagagtcagaaggtgtcagatcttgctgaatggtgggtgggtggtctctgcatcacctactggtcacccagtagggcgagaagggtcagaggggag

SEQ ID NO: 272756 - DNA, 271 bp, Homo sapiens
ccaaatgctagagaaacagtgttaagagtgacaacactaaaagtcttacactctgatggtgctagttgccgccgaattgcttcccctaccagttccttaagtttcttcttatgatcccggctggttttcttatagaaataaagatctttttccaactgctggattttatcttcatatgttttgaaagtttccataatgccttctccatcttgttctatacaacaaaaatttgcatttaaaatcagttttaaataaatgatgcaaaattatg

SEQ ID NO: 272757 - DNA, 437 bp, Homo sapiens
taaaaatgaaatatgataacagatggagggattaattctacctaaggaaaaggcttcatagaagaaatgacctttaagaagaaacctggaaaattagtaaggacaaaggttgttcccggtggagggaacagtgtaaacaaacacctggaggctagagagggcacagcatggcagggaatttgagtagtcaaagtgctggagcattagtggcagaaatgaagcagaaaatagagattgggatctctatataaagcctggaatgccatgctgaggagtgtatactttaatctgcaagcaaggcatgtgtattacagattgaaacattaggatgatcatggtagttattagagctattcactgaatattgctagttcttcacacttctaagcctatattaggactacatacttctctgtatacctttgaggtgagtcaaa

SEQ ID NO: 272758 - DNA, 385 bp, Homo sapiens
caggttcaagcgattctcccgtctcagcctcccaagtagctgggactacaggcacccgccaccacgcccggctaatttttgtatttttagtagagacggggtttcaccatattggccaggctggtcttgaactcttgaccatgtgatccacctgcctcggcctcccaaagtgctgggattacaggcgtgagccactatgcctggcctatgatgtggtttctaactagtaaaacagagactgatttacatgtatataaagtttcaattttcactgtcatgatattcaatcatttggaagttactggtatgatttaggactaggatactttcttaattaaggaaaactttgtgtatacatataggaaatcagaaattaaagctgtca

SEQ ID NO: 272759 - DNA, 405 bp, Homo sapiens
gtccaactgacctgggtctgaagggaaataataatatctaccttgtaaggatttaaaacatttcatctatggccaggtgcggtggctcacccctgtaatcccagcactttgggaggccgaggcgggcagatcacctgaggtggggagttcgagaccagcctgaccaacatggagaaacccggtctctactaaaaatacaaaattagccgggcatggtggcgcatacctgtaatcccagctactcaggaggctgaggcaggagaatctcttgaacctgggagacagaggttgcggtaagccaagatcgcgccactgcactccagcctgggcaataacagcaaaactccgtctcaaaaacaaacaaacaaacaaacaaacctttcatccaataaatatctatcaaat

SEQ ID NO: 272760 - DNA, 311 bp, Homo sapiens
cccccacgctctccagtcccagatctcatcagagctggctgagtccccaggccacccgccaattacaccacttttttgccaatccccttcatgtccagcctccacacccaccaactgagatcatcttgcccttctctgccagagatactccaagaggtgacagcaaagtcacggtcactttctcagcacctgccccagacacatgggctcttgttcacactcaagccaaacagacagaggctcagcatggttaggcaatttgccccaaggccacaaagaacttctgggacagccatgcttctccctctaca

SEQ ID NO: 272761 - DNA, 190 bp, Homo sapiens
atagccggggggtagaggatgacattattgaaaatagcgcagtgggtgtacatcccttcggtcatcttgttcctaatatcgtggggtgggagcggatggtatgactcccaatatcgcagggggcagagacctcccctgtgatactgtccctaacatccaaaggtggagaggatgatatttcttccaattt

SEQ ID NO: 272762 - DNA, 363 bp, Homo sapiens
ggtttttgtctgttttaacctaaaaggttattgcactattaacaggtaaaaaattctcttctgaccaaatacatgtatttctagcataatatattctctctctctctctggataaaatttattagcatatcagcataaacataatttttgtaaggtcagacaagagatttgaagtgtaattcaaggggaatttgtattaacgtaatgaaacattctgctgtgaagtttactagcaatgcctcactctgggttatcatttctgactcctcccatttcctttctcacccgtcacctggccctcattcattctctgtcctagaagataacctctaaaaccagtgacagtccatccagcctgctgtt

SEQ ID NO: 272763 - DNA, 515 bp, Homo sapiens
cagggcttggactctgagagtgggtgaatggagcaggtcaatttgctcaagatgtcagttggattgagcaggccaggcattgtggtggagtctccatcatcagcgatggggaatgcacagtaaagactgttaggtgtcagcacagaaatgagtcttctcacttgggctgtcctcacatgccttttgctaggaagtggttttggcctcttttggtgcattctttctcacatgtcaatttagaggaaggaactaatgatttgaaggcaaggtctggccttcaacagtgaagtcaaaatgagactgcaggtccactgattgcaccgttcagtgcttttgactctgaagattgttttatcagtccagctcactgggctggttcatttacttaacaaatatacacagagctcctattatcacccaaattcattctgcgcactgaggatgtcctggtgaacaggttgacaatgtgcctgctcttatatttgaatgagggaaactgacaaggatgttggcaa

SEQ ID NO: 272764 - DNA, 209 bp, Homo sapiens
ccacagccgggtggcaccagctgtccgctgaccttagatctatacccagtgtcgctgggaaacacacgccatgctaactggcctcactttaacttcacaatcacaattttccagcccacaaactgcctggaaactgatcacactttttaatatgatgttcctttcccccactgtccaaaatgactatttcaaaagaccccttttttata

SEQ ID NO: 272765 - DNA, 402 bp, Homo sapiens
cagctgtgtggctttgcataaactgacttttcttctctgaacctcgtctttaacatggggctaaaactttcacagaactgaagggaagatgaaaggaaaggcctagtagggtgtgtgacccatagttggaaacctagtcctggaaccaaaaggacaccacaggagaggcaggactcccaagcgccggtgctttctaccctcccgaatcgctctataggattagagggtttaggtttgggaggagtttcttgacctcttgtttatgagtttttacgactaaaatgcaatgccagttttcagtccggggacaaactgcctagttatggatgaattttaccccttttttccccgtgtctttttggaatattctgcttattaatgcttccaataactagcagatgg

SEQ ID NO: 272766 - DNA, 585 bp, Homo sapiens
ggccctaaaggccaagaattgggcccgaggcaaaacaacaacaacgacaaaaaaaaacaaacatctctcctaaaattagaagcaaaaatcctttatagagcattaacaaatcttgtaatacaccatgaaaaagtaggatttattccaaataagcaatcttagttcccagaatagacctaacaatcttgaaaaatcttgaaaaataaaattggaggatttacatacttctcaactttataatgtactataaaataatcaagatagtgcagtattgacatattgatcaatgtgacataaattaagagtccagaaataaactcctatacctgtggataaattgatttttgacaaagctgctaaggcaattcaatgagggaaggatagtattttctataaatggtgatggaccacttgtttagtcatatgcaaaaagatggatttagactcttacaccttatacaaaaattaacttcaaatggacaatagacctaaatgtaagagctaaaccccaaaaagtatagaaaaatcttttttgtccttaggtaaggcagagtccttagatatgacaccaatagcataatcctt

SEQ ID NO: 272767 - DNA, 498 bp, Homo sapiens
ctatttacttcatcaattgcctcttaatgtgcttggtttgctagttcttctctttccactttttctattgtcccctgggctgtaccctcctaaaacacctctttgaggatgttattcatcagctcagaattctagcagtttttgctgccctgcatgatagtgtctagaaaaagctaaatcttttcttgtctgctctccctttaggaaagggagtcatagttacaaccagtgaaaatggtggatgtggtctctagaaacatgtgccaatgcctgttaaaagaaacttgtatatcttccaatctgatgaggtggctggtgccacctgttctccttccttactgccatgaatttgtttacagaggagctgcagcagccattttgcaaccatcagggaataaccaagatgctgctcttgaccttgagcaactgaacaaatgatactacttctagattccttgtttatgtaagaaaaataaacctttgtttaagccacagcaa

SEQ ID NO: 272768 - DNA, 664 bp, Homo sapiens
tcccccttccttcccattggttgctaaataaaactgataactgacactcaaatagccatcttgaacaataagatagaaatcacatgttaagatggggctacatggttgaaagaacctgggtccctgatcatgaccaaaccaccataagaaagcctggacagctcaaacttcatttgcattagagagaaataaacttgtttaaactgcttttatttttagttttctgtcattcccagccaaatctaatcctaaccaatacagacgcttttgaaaattactggtaagaggcagaaggaagtattttgcttaaaattcataaactataaaataaacagaaagttgtaggaaaaaagtaggtagtggaacaaaaggtataagaaatgacaatgaaaaaacctgtggagctctgtttgtgtatttctagaggtcctactgtcacttgacacttaatgtatccaaccaattattctccctcccaaatgctttcctcttctacatgctttgtatctgttcaaggtacaaccattttttttttttttttttttttttaagacaaaaagagtctcactctgtcacccaggctagagagcagtggcatgatcatggctcactgcaatctcgacttcctgggcccaagtgattctcccacctcacccccgcccca

SEQ ID NO: 272769 - DNA, 360 bp, Homo sapiens
cccagaattaaaaaaaaaaaagtcaaaagtgaaagaggcttgccaaaaatcaccattaagtagcagagcatgatcagaactcaacttggctggctgactggtgcgcttttattataaataattttcaaacttaaaaaaccttatatagaaccttaccatataaaatgatatatttggtagattgttactataagattataaaataattttttaaaatcaaagagttaaatggttacaattgtcaatcatcctcaacacacaatctacgtctgttttcttttgattcaaaatattaagaattaagtggttgtaagttgtcacttttttctgtagcctactttaatagttgaggaatcctgg

SEQ ID NO: 272770 - DNA, 446 bp, Homo sapiens
ggacatatccatttagcattatatcttcttgtttacagaacattctatgcagtttcttatatggaccactcatggagctgttcagattttcatacaaaaagaggttgtttttttttctggcaatattatctgtcacaattatcccttcacttagtagttagaagtcggggggtgctaagagcaatttccacagatgctttgtttgtggagaaaagtaggatggcccctctgcttgtcttagtgcagagcaaggaatggcttcgaagccattccttgagtactgaggtctctgtgtagtcttacttcttttctgaatttttcagagtcttctgatagttgcttgatatattttgtctatggttttcagttctatgtagtagaaagaatagagtatctccccccagtcctctaagtagaaataaaaattaatataaaaaattaagtaa

SEQ ID NO: 272771 - DNA, 1051 bp, Homo sapiens
agcgggcgcgtgcgcagcggttgcctgggcgaccggggaagcgttgggctgtaaagactagggcgccagcggctggcgaagaaggaaagagggtactctctggctgggctggggccgtagcgacgtccgccgcgaacctgggccccccaaagctgcggggcgttcggtgtcgccgaagtaaacatgcaccctgagccctcggagcctgcgacaggtggtgcagcagagctggattgcgcgcaggagcccggcgtggaggagtctgcgggtgaccacgggagcgcaggccgagggggctgcaaggaagaaattaatgatcctaaggaaatatgtgtgggttcttctgacacatcctaccacagccagcagaaacagagtggtgataatgggtcaggtggtcacttcgcacacccaagagaagacagggaagatcggggccccagaatgactaaaagttccctgcaaaaactctgcaagcagcacaagctttatattaccccagcattgaatgatacgctgtatttacactttaaaggttttgatcgcattgagaacctggaagagtacacagggctgcgctgtctctggctgcagagcaatggaatacagaaaatcgaaaacctggaggcccaaactgagttgcgttgcctcttcttgcaaatgaacttgctccgtaaaattgagaacctggaacctctgcagaaactggatgctcttaacctcagcaacaattacatcaagaccattgaaaacctctcctgcctcccagtcctgaacacattgcagatggcccacaatcacctggagaccgtggaggacattcagcatctacaagagtgtttgaggctttgtgtccttgacctttcgcacaacaagctgagtgacccaatatggcctcaatatgtgccgccagtgtttccgtcagtacgcgaaggatatcggtttcattaagttggactaaatgctcttccttcagaggattatccggggcatctactcaatgtaaaaccatgataattctttgtatataaaataaacatttgaaaaaacc

SEQ ID NO: 272772 - DNA, 1365 bp, Homo sapiens
agcgggcgcgtgcgcagcggttgcctgggcgaccggggaagcgttgggctgtaaagactagggcgccagcggctggcgaagaaggaaagagggtactctctggctgggctggggccgtagcgacgtccgccgcgaacctgggccccccaaagctgcggggcgttcggtgtcgccgaagtaaacatgcaccctgagccctcggagcctgcgacaggtggtgcagcagagctggattgcgcgcaggagcccggcgtggaggagtctgcgggtgaccacgggagcgcaggccgagggggctgcaaggaaggtgccgactgccccccagggagggcggtgggcgaggggcagacacggctaggcgctccagcccccttcccacaccacatacccgatcttcacagccaaataataacaataataataatggtagcaagcaacgctctgcagtaggggcttctctcgccatttcgtactgaggaggaaacatacttaagaggttacaaaacttgcaccaaacagataaccctcggctagtcagtgacagaagagacttggccgggtgcggtggctcaacgcctgtaattccagcactttgggaggccgaggcgggcggatcatcagaaattaatgatcctaaggaaatatgtgtgggttcttctgacacatcctaccacagccagcagaaacagagtggtgataatgggtcaggtggtcacttcgcacacccaagagaagacagggaagatcggggccccagaatgactaaaagttccctgcaaaaactctgcaagcagcacaagctttatattaccccagcattgaatgatacgctgtatttacactttaaaggttttgatcgcattgagaacctggaagagtacacagggctgcgctgtctctggctgcagagcaatggaatacagaaaatcgaaaacctggaggcccaaactgagttgcgttgcctcttcttgcaaatgaacttgctccgtaaaattgagaacctggaacctctgcagaaactggatgctcttaacctcagcaacaattacatcaagaccattgaaaacctctcctgcctcccagtcctgaacacattgcagatggcccacaatcacctggagaccgtggaggacattcagcatctacaagagtgtttgaggctttgtgtccttgacctttcgcacaacaagctgagtgacccaatatggcctcaatatgtgccgccagtgtttccgtcagtacgcgaaggatatcggtttcattaagttggactaaatgctcttccttcagaggattatccggggcatctactcaatgtaaaaccatgataattctttgtatataaaataaacatttgaaaaaacc

SEQ ID NO: 272773 - DNA, 1055 bp, Homo sapiens
agcgggcgcgtgcgcagcggttgcctgggcgaccggggaagcgttgggctgtaaagactagggcgccagcggctggcgaagaaggaaagagggtactctctggctgggctggggccgtagcgacgtccgccgcgaacctgggccccccaaagctgcggggcgttcggtgtcgccgaagtaaacatgcaccctgagccctcggagcctgcgacaggtggtgcagcagagctggattgcgcgcaggagcccggcgtggaggagtctgcgggtgaccacgggagcgcaggccgagggggctgcaaggaagaaattaatgatcctaaggaaatatgtgtgggttcttctgacacatcctaccacagccagcagaaacagagtggtgataatgggtcaggtggtcacttcgcacacccaagagaagacagggaagatcggggccccagaatgactaaaagttccctgcaaaaactctgcaagcagcacaagctttatattaccccagcattgaatgatacgctgtatttacactttaaaggttttgatcgcattgagaacctggaagagtacacagggctgcgctgtctctggctgcagagcaatggaatacagaaaatcgaaaacctggaggcccaaactgagttgcgttgcctcttcttgcaaatgaacttgctccgtaaaattgagaacctggaacctctgcagaaactggatgctcttaacctcagcaacaattacatcaagaccattgaaaacctctcctgcctcccagtcctgaacacattgcagatggcccacaatcacctggagaccgtggaggacattcagcatctacaagagtgtttgaggctttgtgtccttgacctttcgcacaacaagctgagtgaccctgcaagaaggcctgggctgacctcgtgaatgtcctctgctaatagctacccccatcctccacccccagccctgagccagattttggtctctgggcaaatctttcaatggccgggggatctcttttccaacatgtattacaggagcaagagtgagttctttgggaagaa

SEQ ID NO: 272774 - DNA, 386 bp, Homo sapiens
caatctaagaagtttttgtttactaagtggacttggggcagaaccataggcgggggaaggcaggaggccacttcctttgctggcagtgtggcttcccttcagatgacattcttcacagtgggctgcagagaccagagatttttgttcttcccatggggattggggtaggggaagtgggaggggaacatgtgaggaggagccaaaaggccagtggtttgtccctggtggctctagcccggtgtgggtccaacctgtgtgtgtgcgagacctcccacacgagccctggagccagcagtgccttgcatatgatggaggggagtgggactgtagcaagaagagggctcatgagcagaggcagaaagaagttcaaggaaaacggtggaagt

SEQ ID NO: 272775 - DNA, 1215 bp, Homo sapiens
acagtaagcaaagatcactccacttcactccagcctgggcaaaagagtgagacatatcaaaaaataaacaaataaataaataaataagtggcagttcatcatttaactccaaagactttgcgtacatttctactgaaaacaatctgagctgattagaaccctgccattttatagcctttagctcgatctccgaccgttcatttaaaaaaattctacttcaggccgggcatggtggctcaagcctgtaatcccatcactgtaggaggccaaagtgggcagatcacttaaggtcaggagtttgagaccagcctggccaccatggtgaaaccccatctctactaaaaatacaaaaattagccgggcttggtggtgagcacctgtaatcccaccctgccgagtggcaggctgaggcaggagaatcgcttgagcccaagagccggaggttgcagtgagccaagcttgcaccattgcactccagcctaggcaacagagtgtgactccatctcaagaaaaaaaaaattctatttcattttacaatatgcagatatatgtccatacacatgcataatataaatgtataccatatttgtgagaatatgcatatatgtacacattagatacacaatacaagcacaatacatatgtcttttgcccaagatacagcattttgtaaaggagacaggaatttagtaatatatgttccagaaacagtacacaagagaattcgccgagatgagaaagttgtcactaggaatggggagtggtaagatgtagaaggtataattgttcttaaagttctactgccaactctttccaattaattacccactctgccatgctttatggacaggaggttgtcggacactgtcaattaataaatatttgagcatgatacactgcttggagctcctctaatataggagagtgatatcctagtgcatgttacagagggagtgtccacacagttcctattgtcatttgatgagttacttttcaggggccttgtacctgagcaagttgtcctctttttgatggatttcagattgagttacctgcattgtcttgagattgcagcgtgtttcctccactgtacggcgtagtcagcagatctattagttaaactccagtgggccctcagtcactaaatctatcctctgtgttgaaggctttctgcatttgcctttcaataaaggtttagaataactccttctctgt

SEQ ID NO: 272776 - DNA, 482 bp, Homo sapiens
cagcttgaagttccagtttaatttttggtagttgtgtgatgcgcatccgttagttgagctagagctgcttctcagaattttaaggccagagacttctctggcacctgtggggaattttaataaacaaagtacttgtccctaaagaatcttttgtaaatgactttttgcagtgtaaaaatctgtgtaccgtgaagtgttttctttctagcttccctttaggtagttcaactgggcatctgttaaatctcagtgaaaattatttcaaaagcagatcctgggggaaacggaaagttcatttaggaatactcatagatagaaaatctcccgactgggcacggttgtttacacctgtaatcccagcgctttgggaggccaaggtgggaggcttgcataaacccatgagtttgaggttacagtgaacgatgattgcaccactgcactccagcttaggcaacaaagcaggatcctgtctcttaaaaaaa

SEQ ID NO: 272777 - DNA, 685 bp, Homo sapiens
agggtttctctcctgtgtgggttctctgatgtactgtgagggatgacttgtggtagaacattttctcacattcattacattcatagggtttctcccctgtgtgaattctctgatgttctctaagttttgacttcacagagaaggatttttgacattcattgcattcaaagggtctctctcctgtgtgagttcactgatgattaatgaagtttggcttctgggagaaagttttcccacattccttacactcatagggtttctcgccagtatgtattctctgatgtacttttagagctgacctatcaccaaaggctttctgacattcattacatccatagggtttctctcctgtgtgtgttctctgatgtacatgaagatttgacttctcacagaagttttttccacattcattacattcataggttttgtcccgtgtgtgttctttgatgtactgcaaggcatgacctatatccaaaagttttcccacattcagtgcattcatagggtttctctcctctgtgtatcctctgctgtaggataaaagaggatttatggctgaaggttttcccacattcactacattcatagagtttttcttctgtatctgttttctgatatacagaatgctttggcttacagcaaaatgtactagcatactgattaattttataggcattctttccta

SEQ ID NO: 272778 - DNA, 131 bp, Homo sapiens
actcccccaggccaacccaccatggggatttgaggagtgaagaccccagcacatatcatagcgcctggtcacctcgccccacacgcttccctcagacccaggccctgcccctcttcccacagtcccctcag

SEQ ID NO: 272779 - DNA, 593 bp, Homo sapiens
gcttaataaaaattatgactggacaaatatcagacttttaagattttaaaaataatagaaaagtaaaaatagatttcccagggaagtccctctcctaaatcttatatggttttgctgcttctgtgaaatctttctttggagtaacttgatagcatagatttttgcttttgcttttgtttttaactggattcatagaagggcactgaattagaaattcagtggattcatggagcatgaactttcataaaaaagaaactttgctctgaaaaaaaaatggcaaatataaacgaaagaatgggaacactggatgtccatttcattatgtaatttaagtcttacattagatattgcaccctcatttaaaaataaaaataaaaaaaacagaatagtgtgagcactctgaaatcatctgcagcacttttaagggttaaacctgctgaacccattcttagtcagagaatggcaccaaagagtacagctcaccccttaagcttggctagttctaaacctgtgatatcctcaggttgtcagagcagtcatgcactccattttcacccccctcccacccagttaataggatccattcatagcta

SEQ ID NO: 272780 - DNA, 195 bp, Homo sapiens
ttcaaatccacaacctcattgaattcgcactgcgctgcagcgtggtgggtattagccctatctaaaataagatgatgtgggagctggcgagtcgcgggccagggatgctgaaaagattatgtacagtgcagagcgttgtacccgagcaggttaaaggtgccgcaaaagacagctattgttattttgatgtgcagc

SEQ ID NO: 272781 - DNA, 1976 bp, Homo sapiens
tttctaacttaaaagatttttctggagaagatagatttaagaatgttgaattactccaacaattgttttgaaccaagataattttttttcatatcatgtgaggcttcaaggatttgaggctacacatgttagattccaaattcttttaaaatgctttcctgatttaataacaaacagcattttccttctttttaatatgtctatcttgagatatggtttaaatgaaacagatcttgaaagggtctctgagaaggaaattttcatggcatgtcctctagcaccagacttgactgcaccaggtcaggggataaacagcactttgcagatgagtgtgctttattttgaggccctcagacacttcatgagacccctgtattctggaattcactgcctcactactgctgatatacacaatgctatgaaaaatggggaaccattactcatatatttgctaattatgatacctctcacctcttcccctcttttcccatcctcttctcttttcccccaaccaaataaaaaactaaaacaaatacatatatttgttttattttttgcttatttagttttactgtcttattccttaatgtgtgcacctgtagtctcagctactctggaggtttaggcaggaggatcacttgagcccaggagttctgggctgtagtgcactgtgctgatccactaagttctgcatcagtatggtgacctcctgggagtgggggaccaccaggttgcctaaggagtggtgaacaggtcctggttagaaacagagcaggtgaaaactcctgggctgattaatagtgggatagcacttgtgaatagccactgcacttcagcctgggcaacatagcaagattttgtctcttaaaaaaaaaaacaagtaagttgcaaaccacatatccgacaagggactagtgtttagaatatctaaagaactttaaaaatttaacaattaaaacacaatcaggaaatgaacaaaatacatgaagaacaatttcacgaagaggatacacagatagcggataagcacatgagaaaatatttaacaacattaacaattagggaaatgcaacgtaaaacccacaataagatattactacacacctgccaaaatggctaagataaaaaatggcaacaccatcaaattttggaaagaatgccgagaaactgcacctcttataattgctggagggaatttaaaatggcacagccactctggaaagcagtttggcagtttcttgtaaaactaaacatgcaattgccatatgacccagcagttgcactcacaggcatttatcccagagaaatgaaaacttgtgttcacacagaaacctgtacacaaacgttcatcacagtttcatttacaatagccagaaactagaaaccacccaaatgtccttcaaggggcgaataattaaactgtgatacatccataccatagactactccccagcaataaaagaaacaaatcattcgtgcaacaacttggatgatctccagggaataatgctgagtgaaaaacaccaatcctaaaaggttacatactatgtgattcaatatctgtaactttcttgaaatgataaaattgtgtaagtaaggaacatatcagtggttaacagggattagagatggagtttgggagagaggagagaagtgggtgtggttataaaagggcaacacaagggttccttatagtgatggaagtgaagcattctgtgccttgactgtggcgatgattacatgaaaactacagatgggatgaaatttcacagaactaccacacaatcaaaggactgtatggaaaatgagtgaattttgagtaagatcagtggatgacatctatctgaatatcctggttgtgacattgtggtataatattgcaagatgttaccattgggggtaactaggtaaggggtacacgggataattctgtattatttctacaactatatgtaaatctacatttatctcagtta

SEQ ID NO: 272782 - DNA, 364 bp, Homo sapiens
tagacagtcttgctctgttgccaggctgaagtgcagtggcgcgatctcaactcactgcaacctcttcctcctgagttcaagcgattcccctgcctcagcctccggacgagtagctgggactacaggtgtgcaccaccacacccagctaattttttgtattttagtagagacggggtttcaccatgttggccaggatggtctcgatctcctgacattgtgatctgcccgcctcagcctcccaaagtgctgggattacaggcgtgagccaccgcgcccggctgcttcagcatcttttataatctaagcttgttagtgagatacatttctgccatatttaattggaacaatgtttgaggtgggagtg

SEQ ID NO: 272783 - DNA, 209 bp, Homo sapiens
gccagggctctgcccaatctccccaccccgagactctgcgggctccgttctcaccccatttcggcttgccagttcccttgtgactgccaacagggatgccctggcctcagggagtgtggcggtgacagagatctcaaagcttgccaggtccactgtggtgtccttggggtgtgctgaagccgatgccaagcttttgacatagtaatcct

SEQ ID NO: 272784 - DNA, 286 bp, Homo sapiens
gaagaatgggatgtctatctcttggtttgataattattaaattttacatcattttatgagaaattatttaatgagtacaatgtacactgttcggttgatggttactctaagagcccagacttcaccactatgcaaaatatccatgtaacaaaactgcacttgtactccttaaatttataagaattttaaaaaagaaatagaacaaatactgaaagaaaagttttgtttgtaaaatattatatcttgctaattgcaaacatataataacattggggtgtatatgaat

SEQ ID NO: 272785 - DNA, 1682 bp, Homo sapiens
cacacgagctgatctgatcgccggcgacatcactcaggagaccggccgggcgcgtggcccctgcaggcgaggcgaggaggccaggccaagttctccgtgcgcccctgcacccttccaggctctcgcacccgcaactggcacagagtaacaaccccaggctgttgggaacgtaagtgcgccctggcggctctgccctcagtccgggctgcagcgctctgagcgcctttctatctgtccgtcggtcctgcacagcgcaacgatgccagcccgccttgagacctgcatctccgacctcgactgcgccagcagcagcggcagtgacctatccggcttcctcaccgacgaggaagactgtgccagactccaacaggcagcctccgcttcggggccgcccgcgccggcccgcaggggcgcgcccaatatctcccgggcgtctgaggttccaggggcacaggacgacgagcaggagaggcggcggcgccgcggccggacgcgggtccgctccgaggcgctgctgcactcgctgcgcaggagccggcgcgtcaaggccaacgatcgcgagcgcaaccgcatgcacaacttgaacgcggccctggacgcactgcgcagcgtgctgccctcgttccccgacgacaccaagctcaccaaaatcgagacgctgcgcttcgcctacaactacatctgggctctggccgagacactgcgcctggcggatcaagggctgcccggaggcggtgcccgggagcgcctcctgccgccgcagtgcgtcccctgcctgcccggtcccccaagccccgccagcgacgcggagtcctggggctcaggtgccgccgccgcctccccgctctctgaccccagtagcccagccgcctccgaagacttcacctaccgccccggcgaccctgttttctccttcccaagcctgcccaaagacttgctccacacaacgccctgtttcattccttaccactaggccctttgtagacactgttactttccccctcccctagtcagcaggcaatagatggggccccagctgccgcctcgggaccccctctccaggcggagggaggaagcgggagctttaaagcagtcggggatacctgagccgcttgttaggtcgccgcaccctcgcggcggatgtctcttggtctgtttctccggccctcagcccagcgcccctcctgcccgcccctagacggcctttccttttgcactttctgaactccacaaaacctcctttgtgactggctcagaactgaccccagccaccacttcagtgtgatttagaaaagggacagatcagcccctgaagacgaggtgaaaagtcaattttacaatttgtagaactctaatgaagaaaaacgagcatgaaaattcggtttgagccggctgacaatacaatgaaaaggcttaaaaagcagagacaaggagtgggcttcatgcattatggatcccgacccccaccactgcagactcgctctaggaagaactggagactcttgcttagctattcaggcacagggctggagagtactttaatttattcaagatgcttcattcatatgaaaatgtatttttgtacataaagagtttattctattatgagctatcaaagtttacatttttgtactgcagacgcttcatgtaaataaaaactaaaaataagtcgccaagtttct

SEQ ID NO: 272786 - DNA, 455 bp, Homo sapiens
tcagcctcaggcatgtgccactatgtctggctaatttttttatttttactttttgtagagacaggcatggtggtgcgcacctgtagtcccagctacttgggaggctgaggtgagaggattttgagcctgggaggtcaaggctgcagtgatggcttcactgcactccagcttaggtgacaaagtgagacccagtctcaaaaaaaaacaccacacatgaaaaacctcagaacacaaaaacaggctgcttctgacaaaggcagcacagctagaccatcatccacaagagaagctagattgttacaaggcatctctccatcccctcgcagctggtggtgggcactggcatttaatccagggtgtggggcagcatgggagaacagacttgatttaatcccagacaatattccaacagcccagcccactatggtaatcagattgattctaataaataagca

SEQ ID NO: 272787 - DNA, 303 bp, Homo sapiens
cagccttcttgccttgagcagtggaccccaaacctggagcccccttccctctcccacaccctacctctcaacccatcagccggtcctgtgggctgccgtccaaacaagacctggaatccggcacctcccagtgccacgttgacctcctccaggtctgagccccattctcaagggcctggactggtgaagtagctcctcactcacctccatgcccacggcagctggagggatgctttatcaaccatcaaaccccgttcctcttctgctccatcccctggcctcagtgccgcaggatctttgcac

SEQ ID NO: 272788 - DNA, 87 bp, Homo sapiens
ctgatttttaaacctaatgttgtatcataaacatttacattaacataaatgatttaagtaaataaagtggtttaaaggaaacccagt

SEQ ID NO: 272789 - DNA, 352 bp, Homo sapiens
ctgcggaccggacggcgcagtgccgctgcgggttgcctcctgggactgcccgcatggatctgccgcacctcctttttctcacgccactggccagggcagggtttcagacgcctctgtccagtgcgatggcgtgaagagagcccaggaagggtcggaagcctgtgctgggcagaggctgggtacgatgggctcaggagcagcaggctgtggctacagccctcggaccctgcccaagacacgctggtctacatacgccaactttcccactgttacttttccctgtatcagatgcgggaataaacctttctatagctaccctaaataaggggccttgttcttgttctggcctttt

SEQ ID NO: 272790 - DNA, 486 bp, Homo sapiens
gcatattgagcacctcttttgtgccaagtgcttttttgggtgccatctcaattaatcttcacaatagttctatgaagtagaaagtaatattcctatcttcacgttcggaaacaggttcagtaaagtgaagttgtagttggtcacatagctagttagtggcacagtcaagatagatacaatcaggtctatctgtccctgcagcttgatcacctaacaggcttgacacctgtgcgtcactggcagtacagagataattaaggtgttctcttcctactctctttaaactgttgggatttgctacacttggtgtggggttaaggggtaatttacttgaccgtggtggatacgtaggctctgttgtagaagaattgtgggttttgttgttttgttttgtttttttgagatggagtctcgctctgtcacccaggctgagattgtgccattgcacactacagcctgggcaatagtgtgagactctgtcaaaaa

SEQ ID NO: 272791 - DNA, 509 bp, Homo sapiens
cgagctcggtaccccagtccgttcgactgagcctcctgagtatctgggactacaggtgccaccaccatgctcggctaattttttgaatttttagtagagacggagtttcaccgtgtcagccagcctggtctcaaactcctgacctcaagtgatccacccacctcggcctcccaaagtgctgggattccagttaatgagcactgctcctggcctccacatttctaaaatcgaagttctgatcttttcctctggacctgccccacctgcatcttccccatctcagttaacgtcagttgcatccttcaggtgctcaggccgaaatcctcagcaccgttctttattctcctctcacattttgcaccaggaaattctgctggctctaaggccatcaaactgtgcccagaatgtggcccctcctcagcatctccagtgctaccaccgagatggtccacgatgccatcatctctcacctgcactactacaggtctccctgtttccagctcagcccc

SEQ ID NO: 272792 - DNA, 449 bp, Homo sapiens
ctcggtacaccactagtgtaggcatacttaacactactactgtactatacacttaaaaatggttaaggtggtaaattttatgttgtgtgattttaccagtgaaatatctcccaaagtgctgggattccagttaatgagcactgctcctggcctccacatttctaaaatcgaagttctgatcttttcctctggacctgccccacctgcatcttccccatctcagttaacgtcagttgcatccttcaggtgctcaggccgaaatcctcagcaccgttctttattctcctctcacattttgcaccaggaaattctgctggctctaaggccatcaaactgtgcccagaatgtggcccctcctcagcatctccagtgctaccaccgagatggtccacgatgccatcatctctcacctgcactactacaggtctccctgtttccagctcagcccc

SEQ ID NO: 272793 - DNA, 431 bp, Homo sapiens
ttcacgtgattctcctgcctcagcctcctgagtatctgggactacaggtgccaccaccatgctcggctaattttttgaatttttagtagagacggagtttcaccgtgtcagccagcctggtctcaaactcctgacctcaagtgatccacccacctcggcctcccaaagtgctgggattccagttaatgagcactgctcctggcctccacatttctaaaatcgaagttctgatcttttcctctggacctgccccacctgcatcttccccatctcagttaacgtcagttgcatccttcaggtgctcaggccgaaatcctcagcaccgttctttattctcctctcacattttgcaccaggaaattctgctggctctaaggccatcaaactgtgcccagaatgtggcccctcctcagcatctccagtgctaccac

SEQ ID NO: 272794 - DNA, 585 bp, Homo sapiens
acagggattgtgtatagtctcactgctacctcctccttctactcccccaggtcttggtttggactttgatgatagcatttactgaaacgggcctggagcctgtcgaacagcccgctgtggcagggcagggaccacctttgttcatctcagtatcccctgaactagcagagtgtctggcctgcagtgggatcgcagagaatgtggaattgacctaaatttaaatttcaagttctggacacaagcctcccaaagtgctgggattccagttaatgagcactgctcctggcctccacatttctaaaatcgaagttctgatcttttcctctggacctgccccacctgcatcttccccatctcagttaacgtcagttgcatccttcaggtgctcaggccgaaatcctcagcaccgttctttattctcctctcacattttgcaccaggaaattctgctggctctaaggccatcaaactgtgcccagaatgtggcccctcctcagcatctccagtgctaccaccgagatggtccacgatgccatcatctctcacctgcactactacaggtctccctgtttccagctcagcccc

SEQ ID NO: 272795 - DNA, 503 bp, Homo sapiens
atagaaatgttcaattcatcatgcaaaaatttttacataggtagacctcttcactatcccaagtttattttatttccatctacgcacactcattcaaaacatgcatgcaatgtatgtaggcatgcatgcacacatgcacacactcacacacacactcctcagtacatgaaaattaaagctaagtagtcataattggtcaccttttgccttataatttggattttaggaaaaataaccctctcctattttcctccttttgagaaaactgtagagaaatatattagcattctcaaatgtattggcctcatgtattttctttcttcccttgcatgtaaaccttgtagtcttgccaaggttttctaatatttgcatgtcaaacacagattatcaaccccctgggctggattcacactggcctcttggctttttacaaaacgttgcatagccttgtcactagcttgatgttaaagcaaataatgctagcatccttagtaaggcctttg

SEQ ID NO: 272796 - DNA, 286 bp, Homo sapiens
gcatgtgctcattccactcaacttggttccacctcacctaactagaaaacccttctgtcacatctttgccacacctttcttttccttaaatttcctagccctcactttcagccgtcattttgccctcagtcacaggagtcaccatcagcagctcagagtggggagagtttctattttccttggttgcttggtaatcccccactgttactgctgaggttctttcagatgtgggcagctgtgtttctggcctcttctattgaaattctaaatatagtttctaaccaaa

SEQ ID NO: 272797 - DNA, 359 bp, Homo sapiens
catttttatcatacaagcccctcatttccatgccctgccctttctccagttcattcttctccccaagatggcagaaaatcctcctttcaggccgggcgcggtggctcacgcctgtaatcccagcactttgggaggccgaggcaggcggatcacgaggtcaggagatcgagaccacggtgaaaccccgtctctactaaaaatacaaaaaattagccgggcgcagtggcgggcgcctgtagtcccagctactcgggaggctgaggcaggagaatggcgtgaatccggaaggcggagcttgcagtgagcggagatcgcgccacagcactcccgcctgggcgacagaacgagactccgtctca

SEQ ID NO: 272798 - DNA, 516 bp, Homo sapiens
tgcatgtggatgggcttccttgcttggaatctgctctcttctccctttatcctactttgcagaacttctgaagtagctttaagccgctgtctggctctgtgaccctgggagagccacttgctttgttaaacatcgattttcctgtctgtaaagtgaagggacaggaccctttcagctgacacattctgtgaaataagattttatttttacattttgataaagcatattaggggctttatagtaggatgtgatttaaggaatttgcttattctaattgagacacaatggtggggagtgggggtcggggactacacaggtgcattttctgaacatttataaaatgaaaaagatggaggcttggctagaatggttaatccccttttcattcctctaattctatgacaatttttcttaaaaaaccaaacacaaccaaaataagagtggacagttgagaattacctttaggttcccatgaccctgaagactgtatttggccttggatccattaaaaaaaaa

SEQ ID NO: 272799 - DNA, 178 bp, Homo sapiens
acagtttacagttttcaatctgtttactagcagtctctggcatcttctacacacagtcaaaccaaccacagcttgccctcccgtcagcccaggcagctgcggaccgctttctgattgatgtgaatcctcctcactgcacgtctcctcattcttactgatttggccaagccatactgcg

SEQ ID NO: 272800 - DNA, 202 bp, Homo sapiens
ctattaacaggtgaattgatgtttattacacataaattatacagataagtaaaaataaaaattttaaatatcccataattctagtacccgtaggccacaattgtatgttttgtaaaatctttcagacatttctacaaaaaataggttcatacctattaagttataatctacttttttcacttaaaaattggaagtatcttac

SEQ ID NO: 272801 - DNA, 277 bp, Homo sapiens
agttttccctgttcgtgggagggtcgtagttgatgactaaagaaagctgctgcacatcaatgcctctgggcagcaggtcagtggtaatcaaaactctgctagagccagaacgatactccctcatgaccacatctcgttccttttggtccatatctccatgcatggcagagacagtaaaatcttgggcatgcatcttctgggttagccagtcctccttccttcaggtgttgatgaagatgactgcctgggtgatggtcagggtttcattcaagtcaca

SEQ ID NO: 272802 - DNA, 407 bp, Homo sapiens
ctctatcactacatatacgctatcactacatatactctatcactgcatatactctatcactgcatataccctatcactgcatataccctatcactacatatactctatcactgcatatactctatcactacatatacactatcactacatatactctatcactgcatatactctaccactgcatatactctatcactgcatatactctatcactgcatatactctacatatatgctatcactacatatactctatcactgcatatactctatcactgcatacactctacatatatgctatcactgcatatactctatcactgcatacactctatcactgcatacactctatcactgcatacactctatcactacatatatgctatcactgcatatactctatcactg

SEQ ID NO: 272803 - DNA, 379 bp, Homo sapiens
aggctccctactcccattgcacctgtacctggaccttgtggaccctccagaagatgaagtccaatccagaaagccgtgatcatggttggatcacaatcctgtgattttcttcttccccacaccatttctgttgctttcggagagctgagcagatcctaagcacacgactcccacacagacatgcacggccatccattaatcagtattgagtatctacggacagcacagccctacgctgggctctcaccaggcagacaaatatttagtcatgaaaatgatttccaaatccagcagcacttaagcagaaatagcatttcttagaacaggaaaaaataataataaattaacaaacccgaggactgtctagagaatcagacat

SEQ ID NO: 272804 - DNA, 418 bp, Homo sapiens
atgggttcttctggagtcttctgaacctgctgggcatttctgactggatgaaaattaacaaaagtctatgttcatcctgatgaaaattagcagcagttcatcttagtttaattgccacaacgtgcagctatgagaaggctgataaagaaaagaaaactcaaatcttacaaaaatctatcagcataaaaggacaagagctttacaagatagataagagaaaaaaatcatttgccaaacctcggggcaggttctgagggagaatgtacaactttattttgatggcaggaatatatttgctggatgaaaaaaaaaatcctgccttggcatcatgggtactgtttgtagcctacaacttgaggtttttgcactggggactgaaaaagttatcagtgttaataaaaagaagttttcctgagaa

SEQ ID NO: 272805 - DNA, 489 bp, Homo sapiens
acatcagggaatacattgggaaaagggcctcccagcatgtgagtcagagcatcacagaagagattgagaccctgatgggagtcctggacaaggacgatggggagagcaccgccagcagcgggggtgggtactggaagatttaaaagctgccccctccatctcaccacctacaaactctcacacgtcctggaagatggggggaccctctccaccatcaccacttggctgaaggtggtccagacgtgaagccaaggattccagggcgcacagccttgggcaggactaatggacttaaaaaacataggctcaacaaaatccacttcacaacccagatggttcacatcacaccctctttcaaggacccagagcagccactggaagagaaggagtaggaacgctctcttaaagtctacttatcctattccttcaaattaagaccaaagtccaatgtatttaggtaaaaaataatttcttttagaaaatgctaag

SEQ ID NO: 272806 - DNA, 483 bp, Homo sapiens
acaaattttagtcctggaggatgctaatacagtttaaaaaaaaaaaacttgagacaaaataagtttaacagtttatttgagccaagagagctgcactctgcagggtgaacagcaagattctatagatgaaacacccaagagaggtagagaaattacttgattggctacagctaggcattttggcttatttgggtatgatccagtggctagaggttagttagtggtttctgataggttaagcttaagttttattttactgtttatgttgaattgggttttggcctgcttacctgggggctatagctacagtgacaacctcaggctaatggcctcagtatttgctttaaagatatatattggccgggtgctgtggctcacgcccgttaccctagcactttgggaggccaagaccggtggattgcctgagctcaggagtttgagaccagcctgggcaacatggtaaaaccccatctatacttcaaa

SEQ ID NO: 272807 - DNA, 460 bp, Homo sapiens
attgaatattcttacacatttatttggtgaagaacttttatttcaaattatgaaagaaaaaaatacttgctagaattctgatttgaagtgctttcaaattctgtgttaatttggagctgacaccctttaatattgagtcctggctttgagggtctggtgcgtttcctccattcactgaagttttattttacatctctcagtaaagctttatggattagggtcttcagaagccttacttgtttttctggctctattttcttgtccagaaactccaccactgtgctaaagagacagtggtggaggtgctgggcgtgctgcttttctcctggctctaatgggaaggccaagaggcaggtcagggtcagactccaccttgagtctggcattggctgttggcatcatgaggaccccacgtattgtactttgataaagttaataaatggaattctcctttacctca

SEQ ID NO: 272808 - DNA, 407 bp, Homo sapiens
tttctcactgctcttttgcatatgtaattctgcttgactgcagttcttgcctattccttcttggacaatgtttcccagaaaatcttgtcatctgtcacttgtaattatcttggcacgaccgtttcttttctgaaaggtaccgcttacatgctgcctcctggaggcgcttttttctgattcttttctctcttagtctccttattccccataaataattgttcactcctcttaacaggaaataatctttgtctatgcatctgttatggctgtctcaatctgctactcggtatttgtatacctattaacgtctctgttggaagctccttgcaagctaagtccatgtctgattaatcaggatttacagtatctagcactaaccagagctttaaaaaaataataataaaata

SEQ ID NO: 272809 - DNA, 763 bp, Homo sapiens
ttaaaaatatgttatttacaatttttttgtaattgatttttgctttacatgagagtgtatagagccatctactttacagttgaatcttctttatagatattaatccagtggaaaaatttgaaacgttttctgatacagggtcttgctctgttgccaggctggagtgcagtggcacgatcctggctcactgcaatcttgaactcctggactcagggaatcctaccacctcagccttctgagtagctaggactacaggcccatgccaccaaacctcaccaattttttgttttaagagacagagtcttgggccaggcacagtggctcacgcctgtaatcccagcactttgggaggccgaggtgggcggatcatgaggtcaggagattgagatcatcctggctaatacggtgaaaccccgtctctactaaaaatacaaaaaattggccgggtgttgtggcgggcgcctgtggtcacagctacttgggaggctgaggcaggagaatggcatgaacccgggaggcggagcttgcagtgagcagagatggtgccactgcactccagcctgggtgacagtgacactccatctcaaaaaaaaaaaagaaaaagaaaaagtgtaaatctatggtttttaatgggactgaaagtcagcaaaatatcaatgacaattatgattatgactgggtgttctgctaataggctattgatgtttggatgactaataaagacgtacacaattcataattataatatatgcatttcataaaa

SEQ ID NO: 272810 - DNA, 597 bp, Homo sapiens
tacctgactgcaagagtgaagtgagatgaagcttgtaacatgccagcactgtgtctggcccacagtagccacttgtcagtgtgtgatggtgtagctggcaggaacgtgtggacagtggtatggtgcggtcagactgagcgtacagagcaatgggagagataagctaactgagttagccaggtgtgtgggtatccagcagtgtgtgttgaacacctgtatgcaaagtcctgcctggaagctctgttcagggaacttctgaggccgtcctggctacagttgcagagccaggaaccagggtaatgcagaaagaatgggaggaggaggaactgttaggggtgtggaaggcacagttaggattagggggtgacagtaagtagccaaagccaccttctgcagcccagctgggtctgtgacctgctaccaccctctttttgtaagaatacttcttttagttgaaaaagtaaaacttgggcattgtttaaaaaaagagaaaaagaaggaagagtataaagggtactttagcaaaaagtgctcttgcctctctccctccctcctgtatggttgaaggccgagtcagctcggtagaatgactgtcac

SEQ ID NO: 272811 - DNA, 380 bp, Homo sapiens
ggtaaagttattttaaaaattctgtatctgtatctttctggcaaagttattttaaaaattccctacctgtgtctttcttcagctaccttttaattggtgacatctccatcaaagaagtagaagtccataaaagaaaataaagcttttgggaacactgaccccattttctaaagtttgtgttctctgattggccattcccagctttctacttgcataaactctgtattctgatccttttgatggcttcaggttgacaatgtcaagagaggcaatttagcagagtagtcactagtttaccagtgattttcctcagcaggagttagcctaggatttttaaactacattttccctctcccctatccctatctccctagaagaat

SEQ ID NO: 272812 - DNA, 472 bp, Homo sapiens
gtcatgtatcactttctaaatatatgaaattgctcataggatatcattacctcaaattcaactgtgctcaaaatgaaacctgtgatcatttttcccaacatgatcctctttctgttttctccagtttagtttgtgcctccaaaattcagcccttcacacaaactagaaatgggagagtcaagcttgacagtttctaatctcgccctctgtcttagactgctaagacaaaatactgtagattgggtggcttgagcagcagactttgatttctccagttctggaggcctgcaagtccaagatcaaaatgctttcagatttggttcctgatgaggtctgtattaatccattttcatactgctatgaagaaatacccaagactgggtaatttataaataaagagaggtttaatggattcccagttccacacagctggggaggcctcacaatcacagtggaaggtgaaagaggagca

SEQ ID NO: 272813 - DNA, 772 bp, Homo sapiens
agattcttccaggccaggcgtggaagtggcataaacacttctgtccacattctgttgtccagatcacagtcagatggcccccctccccacaggggactgggaaatgtccctcattgggctgccacttcccagcagcagctctgttgtgactattaggagttcactatatattctgattactcatcccttatcaggtatataatgtgcaaatgttttcccccattccatgggcttatgaagttcattttgcctattttttcttttgtaacatgagcctttggtgccctgactatatctcttttgacaataaaatattttccttcttttttacagctaaaattgagaataaactaggttttatagaaattcctaaaagtcagttgctgtattaatctatcctaaagatccatattgagtgggaagaaaaagggaaaacaactttcatctttaaaattactttatgtagaaggttcttggttatctcatagactgtggcttcacacattaagctaattgataatatgctaagtttttaagaatcttttaaaaacttggtctgataggattctgtaattgagctaatcgattctattgtcaatctaaaaaaagatatcagagaaaaatatctctgaatttaatgaatgaattagggagtaagcaaagaggattataatttgggatgcacagccatggcgagccacaggtgcacccgaaaaggggaaaggaagaggaagcttttatttggcagacagggagaggttcacataagctg

SEQ ID NO: 272814 - DNA, 425 bp, Homo sapiens
accagtagccccagggtgttacttgaatataatatggttaatttgttagttgttaatgggatgaatctggaaccagtgccagcttttattttatttccagcaaatttagctcttgcttttgcaactgtgtagataaggggtcagcaaacttacactgaaaaaggccaggaagtattttaggttttgctcaccagattgactatgtcataatactcatttctgtcattgaagtcaaaaagcagccatagacagtatgttgacaaatggatgtggctgcgtttcaataaaactttacaaaaacaggatgcaggctggatttagcccatgggctatggtttgccaattgctggtatagataaaaatcaaactcggctatcagaaaattataaatcaaatattctcctgggtggtgagggaaaatagag

SEQ ID NO: 272815 - DNA, 470 bp, Homo sapiens
acaccaatctaagacaggaaatgacttgcctgaggtcacaccttgttcgggagagagccaggacaagattctgggactttggactccgtgtgctgtgtttgtgactccctactgccatagtgatgactagggtcagctggggtggcccagtgtcagcttgggtcaaaggcagatcaggtgcttgtggtggttaaagcccaaagggaaagacaatcctcttttcaataataacggggagctgggcatgtcccattctgaacgtgaaccatgggagctgagggcccttaggccttcgaaggccatgcccgggaagcagccactctctctcctacagaacatcaactttggagtctccaggtttaaatcctggctgtaccacataccattagtgacaactagggcaaagtaccttgaacctcagtttccttctctgtaacttcggaataaaaacattaatattgtagtatagt

SEQ ID NO: 272816 - DNA, 259 bp, Homo sapiens
gaagaaactataccaagaaagtatacattgaaaccaaggtgaaagaattttcaaaaagggagatatgatacagaacactgcaaaaaagtcaaaagaattttggttgatgaactaacattggattcagcaacactgaggtcattagtgtctttgaagagggcaatttcgtgtagtggtaaaatgatagtactgggtccattatagttcttgagaaaatcatcaatagtatttcttttcttttctttctttttttttttaa

SEQ ID NO: 272817 - DNA, 512 bp, Homo sapiens
ggagaactgcttgaacccgggaggcagaggttgcagtgagccaagatggcggcattgcaagccagcctgggggacaaggctgagacttcatatcacaacaaaacaaaagaaaaaaccaaaacagaacaaaaaaactgcaggaaaaaaaattaaatagttggagtggccttagggtgtgccaaaatattctttaatataactatgccattacattttattccttaatctaaatatttgagctcagaaaccttagtacattatcttttatgacaaggtaaaataaaatcacctaaagttattattgggttatcttcctaatattatgagaagattttttgtatataattcttattcttgcccagcagaagtacaaatcaactttagatcttagaatggatgtgaaattaaaatagtaaaatcctagtatttcctcgtattgtgcaatcgaattttattaaaggccagaataaattttcatgtagtcaatgtaaatattgcttatttatgtaact

SEQ ID NO: 272818 - DNA, 750 bp, Homo sapiens
tggggtcagggcctgggccatggagcttgcagaggcaaggatgaagatgaggaatggatgcctgtcaccaagttgggctacctggtcaaggacatgaagatcaagtccctggaggaaatctagcccttctccttgaccatcgaggagtctgagatcattgactttttcctgggggcatctctcaaggatgaggttttgaagaccacgcccgtgcaaaagcagacctgcgctgaccagcataccaggttcaagaaacctgtgtttgcatttcagatgtctcttaacttactgaggaaatcattaccaacctcactgggtggacaggaggatgaacaggagaacttcagcaaattgtagttcttgttctatccctgaactaacccaacattcaaagtcactcatctgatgcttcccacctggcaccctgcacttgtatgtatttttccattcatattcatttctgcctcttcatctagattacacagcaacaatgtaaattaatgactactcaagagtcagacagacatgagttcaaatcctacctttgctacttactacatgtgtgtcctgaggcaagataaagcctctgagctcagtttctctgtcagtaaaaaggacctatctcctagtgttataggattaaatcagatgatacatgtaaaatctttagcttgggggtctgtcacgtaactgagcaatgggtgactatgttgtaattattacaccctcctgacatgcacacggtaggag

SEQ ID NO: 272819 - DNA, 729 bp, Homo sapiens
tggggtcagggcctgggccatggagcttgcagaggcaaggatgaagatgaggaatggatgcctgtcaccaagttgggctacctggtcaaggacatgaagatcaagtccctggaggaaatctagcccttctccttgaccatcgaggagtctgagatcattgactttttcctgggggcatctctcaaggatgaggttttgaagaccacgcccgtgcaaaagcagacctgcgctgaccagcataccaggttcaagatgtctcttaacttactgaggaaatcattaccaacctcactgggtggacaggaggatgaacaggagaacttcagcaaattgtagttcttgttctatccctgaactaacccaacattcaaagtcactcatctgatgcttcccacctggcaccctgcacttgtatgtatttttccattcatattcatttctgcctcttcatctagattacacagcaacaatgtaaattaatgactactcaagagtcagacagacatgagttcaaatcctacctttgctacttactacatgtgtgtcctgaggcaagataaagcctctgagctcagtttctctgtcagtaaaaaggacctatctcctagtgttataggattaaatcagatgatacatgtaaaatctttagcttgggggtctgtcacgtaactgagcaatgggtgactatgttgtaattattacaccctcctgacatgcacacggtaggag

SEQ ID NO: 272820 - DNA, 550 bp, Homo sapiens
ctatgaagctcaagcaggataattacaaagaaactacaactaggcacatcattgtaaaactgctgaaaaaccaaggcagagagaagtaagcagatttacgaaggggaaagagaagagattacttcaaaagagatgcaataagagctatattgtttcatagaaacaatgaaattcagatccttaaagggcagaaagaagtatttccaacctagaaattctatatatacccagcgaaaatatctcttaaaaagatatccaaggctgggcgtgacggctcacgcctataatcccaatactttgggaggccaaggcaggtggataacctgaggtcaggagttcgagacaagcctggccaacatggagaaaccctgtctatactaaaaatacaaaaattagccgggcgtggtggcatgtgcctgtaatcccagctactagggaggctgaggcaggagaatcacttgaatccaggaggtggagattgcagtgagccaagatcatgccactgcactccagcctgggcaatggagcaagactctatctcaaaaaaaaa

SEQ ID NO: 272821 - DNA, 510 bp, Homo sapiens
aagcagttaatacagactcaacttactaaactcagggataagagaagtgacaacactactgaccttctagaaataaaaaggatagcaaagaaatactatgaacaattatatgccagcaaattagataacctacatgtagaggagaaattcctagaaagatgcaaagggccaaaatagactcaagaagaaatagaatatctgaatagacttataagtaaatacactgaatttgtaacataaaaattttccacaaagaaaagcccaagaacagatgacttctctggaggattctatcaaatgttttaaagtctaattaccaccaatccttcacaaattcttccaaaaaacagaagggactagaacacttcccactgagtctgtattaactgcttgccaagcagttaatacagactcaccaagccacagacttgtcttccacaagcacgttcttaccttagccacgaagtgaccaagccacacgtactacaggttgaactcaaagatatgtac

SEQ ID NO: 272822 - DNA, 292 bp, Homo sapiens
ccacagtataatgaatatgatgatcttaaatctactgttaacagtttaaaaccattatttgggtcataaagaggaagcagtcactgagaattcagtctatgtattttttcttttttcttgtttttgaagagacctttttcactgacaggatctcattctgtcacccaggctgcagtgcagtgacatgatcctagctcactgaagcctcgaactcctcggctcaagtcatcctgcgacctcagcacttgaggcacatgccatcctgcccagctaaatttttttagagatgggg

SEQ ID NO: 272823 - DNA, 598 bp, Homo sapiens
aggcctgccctgcctgacctactcttgtgaggccaaggccatctcctccactctctgggggcctcttctgactcctccaaactcttccatgtctggactcctggcttctgcccaaggccatctattggagtttgggtttccagttgaggatctgcctttttcctggatgaccaaacctagaatgtgaccggcctcatgctccctcctcacaagggtgtggctttatccgagggcctcagcaaggcaaccaacaccagacatgaagctggaggagattttaaaaggaagtctctggtggtttgtaaagcaacaaatcctgctctcaagtggatagttccaagccctctcaatgaattcagttttatacacctggagaagcacagcctcgtcctttccatggagctacaagccacatctgggggcgctcagtgcccaggctgagggggcacgcagagccctcggggacgactcaatgcacagaggccactccttaagggcccggctccctcaaactgaggtgtccccatgcttggtcttcccacagaagccagcctggttggctgcttcaaaggaggaataaagatgaggagccatgaaa

SEQ ID NO: 272824 - DNA, 436 bp, Homo sapiens
aggcctgccctgcctgacctactcttgtgaggccaaggccatctcctccactctctgggggcctcttctgactcctccaaactcttccatgtctggactcctggcttctgcccaaggccatctattggagtttgggtttccagttgaggatctgcctttttcctggatgaccaaacctagaatgtgaccggcctcatgctccctcctcacaagggtgtggctttatccgagggcctcagcaaggcaaccaacaccagacatgaagctgagcacactcagctcatcctgggagacaaggtgggggtggaggatggtccatccttcttccgcatcaagatgggaagtcttgactcattacccgctggagacttttcctgctgggctctgcactgtcaactgtgagagagggaaataaaacgtactgtacagtccaatc

SEQ ID NO: 272825 - DNA, 558 bp, Homo sapiens
tcagagagcatggaagtgagatggagaggccagcactgatctgtatcgtgcagccctgggcggcagcctcggttgggcccttgacacactcctcccatccaggcccccagccaccctgtgagggaggcactattacgcccaaaaatgcaggcaaggaaatgggctgagggaggggaagcattcactgaagttagtttgtacgtggctgagctggccctgaagcccatgccctttccacttgccagacagatgggaagtcttgactcattacccgctggagacttttcctgctgggctctgcactgtcaactgtgagagagggaaataaaacgtactgtacagtccaatctgggatacttctgagagtgaaagtggctctactagtaattaccccaggacagcatgtataaaccagggctgttccaagcaactgggacacatgattaaaatgcagattccatggcaggtcccgctcagaggtttatttagtgggtcagaaaatgggcccaggaatttcattttaacaaatgtctccagataaatctgatgtaaatggaa

SEQ ID NO: 272826 - DNA, 370 bp, Homo sapiens
tattcttagacactgctgatcgatctgtacattggaccgatctgtacattggactgatctgtacattggaccagtctcttgagggaacgttttgggccatgcatcctgaacccaccccctgctccttggacccagtactttcacttctaggaatccgtcctgagtagatgggaagagaaataaagatttacagatggaagtgtatcatagctttatttggtgcagttgacaattagaaatgaacctagtgttcagaagcaggaaaatacttaagtagatttcataagctacatagagaaatgtttatttatttatttacgagttggggttttactcttgttgcccaggctggagtgcaatggtgtgatct

SEQ ID NO: 272827 - DNA, 210 bp, Homo sapiens
tttttttttgctatgattctcgtgataaaaaactgtttaaccctttccataaatctgcaagctgggttcctttgcacagatgacgaagttaaagatcagagaggttaagtaactcattcaaggccacacagccagtaaatgttggaggcggtatttttgagcctagatggtttcactccagattccatgtgtttagcaggaacactgttc

SEQ ID NO: 272828 - DNA, 461 bp, Homo sapiens
taggttgagagctgattcccaataacatgcctcattgatttgactctaagcagtaatcaggggcccaacagttgttggaccaaccagccttgattttccagagaaggtgatttggtatatggtagtgtctgagggtgagattgccccagatgggagtggagggaagcagaacagttttctctggtgttttactgagtttttgtcttgatcctaaatccaagggttagggtcagaaacacagactcagaggttagatttaacacccatttagtgggttaaacacatcaatggttatgtgaactttgttaaggtttaaaaagctatttagggcctgtttctccctcataggaatttttgcaatcagcctttttagtagatgcccatatagaaagtgaatttgggagggtctaaggtggtattactattaaactttttgaaaaggctgtgtgatagcaatggaa

SEQ ID NO: 272829 - DNA, 367 bp, Homo sapiens
tgctctaaaacattctgaagaatgtgcacttttgaaaattttccataatagatggtttaagaaaaacagtgtctacccccacgtgtctaagcgtctggcccattatcatgcaaagcagcatttggcttcttttatcttttgttctctttgttactcgggctaaaactacacatcaacgctcctgcaatattgctaacttctttccttatgctagaaaacttctttttgatagcataattcatttaaatatgtttagattagctgatagtatttttatttaaaatatttattttaaaattgtatatttgtgtatgtttgtatttatatatttgtatataataaattaaattataatttaaaataaaat

SEQ ID NO: 272830 - DNA, 386 bp, Homo sapiens
tgcctttggactaggcctgtggaaggaggagttattcattcccttaagttttcgggagaatctttcagggatataaaacattcttattggggttgctgctgggtcctcagatatcagtgagggagaaaagtgcaccgtttaggttccatctgaatgcttcatcagctctctgaagaacataattttaaaatccccactgaaaaaggatggaattaatagcctggaataatttagaaagatgtgtatgtaaaggaattaattcaaagaaatgtgtcttctagaatgctaaagagacagtatttaaatagactgctagaaattacaaaacatgggcatcatatgtggcttgaactttgcataaaacatgtttttcatgattagattca

SEQ ID NO: 272831 - DNA, 401 bp, Homo sapiens
tcaggaatttttgcatttctgcctctgccctgaattctaaacaatctttcaaatcctttatcttatccttgggcagcccctcctcttccacattgctggtcactgggtatcttcactgtgacagaattaaagaaaaatgtgaaatttattgttatccatggtgaagatttctacaaaagacagtcttcctcccaaggtttgaggtgggaggccaagataagcctcctcccaaatgtgggggaagagctccaaattctactctagcaagggtttgctctgtaatgaggccccagcttgaagtgagatgatacagagaaaacatttgttggaatttcactcagtgctgttacatggttcttggtgtgttgtaaataaattatttttatatttcaagccaaatc

SEQ ID NO: 272832 - DNA, 552 bp, Homo sapiens
tgttttttactataaggaataaactttcatgtttgatacactaaaaagaggtcaccactcccacctaatctgtacttttgattatctttctttgtggctgccagtagaaatttattctcatttgatctctgcaaccaccctccttatgatgaagaaaaagtttacctaggtttaacagcccgtggttgctcataccatattatctaaagccaagtgagtctgacttcagaatccatgttgtgtatcaaggcgctaacattctgtacttgtggcttcatagtgttggaaaggttaaaaccagtgtgttgtaattaataactctctgttaataaggctcattctccaaagctggccagactcagatccacccctgttctatactgtctcagaagcatttctaaagatgagctcacaaccatgaaaagtgtttgatttggggaatgtgtgtttccgaaatcatctaagtcaagaataagtataggacttggtacataacagatgttccaaagtttcgaagagaataagctgcctccttaatctttagttttttaa

SEQ ID NO: 272833 - DNA, 595 bp, Homo sapiens
tagttccagaacatttcatctttccaaaaggagaccccatccccatcagcagccactgcccattcccctgccccgagcccctgacatccagtcaactgctttctgcctctgtatttccctcgtgcttcattcctttttatggctctgtaatactccattgcgtgggtagctacgttttgtttctatctcttggtggacatctgggctgtggctgccttatagagattgtgagcaatgctgctctgaacatttgtgtacaagtttttgttccgtgtccctgttgacaaacctttcttgaggttaaattgacaacatggaaaaaaccttaacccacttatcctgagggagggtgggaatagtgatttcatctgcgttggttttagtagtagcaaaaacccagcccccactgaatgtcaacacaaggaaactggtcacgtaaatataaacagcagacgtcccagacgagctgggtgtggttccaggacatgggtcctgcctggtttctgccagaatcattgttcatggtgacctccatttcctggtcaccaagtaaggctgttcatcataaagtggaaaaaaagctggaaaaaaaata

SEQ ID NO: 272834 - DNA, 601 bp, Homo sapiens
gaggcctgaggagagagatgggggtgtggccagtccgtggatcagtcagaacacacacaacatttgtgggttaagtctgctatcttatataggtgtggtttgtagctcaccctcaaaattatgaagtaacatcaaagatcattgatcacagatgaccataacagatataataatgatgagaaagtttgaaatattgtgagaattaccaaaatgtggtacaaggacacaatgtgagcacatgcttttgggaaaatggtaccaatagacttgctgaatgtagagttgccacaaaccttcaatttgtaaaaaatgcaatatctagctgggtgcagtggctcatgcctataattccagcgctttgggaggccaaatcaggaggatgactggagcctaggagattgaggttacaattagctatgatcataccacctgtattacagcctagacaacagagcaaaacactgttccttaaaaaaaaaaaaaagctaatatctgcaaagcacaataaagcaaagcacaataaaatgagatatgcctgtatacacagagaattaaaataactgattgtatgcaagtttaaaaatacttagaaaaaaaaaaa

SEQ ID NO: 272835 - DNA, 366 bp, Homo sapiens
ttttcccccatcacccacgctggagtgtagtgatataatcatagctcattgcagcctccagctcccaggctcaagcaatcctccctcctcagcctctcgagtagctgggactacaggggtgcatcaccatgcccagctcatttaaaaaaatttttttgtagagatgaggtcttgctatgttgcccaggctggccttgaacccctggcctcaagcaatcctcccgcttcagcctcccaaagtgctgggattatacgtgtgagccaccatgtctggcctctcctccccacccccacaggcccactatctttttgttgttatagttgcttttcaaattgtggtaaaatacacaaaacataaaatttgcc

SEQ ID NO: 272836 - DNA, 14536 bp, Homo sapiens
ggagttttccaccatgactattgccctgctgggttttgccatattcttgctccattgtgcgacctgtgagaagcctctagaagggattctctcctcctctgcttggcacttcacacactcccattacaatgccaccatctatgaaaattcttctcccaagacctatgtggagagcttcgagaaaatgggcatctacctcgcggagccacagtgggcagtgaggtaccggatcatctctggggatgtggccaatgtatttaaaactgaggagtatgtggtgggcaacttctgcttcctaagaataaggacaaagagcagcaacacagctcttctgaacagagaggtgcgagacagctacaccctcatcatccaagccacagagaagaccttggagttggaagctttgacccgtgtggtggtccacatcctggaccagaatgacctgaagcctctcttctctccaccttcgtacagagtcaccatctctgaggacatgcccctgaagagccccatctgcaaggtgactgccacagatgctgatctaggccagaatgctgagttctattatgcctttaacacaaggtcagagatgtttgccatccatcccaccagcggtgtggtcactgtggctgggaagcttaacgtcacctggcgaggaaagcatgagctccaggtgctagctgtggaccgcatgcggaaaatctctgagggcaatgggtttggcagcctggctgcacttgtggttcatgtggagcctgccctcaggaagcccccagccattgcttcggtggtggtgactccaccagacagcaatgatggtaccacctatgccactgtactggtcgatgcaaatagctcaggagctgaagtggagtcagtggaagttgttggtggtgaccctggaaagcacttcaaagccatcaagtcttatgcccggagcaatgagttcagtttggtgtctgtcaaagacatcaactggatggagtaccttcatgggttcaacctcagcctccaggccaggagtgggagcggcccttatttttattcccagatcaggggctttcacctaccaccttccaaactgtcttccctcaaattcgagaaggctgtttacagagtgcagcttagtgagttttcccctcctggcagccgcgtggtgatggtgagagtcaccccagccttccccaacctgcagtatgttctaaagccatcttcagagaatgtaggatttaaacttaatgctcgaactgggttgatcaccaccacaaagctcatggacttccacgacagagcccactatcagctacacatcagaacctcaccgggccaggcctccaccgtggtggtcattgacattgtggactgcaacaaccatgcccccctcttcaacaggtcttcctatgatggtaccttggatgagaacatccctccaggcaccagtgttttggctgtgactgccactgaccgggatcatggggaaaatggatatgtcacctattccattgctggaccaaaagctttgccattttctattgacccctacctggggatcatctccacctccaaacccatggactatgaactcatgaaaagaatttataccttccgggtaagagcatcagactggggatccccttttcgccgggagaaggaagtgtccatttttcttcagctcaggaacttgaatgacaaccagcctatgtttgaagaagtcaactgtacagggtctatccgccaagactggccagtagggaaatcgataatgactatgtcagccatagatgtggatgagcttcagaacctaaaatacgagattgtatcaggcaatgaactagagtattttgatctaaatcatttctccggagtgatatccctcaaacgcccttttatcaatcttactgctggtcaacccaccagttattccctgaagattacagcctcagatggcaaaaactatgcctcacccacaactttgaatattactgtggtgaaggaccctcattttgaagttcctgtaacatgtgataaaacaggggtattgacacaattcacaaagactatcctccactttattgggcttcagaaccaggagtccagtgatgaggaattcacttctttaagcacatatcagattaatcattacaccccacagtttgaggaccacttcccccaatccattgatgtccttgagagtgtccctatcaacacccccttggcccgcctagcagccactgaccctgatgctggttttaatggcaaactggtctatgtgattgcagatggcaatgaggagggctgctttgacatagagctggagacagggctgctcactgtagctgctcccttggactatgaagccaccaatttctacatcctcaatgtaacagtatatgacctgggcacaccccagaagtcctcctggaagctgctgacagtgaatgtgaaagactggaatgacaacgcacccagatttcctcccggtgggtaccagttaaccatctcggaggacacagaagttggaaccacaattgcagagctgacaaccaaagatgctgactcggaagacaatggcagggttcgctacaccctgctaagtcccacagagaagttctccctccaccctctcactggggaactggttgttacaggacacctggaccgcgaatcagagcctcggtacatactcaaggtggaggccagggatcagcccagcaaaggccaccagctcttctctgtcactgacctgataatcacattggaggatgtcaacgacaactctccccagtgcatcacagaacacaacaggctgaaggttccagaggacctgccccccgggactgtcttgacatttctggatgcctctgatcctgacctgggccccgcaggtgaagtgcgatatgttctgatggatggcgcccatgggaccttccgggtggacctgatgacaggggcgctcattctggagagagagctggactttgagaggcgagctgggtacaatctgagcctgtgggccagtgatggtgggaggcccctagcccgcaggactctctgccatgtggaggtgatcgtcctggatgtgaatgagaatctccaccctccccactttgcctccttcgtgcaccagggccaggtgcaggagaacagcccctcgggaactcaggtgattgtagtggctgcccaggacgatgacagtggcttggatggggagctccagtacttcctgcgtgctggcactggactcgcagccttcagcatcaaccaagatacaggaatgattcagactctggcacccctggaccgagaatttgcatcttactactggttgacggtattagcagtggacaggggttctgtgcccctctcttctgtaactgaagtctacatcgaggttacggatgccaatgacaacccaccccagatgtcccaagctgtgttctacccctccatccaggaggatgctcccgtgggcacctctgtgcttcaactggatgcctgggacccagactccagctccaaagggaagctgaccttcaacatcaccagtgggaactacatgggattctttatgattcaccctgttacaggtctcctatctacagcccagcagctggacagagagaacaaggatgaacacatcctggaggtgactgtgctggacaatggggaaccctcactgaagtccacctccagggtggtggtaggcatcttggacgtcaatgacaatccacctatattctcccacaagctcttcaatgtccgccttccagagaggctgagccctgtgtcccctgggcctgtgtacaggctggtggcttcagacctggatgagggtcttaatggcagagtcacctacagtatcgaggacagcgatgaggaggccttcagtatcgacctggtcacaggtgtggtttcatccagcagcacttttacagctggagagtacaacatcctaacgatcaaggcaacagacagtgggcagccaccactctcagccagtgtccggctacacattgagtggatcccttggccccggccgtcctccatccctctggcctttgatgagacctactacagctttacggtcatggagacggaccctgtgaaccacatggtgggggtcatcagcgtagagggcagacccggactcttctggttcaacatctcaggtggggataaggacatggactttgacattgagaagaccacaggcagcatcgtcattgccaggcctcttgataccaggagaaggtcgaactataacttgactgttgaggtgacagatgggtcccgcaccattgccacacaggtccacatcttcatgattgccaacattaaccaccatcggccccagtttctggaaactcgttatgaagtcagagttccccaggacaccgtgccaggggtagagctcctgcgagtccaggccatagatcaagacaagggcaaaagcctcatctataccatacatggcagccaagacccaggaagtgccagcctcttccagctggacccaagcagtggtgtcctggtaacggtgggaaaattggacctcggctcggggccctcccagcacacactgacagtcatggtccgagaccaggaaatacctatcaagaggaacttcgtgtgggtgaccattcatgtggaggatggaaacctccacccaccccgcttcactcagctccattatgaggcaagtgttcctgacaccatagcccccggcacagagctgctgcaggtccgagccatggatgctgaccggggagtcaatgctgaggtccactactccctcctgaaagggaacagcgaaggtttcttcaacatcaatgccctgctaggcatcattactctagctcaaaagcttgatcaggcaaatcatgccccacatactctgacagtgaaggcagaagatcaaggctccccacaatggcatgacctggctacagtgatcattcatgtctatccctcagataggagtgcccccatcttttcaaaatctgagtactttgtagagatccctgaatcaatccctgttggttccccaatcctccttgtctctgctatgagcccctctgaagttacctatgagttaagagagggaaataaggatggagtcttctctatgaactcatattctggccttatttccacccagaagaaattggaccatgagaaaatctcgtcttaccagctgaaaatccgaggcagcaatatggcaggtgcatttactgatgtcatggtggtggttgacataattgatgaaaatgacaatgctcctatgttcttaaagtcaacttttgtgggccaaattagtgaagcagctccactgtatagcatgatcatggataaaaacaacaacccctttgtgattcatgcctctgacagtgacaaagaagctaattccttgttggtctataaaattttggagccggaggccttgaagtttttcaaaattgatcccagcatgggaaccctaaccattgtatcagagatggattatgagagcatgccctctttccaattctgtgtctatgtccatgaccaaggaagccctgtattatttgcacccagacctgcccaagtcatcattcatgtcagagatgtgaatgattcccctcccagattctcagaacagatatatgaggtagcaatagtcgggcctatccatccaggcatggagcttctcatggtgcgggccagcgatgaagactcagaagtcaattatagcatcaaaactggcaatgctgatgaagctgttaccatccatcctgtcactggtagcatatctgtgctgaatcctgctttcctgggactctctcggaagctcaccatcagggcttctgatggcttgtatcaagacactgcgctggtaaaaatttctttgacccaagtgcttgacaaaagcttgcagtttgatcaggatgtctactgggcagctgtgaaggagaacttgcaggacagaaaggcactggtgattcttggtgcccagggcaatcatttgaatgacaccctttcctactttctcttgaatggcacagatatgtttcatatggtccagtcagcaggtgtgttgcagacaagaggtgtggcgtttgaccgggagcagcaggacactcatgagttggcagtggaagtgagggacaatcggacacctcagcgggtggctcagggtttggtcagagtctctattgaggatgtcaatgacaatccccccaaatttaagcatctgccctattacacaatcatccaagatggcacagagccaggggatgtcctctttcaggtatctgccactgatgaggacttggggacaaatggggctgttacatatgaatttgcagaagattacacatatttccgaattgacccctatcttggggacatatcactcaagaaaccctttgattatcaagctttaaataaatatcacctcaaagtcattgctcgggatggaggaacgccatccctccagagtgaggaagaggtacttgtcactgtgagaaataaatccaacccactgtttcagagtccttattacaaagtcagagtacctgaaaatatcaccctctataccccaattctccacacccaggcccggagtccagagggactccggctcatctacaacattgtggaggaagaacccttgatgctgttcaccactgacttcaagactggtgtcctaacagtaacagggcctttggactatgagtccaagaccaaacatgtgttcacagtcagagccacggatacagctctggggtcattttctgaagccacagtggaagtcctagtggaggatgtcaatgataaccctcccactttttcccaattggtctataccacttccatctcagaaggcttgcctgctcagacccctgtgatccaactgttggcttctgaccaggactcagggcggaaccgtgacgtctcttatcagattgtggaggatggctcagatgtttccaagttcttccagatcaatgggagcacaggggagatgtccacagttcaagaactggattatgaagcccaacaacactttcatgtgaaagtcagggccatggataaaggagatcccccactcactggtgaaacccttgtggttgtcaatgtgtctgatatcaatgacaaccccccagagttcagacaacctcaatatgaagccaatgtcagtgaactggcaacctgtggacacctggttcttaaagtccaggctattgaccctgacagcagagacacctcccgcctggagtacctgattctttctggcaatcaggacaggcacttcttcattaacagctcatcgggaataatttctatgttcaacctttgcaaaaagcacctggactcttcttacaatttgagggtaggtgcttctgatggagtcttccgagcaactgtgcctgtgtacatcaacactacaaatgccaacaagtacagcccagagttccagcagcacctttatgaggcagaattagcagagaatgcaatggttggaaccaaggtgattgatttgctagccatagacaaagatagtggtccctatggcactatagattatactatcatcaataaactagcaagtgagaagttctccataaaccccaatggccagattgccactctgcagaaactggatcgggaaaattcaacagagagagtcattgctattaaggtcatggctcgggatggaggaggaagagtagccttctgcacggtgaagatcatcctcacagatgaaaatgacaaccccccacagttcaaagcatctgagtacacagtatccattcaatccaatgtcagtaaagactctccggttatccaggtgttggcctatgatgcagatgaaggtcagaacgcagatgtcacctactcagtgaacccagaggacctagttaaagatgtcattgaaattaacccagtcactggtgtggtcaaggtgaaagacagcctggtgggattggaaaatcagacccttgacttcttcatcaaagcccaagatggaggccctcctcactggaactctctggtgccagtacgacttcaggtggttcctaaaaaagtatccttaccgaaattttctgaacctttgtatactttctctgcacctgaagaccttccagaggggtctgaaattgggattgttaaagcagtggcagctcaagatccagtcatctacagtctagtgcggggcactacacctgagagcaacaaggatggtgtcttctccctagacccagacacaggggtcataaaggtgaggaagcccatggaccacgaatccaccaaattgtaccagattgatgtgatggcacattgccttcagaacactgatgtggtgtccttggtctctgtcaacatccaagtgggagacgtcaatgacaataggcctgtatttgaggctgatccatataaggctgtcctcactgagaatatgccagtggggacctcagtcattcaagtgactgccattgacaaggacactgggagagatggccaggtgagctacaggctgtctgcagaccctggtagcaatgtccatgagctctttgccattgacagtgagagtggttggatcaccacactccaggaacttgactgtgagacctgccagacttatcattttcatgtggtggcctatgaccacggacagaccatccagctatcctctcaggccctggttcaggtctccattacagatgagaatgacaatgctccccgatttgcttctgaagagtacagaggatctgtggttgagaacagtgagcctggcgaactggtggcgactctaaagaccctggatgctgacatttctgagcagaacaggcaggtcacctgctacatcacagagggagaccccctgggccagtttggcatcagccaagttggagatgagtggaggatttcctcaaggaagaccctggaccgcgagcatacagccaagtacttgctcagagtcacagcatctgatggcaagttccaggcttcggtcactgtggagatctttgtcctggacgtcaatgataacagcccacagtgttcacagcttctctatactggcaaggttcatgaagatgtatttccaggacacttcattttgaaggtttctgccacagacttggacactgataccaatgctcagatcacatattctctgcatggccctggggcgcatgaattcaagctggatcctcatacaggggagctgaccacactcactgccctagaccgagaaaggaaggatgtgttcaaccttgttgccaaggcgacggatggaggtggccgatcgtgccaggcagacatcaccctccatgtggaggatgtgaatgacaatgccccgcggttcttccccagccactgtgctgtggctgtcttcgacaacaccacagtgaagacccctgtggctgtagtatttgcccgggatcccgaccaaggcgccaatgcccaggtggtttactctctgccggattcagccgaaggccacttttccatcgacgccaccacgggggtgatccgcctggaaaagccgctgcaggtcaggccccaggcaccactggagctcacggtccgtgcctctgacctgggcaccccaataccgctgtccacgctgggcaccgtcacagtctcggtggtgggcctagaagactacctgcccgtgttcctgaacaccgagcacagcgtgcaggtgcccgaggacgccccacctggcacggaggtgctgcagctggccaccctcactcgcccgggcgcagagaagaccggctaccgcgtggtcagcgggaacgagcaaggcaggttccgcctggatgctcgcacagggatcctgtatgtcaacgcaagcctggactttgagacaagccccaagtacttcctgtccattgagtgcagccggaagagctcctcttccctcagtgacgtgaccacagtcatggtcaacatcactgatgtcaatgaacaccggccccaattcccccaagatccatatagcacaagggtcttagagaatgcccttgtgggtgacgtcatcctcacggtatcagcgactgatgaagatggacccctaaatagtgacattacctatagcctcataggagggaaccagcttgggcacttcaccattcaccccaaaaagggggagctacaggtggccaaggccctggaccgggaacaggcctctagttattccctgaagctccgagccacagacagtgggcagcctccactgcatgaggacacagacatcgctatccaagtggctgatgtcaatgataacccaccgagattcttccagctcaactacagcaccactgtccaggagaactcccccattggcagcaaagtcctgcagctgatcctgagtgacccagattctccagagaatggccccccctactcgtttcgaatcaccaaggggaacaacggctctgccttccgagtgaccccggatggatggctggtgactgctgagggcctaagcaggagggctcaggaatggtatcagcttcagatccaggcgtcagacagtggcatccctcccctctcgtctttgacgtctgtccgtgtccatgtcacagagcagagccactatgcaccttctgctctcccactggagatcttcatcactgttggagaggatgagttccagggtggcatggtgggtaagatccatgccacagaccgagacccccaggacacgctgacctatagcctggcagaagaggagaccctgggcaggcacttctcagtgggtgcgcctgatggcaagattatcgccgcccagggcctgcctcgtggccactactcgttcaacgtcacggtcagcgatgggaccttcaccacgactgctggggtccatgtgtacgtgtggcatgtggggcaggaggctctgcagcaggccatgtggatgggcttctaccagctcacccccgaggagctggtgagtgaccactggcggaacctgcagaggttcctcagccataagctggacatcaaacgggctaacattcacttggccagcctccagcctgcagaggccgtggctggtgtggatgtgctcctggtctttgaggggcattctggaaccttctacgagtttcaggagctagcatccatcatcactcactcagccaaggagatggagcattcagtgggggttcagatgcggtcagctatgcccatggtgccctgccaggggccaacctgccagggtcaaatctgccataacacagtgcatctggaccccaaggttgggcccacgtacagcaccgccaggctcagcatcctaaccccgcggcaccacctgcagaggagctgctcctgcaatggtactgctacaaggttcagtggtcagagctatgtgcggtacagggccccagcggctcggaactggcacatccatttctatctgaaaacactccagccacaggccattcttctattcaccaatgaaacagcgtccgtctccctgaagctggccagtggagtgccccagctggaataccactgtctgggtggtttctatggaaacctttcctcccagcgccatgtgaatgaccacgagtggcactccatcctggtggaggagatggacgcttccattcgcctgatggttgacagcatgggcaacacctcccttgtggtcccagagaactgccgtggtctgaggcccgaaaggcacctcttgctgggcggcctcattctgttgcattcttcctcgaatgtctcccagggctttgaaggctgcctggatgctgtcgtggtcaacgaagaggctctagatctgctggcccctggcaagacggtggcaggcttgctggagacacaagccctcacccagtgctgcctccacagtgactactgcagccagaacacatgcctcaatggtgggaagtgctcatggacccatggggcaggctatgtctgcaaatgtcccccacagttctctgggaagcactgtgaacaaggaagggagaactgtacttttgcaccctgcctggaaggtggaacttgcatcctctcccccaaaggagcttcctgtaactgccctcatccttacacaggagacaggtgtgaaatggaggcgaggggttgttcagaaggacactgcctagtcactcccgagatccaaaggggggactgggggcagcaggagttactgatcatcacagtggccgtggcgttcattatcataagcactgtcgggcttctcttctactgccgccgttgcaagtctcacaagcctgtggccatggaggacccagacctcctggccaggagtgttggtgttgacacccaagccatgcctgccatcgagctcaacccattgagtgccagctcctgcaacaacctcaaccaaccggaacccagcaaggcctctgttccaaatgaactcgtcacatttggacccaattctaagcaacggccagtggtctgcagtgtgccccccagactcccgccagctgcggtcccttcccactctgacaatgagcctgtcattaagagaacctggtccagcgaggagatggtgtaccctggcggagccatggtctggccccctacttactccaggaacgaacgctgggaatacccccactccgaagtgactcagggccctctgccgccctcggctcaccgccactcaaccccagtcgtgatgccagagcctaatggcctctatgggggcttccccttccccctggagatggaaaacaagcgggcacctctcccaccccgttacagcaaccagaacctggaagatctgatgccctctcggccccctagtccccgggagcgcctggttgccccctgtctcaatgagtacacggccatcagctactaccactcgcagttccggcagggagggggagggccctgcctggcagacgggggctacaagggggtgggtatgcgcctcagccgagctgggccctcttatgctgtctgtgaggtggagggggcacctcttgcaggccagggccagccccgggtgccccccaactatgagggctctgacatggtggagagtgattatggcagctgtgaggaggtcatgttctagcttcccattcccagagcaaggcaggcgggaggccaaggactggacttggcttatttcttcctgtctcgtagggggtgagttgagtgtggctgggagagtgggagggaagccctcagcccaggctgttgtcccttgaaatgtgctcttccaatcccccacctagtccctgagggtggagggaagctgaggatagagctccagaaacagcactagggtcccaggagaggggcatttctagagcagtgaccctggaaaaccaggaacaattgactcctggggtgggcgacagacaggagggctccctgatctgccggctctcagtccccggggcaaagcctgattgactgtgctggctcaacttcaccaagatgcattctcatacctgcccacagctccattttggaggcaggcaggttggtgcctgacagacaaccactacgcgggccgtacagaggagctctagagggctgcgtggcatcctcctaggggctgagaggtgagcagcaggggagcgggcacagtcccctctgcccctgcctcagtcgagcactcactgtgtctttgtcaagtgtctgctccacgtcaggcactgtgctttgcaccggggagaaaatggtgatggagggcaacaaggactccgaggagcaccaccaggcctcgggccccagaggtcccgctcctcagcctacacgcagaggaacgggcccacctcagagtcacaccactggctgccagtcagggcctgccaggagtctacacagctctgaaccttctttgttaaagaattcagacctcatggaactctgggttcttcatcccaagtttcccaggcacttttggccaaaggaaggaaggaactaattcttcattttaaaaattcttaggcactttttgaccttgctgtctggatgagtttcctcaatgggatttttcttccctagacacaaggaagtctgaactcctatttagggccggttggaagcagggagctggaccgcagtgtccaggctggacacctgccattgcctcctctccactgcagacgcctgcccatcaagtattacctgcagcgactcaaccctatgcatggagggtcaatgtgggcacatgtctacacatgtgggtgcccatggatagtacgtgtgtacacatgtgtagagtgtatgtagccaggagtggtggggaccagaagcctctgtggcctttggtgacctcaccactccctcccacccagtccctccctctggtccactgccttttcatatgtgttgtttctggagacagaagtcaaaaggaagagcagtggagccttgcccacagggctgctgcttcatgcgagagggagatgtgtgggcgagagccaatttgtgtgagtggtttgtggctgtgtgtgtgactgtgagtgtgagtgacagatacatagtttcattggtcatttttttttttaacaataaagtatctttttttactgtt

SEQ ID NO: 272837 - DNA, 476 bp, Homo sapiens
tcagttaacagtggcatttattatttttatactaaccatgaggttcttgagcacaggttatacgttttgttcaccaccgtgcctgcagcaactggcagggtgcctgtttacagcaagccttcaagtatgcatcagatgaatgaatgactggatgagaggcctgcttggtcagaatcacaggacgctctggttcctgtcctggctgcttgggtcttcctgtctcttggccccaaacctcagttttggtgttggcctcctttcagatcaaggcaacagacagtgggcagccaccactctcagccagtgtccggctacacattgagtggatcccttggccccggccgtcctccatccctctggcctttgatgagacctactacagctttacggtcatggagacggaccctgtgaaccacatggtgggggtcatcagcgtagagggcagacccggactcttctggttcaacatctcaggt

SEQ ID NO: 272838 - DNA, 582 bp, Homo sapiens
ggcaactccagggtcactgtcctttataaggtggctcaacaatccagctacttcagtctgctagcacctccatttcactgcactgcttcagggctgccagtgcaggcaattgagcagggagcaggcccgcgggcttctaactgccttcctctggaagtgacacacatcacttctgctcacatttcattggccaaagaaagtcatgtggtcaaccttaattcaggtgagcaagctagtatcatcagaggataacaatgtatgtctataaattgttggtgagtggtcagacatggtgactcacacctgtaattccatcactttgggaggccaaggccagaggattgtttgaggctaggagtttgagaccagcctgggcaatatagcaagaccccatctctacataaaattgaaaaattagctgtgcatggtggttcacatctgtagtcataactactaggttggctaaggcaggcgatcacttgagcctgggaagtcaaagctgcagtgaaccatgattgcacggttgcaccactgcactccagcctgggcaacagactcaaaacgaaacaaaagcagaaaaaa

SEQ ID NO: 272839 - DNA, 244 bp, Homo sapiens
ctgacattggctctcttggcttcctgggacagccctcaccagcatcatgggctctcaagagcctgggatggtggctgccatccccccaggacaggagcccaccaagtcctttctggttgaggacccttgggccatcaaggatcccaactctgctcatgatggcatctgggggagcgcgggagccatggaggggaagggagccccgagcggactcactctatgatgtccctgtcggtgcggccgc

SEQ ID NO: 272840 - DNA, 508 bp, Homo sapiens
aatagaagaacatctggcctcggggacacgtttacctctaggcaaagagcaggagcgcagtattgagtattgttgtaaacaataccatttggaaacctggttccgctcctgtgagtccagcaaacgcctcaaagacgcccttttaggatttctttaaattaatctgagacaacgtgggaatactctctatatagtatctagcctactggatatgtggtttttgttgttgttgttgtttgttttatttttatttttggcacggcactgaagtctgtgtaaataaaaggcccagataaactcggcgatgggcctttctgtcaaaaccaggctggctttacatggcaaaaccagggccttacgtgtttggacacctgactttccatgtcgcccgtaaaatcgctggtagggaaacattttaatttagtaggcaccttatttttaccgagatgcttaaggctgtcacgagctactactcttgatggtagtaggaaataaacacgagcgatga

SEQ ID NO: 272841 - DNA, 415 bp, Homo sapiens
gtggttggtttatttcattcagtataatgcccttaagtttcatccatgttgtcacatattgctgaatttccttctttttaaagctaaacagtattgcattatatgtacacaacacattttctttatccatttcatctgtcagtgaacattaaaaacaataaagtaattcacaattaaataataattaaacaataaatataaatgttgataaataaaaaattaaacattacaaatccttattcataaaagtctgagaatgggcatttctcactaaccaaacatctaccatcctctcaattcctttccttctctgcctcttctctcttacctcttttactccattccaaagtatttacactcctcacattgtccgtgaataaaatccagtattaatttgggttgctttggatcttcc

SEQ ID NO: 272842 - DNA, 474 bp, Homo sapiens
gtggtatagtacttaagaataccatagacagaggactttgaaatgtaaatggcctcttagctactatcgttcttgggtgcaggttacattttattttaatttctatttaaattaggatttgctctcacctgtgctgtctttctgaagttgatttttaatttttttaaggcattctcttgtccctgcctcattacatggtattttaatgggtgaatgtttgagttagtctgtctcaacactgaattgctatctcatctggtgggtaatggaggtttaatttaaatccgtgtacagcctttctttaacttaatatgacttttggagttcttctgtgtgtatcccattttctttaaatctttaaattattacttggcaccctagaacttgtatgacctgtaaatgtgtataaaatatattgatatgattctgtagaataattcagacagataataaaaagtggaatttgttgcattg

SEQ ID NO: 272843 - DNA, 384 bp, Homo sapiens
cagtgggactgagccagccctggaccatgggctgatgcggggcaagcggctgacagagctgttgacgcaccactgtccatcaggatgcagactaaaagagctaattagcatgctgtaacaccccctcatccccagaggtggaggtggagtgggagaggggctgagaattcctgccaaccaatctccgggtctttctagtgatatctggaggccccacccagagtcacttcattaacataaactcaggtgtggtgggaaggagttccttatgaagaaagaagacgctcccacactcaggaaatcgcaagggttttagacacttggtgaccggaaccagggaccaagaccaaatatactttttgtcgtagtatagcattcaacagc

SEQ ID NO: 272844 - DNA, 751 bp, Homo sapiens
tttcttcttcttgtttctagtcatttcactggggaaagggaaatacagacaccttttaaagtaagatcaatgcatctggctttgagcacccagtgagagggcagcctgcagaggaggaacacggggttcgaaattaattagacattcctgggtttgaatctcagctctggtcctacaggtgtgtgaccttgagcaagttaagtcatagtctctcggcctcaaagtgctcagaattttaaaaccaaagataaaacccctttcacaggattactgtgaggattaaaagagaaagagtttaaggtacctaacacaataaaggctgctgctttccttcctgcgctccaactggtttaaaagcttcagtgcatctctaatgacaatgggtgaagtttattttttcagtatggaagaccctcaatgcctcctgttcattctatttcattcctcccatgaatatggatgtgccaggcactgctaggagctagaaagaagtgaggaaaggtccctgctgagagtatctcacagtcgggggaggacaaggtcacatttttaatctcccttgaggttttgacctttgttttttctaaatctccaagctaagtcattgcattctgcagatgaattgacacactttgatgcccattaaggtaacgaggttttatcatcaactctgacatctctgcaaggcactgggaggggttatgaggctcaaggccctcatccttcaagaggacgtcggggtaaccaaggg

SEQ ID NO: 272845 - DNA, 276 bp, Homo sapiens
ttttcacgttttatttgtttatttttttattatactttaagttttagggtacacgtgcacaacgtgcaggtttgttgcatgtgtatagataggttctattttcaaaggaattgttaggttatttccacatgctaagaaaagatggttctcttctacctttgccttttgtctgagacatatgcagcattttcatgataaaatcctagtgggtttactactcctttggtaagcttagacttgtgtgtttctttcctgtgtagtattagttactcatca

SEQ ID NO: 272846 - DNA, 290 bp, Homo sapiens
cttcttcatcattgcgttcatatgcaacacctgaatgactttataatggagatatattctgacatttatcaataggcttttttcttttttgcctttcccagtaacgatcaatgtcctagtcaagccaagacatctatctgcctgaggaggagatgggagataaagacaggaaaaggccgtgttacaggtggtgttcggtttctgatatgcacctcagtgctatgcatccatggaatagccttgaatgtggctagaatggaagtcttaatttttattccacagttcctaaa

SEQ ID NO: 272847 - DNA, 627 bp, Homo sapiens
ggcagccggatcccagctggaactccgccacatcccaggaatgtgaataccagtggaatccggataggacggtgtgacccaggcacagtggctcccaggggacgccaatgctgcgggctgaggcccacgctggaggaacaccggccagtgggcagctttgggtgaacttcagagtgggtggaagcgcagctgccccgcctgcccccacggctgctgcgcgatcaggaaacacagcacactcctaagtgagtcgtcaccatggtgacttttggattcccactgccagttcctgtggagtcagagagatcttagctcagaagtgctgacagcaggggctggctggccactggccacatgggaagaggagaaaggcagcaggagccaccgtgaggcaaatgagctacaagacgccgctccgtctgatttcccgccacagctcccaacacaggtgaaatggctcagaacagctcagcatgtcctactgaggggcaggaaggatgctgagaaaatcccaggcagcggtctcagctgggatgtaatttgagggcgaaaaagttgtgttgcttgcggtttcttccttgctccttgcaggttatatttgaaatgaatgtcagagccatgcggccg

SEQ ID NO: 272848 - DNA, 223 bp, Homo sapiens
cttaaagactccaggcacacctctgcacttagcagttccctgtgtctggaatgctttttccccagatattcttctagcttactgtttccattacttcagctctttacttaaaatcccctttctaagaagaagaaaaagggtaaaaagaaacccattaaggaataaccacttcctgagggagaaccatgtaccagcacaattcctagcccagagaaaatgaaga

SEQ ID NO: 272849 - DNA, 804 bp, Homo sapiens
ccagtggggcctggaacagtgccaggagtggccttgaaccccaccttgatccctctccagcaggatctggagtcacttccatgggcctggcatacaccactccagatttgccctctggcctggggagcagataaccccccgccccacataaccagctgcgctcctacacctagcaggccggctcacatcaccctttaacgcacactatattcacacacacacttgtgcacagtcttgaatgtgtgcccacacatctgcctgcacacactcatgtgcccacatgtgaatcacttggaagtgtacacaaaaccaaacccacagcacagatgggcagacaggtgagcctcgtgcagcatgtgacactcccacatgcacaagacatgtgtgcagaggcatatcacacacgcagaagcactcccgagaactgccttctcccttccagcctaggggcccctgttcccccacaaccgggcccagccctggagccccctccagcactcctctcccacccccacgctccccaagagcagcagatgtaggtctcccggctcccaaacctctgagatgctgctctgtctgaaatcatcatataaataatcattttttaatacaagggggtgggggtgtcaggcaagttccatgaaattgtgaattagccgctgctccaaataaatgcctgcttcggcccgagagcagccgcgctgcgcccgctgcgcccccaataatcgtgtgttgggtatctctccattgttccctgggccattagtcaaagggcaaattagaaacaatttcttgacgacaaaa

SEQ ID NO: 272850 - DNA, 433 bp, Homo sapiens
tttttctcaccacacccatggtgggcgtctcttgtgctgaatgtgaatccatttacattctctgcttctttgatctcattactgctaaagaaaatcatctaacagtgtcagcataatttttcagtctcattccgaaactcaaatctgcatggcagtactctcactcattcttaggcagctctctgtttgtccctatagcagctgttataggcttttaagctccctggtatcctggtcttcccactcctcctcggtctcagcaaatgatctacaggcaatgctgcacaaactctttgcacctccttcccttcacctctattcttgcccttgtctcagtgcagaggccctgcctctttccaaggttcacttctccagttggttatctgagccctgtcttcctgtaccaggggactttgctcaagtctcctatcct

SEQ ID NO: 272851 - DNA, 407 bp, Homo sapiens
gatgataggggagagtcagtcacctctgccaaagcccagagagaggagaaggagatgcagatggagcatacattaaaggtggggtcagagagcgggaaaagtgtggtgaggatgagtgaaggcatcagcacaagggaggatgctttcaaaatcaccaaatccaagcatcacagatgttctgttgttacacggattacagaaaccatgttggagctttaaacgacagaaaatgttggcatgttggtagagtctttaatataaaaatgtttgtgatatatggtagttaagacacagttatgctttggcttaatatgttacaaaattaatgggctgtagctatatattctctgattgtttggctctgttgatcaaagtagcagttatagaataaaatctatgacctgatt

SEQ ID NO: 272852 - DNA, 322 bp, Homo sapiens
cgatgtgggctccattctcaggctttccctttctggtagcacaagagctgctagagttccaggctttgtcttgccatcagctcctaggggaatagcttgcatatttcaataatgtctactggcttggggtcgctttgaccctgattaatctgacttgggtgccatgctcatctctgcacccatccttctgttctgggtcacatgcctacctctggaaaaagtgagggcagctccacctgaaccacggagattgagaattgggaaggagtgtatcacctcacgtcaggtgctgtgtcagacagaggagcactgcttggtgagg

SEQ ID NO: 272853 - DNA, 214 bp, Homo sapiens
accacggacaccaacaatttccagagataaaaataagagataacacattccgagaagtcaagtgacgaaaaaccactccaaatgactgaacggccccagatcgtattccaatgggagtctgagaacaaggaatcagaagggctcctggctgaggctgtactgtcctcacatttgggcccaggaggagactatggagggccagggagtgggtggg

SEQ ID NO: 272854 - DNA, 524 bp, Homo sapiens
agactccctaaaaataatatcaggtcgtgcacagtggctcacgcctataatctcagcactttgggaggctgaggcgggaggattgattaagcccgggaatctaaggttatagcaagctctgattgtgccactgcactccagcctggatgacgaagtgagaccctatctctaaaataaaattatatatataaaatatatatacatataaatatatattatatatacatatataaatatatattatatataatgtagtgggtgttgatttacatacatatgtaaatcttaccagctcacatttatgtgccagctctgtgccaatagatttcaacagatgtataccagggagagagaattttacttgtgcaggtaactatgtctcattccactcaatggctactctagacagtgcaagtcagtaaaagacagaaatctgttatctcaattggtgtttgatttcttgatgccttgtttgatattagtttcctactgcattgaatatgattctagtatttaaagatacg

SEQ ID NO: 272855 - DNA, 322 bp, Homo sapiens
aaaaagaaaccactgccaatgaacatggatatcattgaagggtgctaagcagatctgatttgtaaattggaagaattactctgtcagtaggttacaagttgagttgaatagatggaaaattgtaacagcataatttagacattaggattatagctttcctccagggcatagtggctcacatctgtaataccagccctttgggaggccaaggcaggcggtcacttgaccccagcagttcgaggctgcagtgagttatgatcatgccatagcactacagcctgggtggcagagcaagaccctgtctctgtaaaacaaaaacaaa

SEQ ID NO: 272856 - DNA, 281 bp, Homo sapiens
ctcacatgtagtgaacatttggtgtttgaatacgtgcacaggaatttccatcccaaggtgggggatgattacccttgctaaatactgaagagataatggaaggagcactaaaattgcatttttatcatagtttgtgcaccatgtttattcagtatacctgttataaaattgaaatagcttttatttattacaaagcccaaatatcagtctcatagtttcagttatccagttccttcagtaagtcacactattaaaagtctgtttttatctgtaaaaaaatg

SEQ ID NO: 272857 - DNA, 302 bp, Homo sapiens
ccgcctccagccttgaccgatagacacttgtgtgcacgctctcgccttctcaccaaatcccagttcctcatgccatttcatctttgtgaagccctacctctaccccaacacctaatatcatccttggcactagcaaataatgaataaatgtttgcagaattaacagttttgtgtgtgtgcgtgtgtgtgacggagtcttgctctgtcgcccagactggaatgcagtggtgcgatctaggttgtagtgagccgagatcgcgccactgcactccaggctaggcaccccagcaaaactccatctc

SEQ ID NO: 272858 - DNA, 667 bp, Homo sapiens
taagccacgttcttcctccgacccctggcctgaactgcgtctagccttggctgttcccaagcagttgatgtacatattgttgagcgagagaacctctctgagtcctgctttcttgggaatcaggttctaagttgctctcctgtgccttccatttatctggaccaactagcattttatcaaacagaggttatatggagattctggcgtgtgaatgggcccccttccccctttccataatgtcttattattgctttggcaattgcagtaggtctttgaagagggagctgactgaaaactgtgcccaaatctcaatgtctcttggaagttaagttacacatttttattttaagtaaaagcaaaagaaaacaaacaaaacccccagctccccgcaaaactcattgctgataatggagttcaatgagaaaggaagaaaatgttagctattgaggctgacaagctttaatgagctgcctgatggctcttctctactgggctacgttactgtagaagagtttgcaatttgggagactttgagacctttgatctttcatgaaacgcagactcctttcatggagaagtttgttctttggtatttgccaaccgaaagaaaaatatcctggtaggtagattttttattcccccatagcttttttgaggaactattact

SEQ ID NO: 272859 - DNA, 418 bp, Homo sapiens
aaagatttctacatgaagaaccacaaaactgctgaaagaaatcatatacaatacaagcaaatgaaaaaatattccatgctcatcgattagaagaatcaatacagttattataaaataatcatactttccaaagcaatctataaacttaatgctatcgctgtcaaaataccaatgccatttttcacagaattagaaaaaatctattttaaaatttatttggaaccaaagaagagcccaaatagttaaagaaatcctaaataacaacaacaacaaaaaagaaagctggaggaatcacattggctgacttccaagtttattctaaagctattaaaataagctctaaagctactaaagaaagctggaggcatcacattggctgacttctaagtttattctaaagctactaagataagcttct

SEQ ID NO: 272860 - DNA, 127 bp, Homo sapiens
ggggaagatagattatctgattatttttattctgagatataaacagaattgtgatgggatcgtaggacaagtaccagctctagctgactggcgtaataagagagggctttataaaggtggtaaacac

SEQ ID NO: 272861 - DNA, 891 bp, Homo sapiens
gatgcatgaatcctgagtaggcattagaatgcataagacggaaggaatgatccccagaaattcaacaactgccaccaatttcattcttaaaaatggtatttatacaatatctattttaccctggtaattcctacaatggatttttttttcatatctgaatggattgacttgataacatgttaccatgtcaggaaaacatcagtgtatttaatcagcagcaaatttgctggaagggttttcagagtggaactggttgatatttgtgcattgatgctcttcaggttagcaaagcagtttttcttgaagctagtagaaaacaggtgcatgtttgaaggtgtggagggtgtagacgggtcagcacgtaggcataagagagcctcatttgttttatttttattttattttactttatttatttacttggagacagggtctcactctgttgcccaggctggagtgcagtggcacgatcttggctcactgcaacctctgcctcctgggctcaagtgatcctcccacctcagccttccaagtagccggaactacagatgcatgctaccgcgcttcagctaatttaaaaattttaatagagatgggttctccctatattgcccaggctggtcttgaactcctgggctcaaatgatccttctgcctgggcctctcaaagtactgggattacaggcatgagccactgtgcctggctctcatttgttttacattttcacaatgaatgagagatcccttaatttgtaattttggagccctggtgactatttgtttaatgcttttttctgtgttctaagttaggttaaacaagccattatttttgaaaatccatcttattgctataatagtcatagtaaatcttgctgtaaaattatgataatag

SEQ ID NO: 272862 - DNA, 454 bp, Homo sapiens
gatgcatgaatcctgagtaggcattagaatgcataagacggaaggaatgatccccagaaattcaacaactgccaccaatttcattcttaaaaatggtatttatacaatatctattttaccctggtaattcctacaatggatttttttttcatatctgaatggattgacttgataacatgttaccatgtcaggaaaacatcagtgtatttaatcagcagcaaatttgctggaagggttttcagagtggaactggttgatatttgtgcattgatgctcttcaggttagcaaagcagtttttcttgaagctagtagaaaacaggtgcatgtttgaaggtgtggagggtgtagacgggtcagcacgtaggcataagagagcctcatttgttttatttttattttattttactttatttatttacttggagcctgggtgacagaggcagaccttgtcta

SEQ ID NO: 272863 - DNA, 737 bp, Homo sapiens
tctgctctgatcttagttatttcttgccttctgctagcttttgaatgtgtttgctcttgcttctctagttcttttaattgtgatgttagggtgtcaattttaaatctttcctgctttctcttgtgggcatttagtgctataaatttccctctacacactgctttgaatgtgtccccgagattctggtatgttgtgtctttgttctcgttggtttcaaagaacatctttatttctgccttcatttcgtgatgtacccagtagttattcaggagcaggttgttccgtttccatgtagttcagtgattttgaacaattctttcacttaaaaaaaaatgaagacacaacaaatatgacataatgagaccaatcatgaattacggttggtgataggtggagttttgctaagttagtctctgtagttttcagttttctttttatctctcaaaatgctcaattgaaagagtaataggacatggaagcatttatttaataaataatttcaactaaatctcttaggagcttgcagtgtatgtattcatcatattgacttttggctttgcatgatatgggcacgcctctacctcattgttttttccagtgtcttaccgtagctaatgcattgccaaagaacctttccaatgtatcagctttcattcacccattcattcattccagaaattattgagtttctgtatatgcagatatcatgaataaagagatttttttcaaaaccaaga

SEQ ID NO: 272864 - DNA, 239 bp, Homo sapiens
tgttgtctgaactgcaccttgaagtctgggtcggttcattacagaaaaatcagcacaaaatgtagagaaggatggcggtggggacggggcaaaggctgagaagcagtcttatgggatagaaagtatcagattagtaaaaggaaattcagaaaaaggacaatgctagtctaggcacccttggtaatttttttaaataggttatattttgcaccagaaacgccaacctggtcgttcagtga

SEQ ID NO: 272865 - DNA, 469 bp, Homo sapiens
attgtattaatcagaaatgaggatgccattctatagagtggctgcacttttgtagcctggtgtgaatgcctttcactgctccccattcctgttagtacttttcttcctatatctctttataatcctataactccaagagaataattgaatagcaagggggggaggtggccgtgacaaacacgtctgtggaaatacagtctaaacggacaaagataggtctgaaataagagttctccagtgacagcatatgttaaaatttttagtttattattatcaattcattattatttattccttcttcttaaagatgcaagggagtgaggacaatagagagtgtgtttcagtaaccacaaaaggactgcaaaaaggttgctagatgaaggactgtggatatcaccaatttaccatttcatctatagatataagatagaaatttgactagtacccgagcagacagattgatggccaa

SEQ ID NO: 272866 - DNA, 433 bp, Homo sapiens
ctcgccatgatgatgtagtggaaaaatggtcaacaaagctatttcctactgtgtgctaaatgcccatcatgggaagtcccaggaacaagaagatcatgggtgaggcagctgctcagaaacaaatgtctttcaacaattacccccaggcatgggaagaggagactaggacacggacacacatcgagaaagatcatgggaagacacagagagaaggcagccgtctgtaagccaaggagagaggcctcacaagaaaccaaccctgctgacaccttaatctcaggcttctggactcacgaattgtgaaaaaaaaaaattaatttctgttgtttaaaccacacagtctgtggaattttattatggcaaccctaaaaactaatacatgtgctttacaatttacaaagctttttctcataaactcgtttaaatgtcaaaa

SEQ ID NO: 272867 - DNA, 541 bp, Homo sapiens
aaattagtgtaagtagagagtttatttgggtcaagtttgaggattgcaacataggagcatagaatcaaattgccctgaacatatgctctaattagcagcaggtataagtgggtttttaaaagaaaaaagaagagcaagttctgaaggtgtttaccaagaatttatattaaaataacataagctattcattggctatacattgtcctttgtatcacaaattccaggaacaagaagatcatgggtgaggcagctgctcagaaacaaatgtctttcaacaattacccccaggcatgggtaggtataagtctttctggtctgagctgtttttcttttctcaagttacatcttcaggttccacttctaattctagttttcttgctatttctaccatatctgcaattacttcctccactgaagtcttaagctccttgtcaaccatgagggttggaatcaacttcttccaaactcctgctaatgttgatattttgacctcctcccatgaatcacagatgttcttagtaacatctagaatggtgaatcc

SEQ ID NO: 272868 - DNA, 420 bp, Homo sapiens
ctattctctcttcttcctggggttcacctcaagccccactgctattcaaccgccaactttctcttcagcttcaaaatagactcccgcatgtaccttgattaaacacaggcccactgcaaccccagtgccccagggacgaggagggaaactgtttttaaccataaggaaaacaaagcaagtactgtggtcaatgtcagtgaccctctgcttagggcaaatattggagtgtgtgactgcaaaactgggacatccacccccgactacagggggtgcccctattctgcttcggccagttgatggtatgtgagaatgcaaactcttgtgatttttgtaagagaacccagaaatgtggagtttggggtggaatctgatctttccatgtttgctcaattgtttaaaaatacagcaggaccagtttca

SEQ ID NO: 272869 - DNA, 676 bp, Homo sapiens
tcacccaggctggagtgcagtggggcaatctcagctcactgcagcctcctgagtagttgggaccacagatgcaaaccaccacacccaactgatttttcaattttttgtagagacgggggtctcgctatgttacccaggctggtctcaaactcctgggctcaagcaatcctcccaccttggcctcccagcatgctgggattacaggcatgactaaccatttaaccataaaaaatatttttttagtcacttaaaaagagactttgtcatgttgagggtcagatgctaagttatcagcaggctcagtcatgtccctcttgatttttagctgtggaagagaaatggccccagttcatcacccttctctagcccagcctcatcccgctcccagacaccggagaggccagcaaagaaaataaggtattcggcattctcctgcagttttcatttgctacgtggacagaagggggtgaggaaaggtgggaaacgaacctggctcttaggctttgtgctgctgtgacttggagaatcaaagaaactaagtccctgagagggacaatgcagcacccacctgaacaactatcatccctacagtcttggatactgactccagtggcctctggctgtcgcctcccactccagcatgagggatcgggtgcaagcacagaggccatgcaga

SEQ ID NO: 272870 - DNA, 423 bp, Homo sapiens
aggcctcaattctcagagttcagatgaccacttgaataagagatcccgaagctcttccatgagctccttgacaggcgcttacacaagtggcatccctagctccagccgcaatgccattaccagttcctacagctccactcgaggcatctcacagctgtggaagagaaatggccccagttcatcacccttctctagcccagcctcatcccgctcccagacaccggagaggccagcaaagaaaataagagaagaagagatgtgtcatcattccagttcttcaactccattggcagcagacaaggagtcccagggagaaaagggtaggttgctgagccaggaggaggggctgctgttggtggtggaggtatttgtggaggatgtagagattaatacctattgaaaaaaggtcttgagcattgctat

SEQ ID NO: 272871 - DNA, 569 bp, Homo sapiens
atcacttgaacctgggaggtggaggttgcagtgagctgagattgtaccacggcactccaacctaggtgacagagcaagactccatctcaaataaaacaaaacaaaaaaacccccaaacaacaacaatgaaaatatttggaattgataagaaagtagttaggtggagaaaacaggataggaattgtagaccttaaggacttttaagaaagtctatttgcaaatacaaactaccaaaaagcaagtatttttccttccaattccttggaacaatatcaccctatatctccatacgtttatcaaataacagtatgtttcagtgtttgtgtaaggataaagcaggaacgggcatctttcttcacataaatgtttgtattttaaaaacaaatattcatcattttacttatttatcttgttgccaataaatatttttctttaacatttaaaaaaaagatggctgaatgttattttatcactagtattgtaccatgatttacttaacaactacctctactgttgcttccaatatttcacttcttcattaaaaaaaataacactgtggtgacaatcca

SEQ ID NO: 272872 - DNA, 779 bp, Homo sapiens
cccttgtacattgttggtggaaatatagattggtgcagtcattatggacaatagtacggaggttcctaaagaaattaaaattagaattacctaagacccagcaatccctcctctggatgtacccaaaggaaataaaatcatcacctcataaagatatctgcactgctatattcattgcagcattatttacagtagccaagatatggaaaccacctaggtatgtgttggtgcatgaatggataaaagaaactgtggtatatgtatatacaatggaatattattcagccttaaaaaaggagaagaccctgtcatttgccacaacatgcatggacctggaggatattaagctgtgggaaataagtccaacacacatccacacacaaaattgcataatctcacttatatgtggaatctaaaaagaaaaagttcaaatataaagttagaataaaacagtggttaccggccggatgtggtagctcacgcctgtaatcctagccctttgggaagccgaggtgggtgaatcacctgaggtcaggagttcaagaccagcctgaccaacatggtgaaatcctgtttctactaaaagtacaaaaattagccgggcatagtggcaggtgcctgtaatcccagctactcaggcagttgagaaaggagaatcacttgaactcaggaggcataggttgcagtgagccgagatggcgccacttcactccagcctgggcaaaagagcaaaactctgtctcaaaataaaaaaacaaaaaacacagtccacacactgg

SEQ ID NO: 272873 - DNA, 440 bp, Homo sapiens
gaagccaggaattttctgcatattcttaaataggatgtttcagtcaaagccttgataatataaccaatctttctgattgtagcctgcttataaagagaacatatgtacatgaaaataagaatatttatgaatagtttccaaactttagaaggatcagatagggaggaaaaacaaacgcttccacccacctttgttcacaaaagttgttgggattacaggcgtgaaccaccgtgcccagccaagatctacactattatgtcaccccagaaagtgaactctcactcttcccagccagtctctttcttatcataggttagcttgcttattctggaatttcgcgtatacagatgcgtgccatgccataggtactcttttgtgtctgctttattctgctcaacaccatgtttctgaaatcattaccattgttgtatggttctcta

SEQ ID NO: 272874 - DNA, 866 bp, Homo sapiens
tggtgtgactgcattctctcctgccaggtgtgtaggcggagcttcccttcctgtctgagaaggaaaggctgggggggcggggggggcatctgcagtctgctgaggggcagcacatcgggcctgtgcacccttatcctctcctttgccgatgggaccttatttcccccaacttacaatggttcaaaagggcctgaatctgaggcaaacagagctggccatggtcagggccaggtctgtgtggtgagacagaaaggaaacagttgtcagcaggcaaaaggggtgggggcagttggagatgaagctcctcaaggagaagctgtcagctcccactctacacctccccataagcctttgatttaaagaaagcctccatctgttagcctccggtgtgtgggatagttttgcagccgaagaggggtgggcattgctcaggatcttggcatggctgagaaccaggtccaggaaggagtgggaggggcaaggccagctcctctgcccccagcttgctgtgggacctcaggccttgggctagacttccttggactgactgctaaggcaggagagacagagtcagagaccctccctatccacaccccacctctcctagccagggagcaatgggttcacactgcctggatcagctatgaggtcaggtggctgggaggcctgaaccaggaagagctctgggccatgggaggcgggtgagcatttagaatgaatgctgaccctactgagcacacaaagctgtgaagaaggagctggtccttcagagcacgctgggagtatatgcactggtgtggggaggtaggaggagggggatgcaaccccagagaaggtggcaacttctggagaagcagacacagcag

SEQ ID NO: 272875 - DNA, 439 bp, Homo sapiens
gcagtgagctgagattgtgccattgcacactacagcctgggcaatagtgtgagactctgtcaaaaaaaaaaaaaaaaaaaagaggtagctaacttatcatagtttaatatttttctgtttagccagttttatgtacatattttaaaaataaattgctatcatactggtttttaacctattttctcaatatattgtgaaagttttactcatgtcattagtctgagtaagtgttttaaatagctacacaacatattttaacagttccataagttggacgtggctgctcccaggtttttattatcagaggcaaaacttcaccgaacatctttatacatgtatctttccagtagctcagaatagaatcttaaggcaagatgaaattgctgagttaaaaggaatggatatttttatggcaaacattagcacattgctttctagc

SEQ ID NO: 272876 - DNA, 622 bp, Homo sapiens
acctgtaatcccagctactcgggaggctgaggtacgagaaatgccagaacccaggaggcagaggttgcagtaagccatcgtcgtgccactggacttcagcctgggcgacagtgagactgtctcaaaaaaaaaaaaaagtatttcctgttcctacacattggcccattgagaggatcccaggtctatgcatggggacaccgtctttttggctcatgttgagccacatgtcctgcagtatttggaagtgttctgggacagactttgttcacataaagatcgcgtgcccttcactgcagtgatgaagctggagactgtctttctctgtgacaaggacctcagccctggatctgtcctctcctagtgcccacctcattcatggagctcaccccgtggttttggaattgtttccttccctgtgccttagcttccctgaacactacttctacactagctccttgagagtgggagccctggacttattgctttttcaacagagtagatatgtgtgtttcatttatatcagtatttaaattgctagcaacaagaccacaaaaactacattctcatagaagcctgtttgggtttgatgtggttacatgtgattaatgtatttgaaatagtt

SEQ ID NO: 272877 - DNA, 588 bp, Homo sapiens
ataggacagggaggtgatggggtgggaagggctttagcttctactcttagtgaatctgggagccactgagggttttgaggaaaggggtggcataattggacttaggttttcacagggcttctctggctgctgtgttgagagcagatggaaggggctgaccagcacagacacccactgcaagaatcctgctagtgtggaccacagtaggagtggtggaggcagcaggaagtgtaaggcttgttgagattccaaaggaagggccaatgggatttgctcctgggttggatgtggagtgtgagaggaaaagaggggtcaaagatgactccaggcctctgaggagagcaactgacaggatggagttgtatttcctgaggtcagaaaaattgtgggaaaagctagatgggggaggaaggttgggattttcgtttgggatatattaagtttgaggtgtctattaaatatcaatttggtgacatcgagtagacacgttggccatcagaatggagtttagatgagagtttgaggctcaaaagtcatcagcgtatctccagcctgggtgacagagtgaaattccagctccatctcaaa

SEQ ID NO: 272878 - DNA, 475 bp, Homo sapiens
gaaactgaactcagctgatgaaagccacctggtcctggaggtgaagcatcttccaaatgacagcctgcagtcaatgactgatgaatatgacttcattgcctcatgacaggacctactctggggtatagatcatgcttctaagctcctcctggggtcctgctgaggctcaatgccagctgaaaccatacccttgctcacatactttcccttctctttccttcttcccttgcttccttagagattcctcctgcaatggcttcctcaaaaaagcattttcataagcaacctcatgtcagcctctgcttccacagaagccaatctgagttaagcagctgtttaacttagcatgtccaacataaaattcttgttttcttctcatcccctgcccctgaacgttctcctttgcctgtctttcttatctcattgaaagtaacaacacaagtatcaagtgaaaataaaagaatcttctctgatt

SEQ ID NO: 272879 - DNA, 594 bp, Homo sapiens
tatacttctgtagtataaattttagctggcaacatggctgcctggccaaagactacatttcccagtctcccttgcagtagccatggtcatgtgacgaggtaaagccagcagaagtgatgagggtcacatcctgatcttgccctcaaaaaattggtagtatcatcgaccccttgtgcccagtccctttccccctttccactgctggaaggagaggagaagaaccagggtatctccttagacacagaaatggaaagcacgtattaaggatgtggagctaccccagcagccctgacctgctgacctccagactgtgacatggaaacagatcaacttctctcttggcattaagtctgacactggggacatcaaaacggataacacatggccctggatctcaaggaacctgccgcctgatggaaaataaaagagagagtcacacttaaatgaatgatttcagcataatgaatgtgacaagtgataagataagggaatgcatccagtatcactgcttttccaaggcttctcgaggggtaaaaaattacccagtgggtatttgaaggagaaagtaaataaaagaaaatctaccaagaaaaa

SEQ ID NO: 272880 - DNA, 561 bp, Homo sapiens
aaggctctgtctacttggcttttttctttcacctgttctgcggaataacagcctgattcgttcctctttttgggtccttcacttccatacctgggattcggggcgtggcccagaaagaccctgcagtcttgcagtgtggggctgccagcatttcatggcctccaagctcagctgggctgaatgaacgctgccatccagcgcttggctcattttctgtcccattttcctgagtgcttttgccagacttacacttttctgaaagctactccaccctaccccagacacaccctctctcctcggatgacctgcctcctaatttcctgagaaaactggacatggccacctttccccagtgtctgaggcccaggttgacccgtggtcatggtcgctgtcaccacccacctgcctgtatgacagagtgagaccctgtctcaaaaaaaaataaaaagaatgcctcatgttaggctgggtgtagtggcttatgcctgcaatcccagcactttgggaggctgaggcaggaggatagtttgagcccaggagttcaaggtcaacctgggcaag

SEQ ID NO: 272881 - DNA, 380 bp, Homo sapiens
gggaaaacattctgtcttcccccgattcagaggtgaaagctccttgccattcacacactctagttcaatggtatcgagtgcgggcactgctaatcctccggaggacgctgttcaatcaagtctaaatcagccttccagtagtttccatccattgggtctcacctttccccagtgtctgaggcccaggttgacccgtggtcatggtcgctgtcaccacccacctgcctgtatgacagagtgagaccctgtctcaaaaaaaaataaaaagaatgcctcatgttaggctgggtgtagtggcttatgcctgcaatcccagcactttgggaggctgaggcaggaggatagtttgagcccaggagttcaaggtcaacctgggcaag

SEQ ID NO: 272882 - DNA, 449 bp, Homo sapiens
agaacatttgaaaagcacttcattttaaaaagtgattttcaagccattgtaacacctctaagatcttgtcagtgttattttaaagacagaagactacaaaaagcttagcaaaggaatatactgctgtgaatgaagtaaagctcaatgcaagaggctgccagatatcttgaaaccaagaaaatgatcaaagtaaagcaaaaactaagactcagctaccagtataccctgcttggtgcagtagttactgtttattcattctctccacagatctatattgagagcctattgtgtgcagacaccatctaggtgcttggaatatgttggcaaacaagacaggcacaaatccttactctcatcaaacttacattcctcttctcctgaaaaatcaaacttaaccaaacccattttactaatagtaattttaaaagaagcccctcccccgcccctta

SEQ ID NO: 272883 - DNA, 513 bp, Homo sapiens
ctccctacgtctgtgtgggttttctctgggtattgcggtttcctctcgtatcccaaaggtgtgcatattaggttcattggtgcgtctacatggctgcagtctgagtgagtgtggggtgtgagagatgccccgcgatggtgtcctatcctgggctggtgcccatcttgtgtcctgagctgctgggatgggctctgaccacccaagacccttaactgcaataaatgggtaaataattatttgctgttcttaatgaatctttcttaagctcatatttattctatgtatagtgcacatttatttccatgtttaatactagaagtgttttggtcttgagaagtttggtaggccaggtacaatggctgatgcctgaaatcccagcactttttgaggctaaggcaggaggatcacttgagcctgggaggtcaaagctacagtgagtatgccatgattccagcaccgcattccagcctgggtaacagagtgagacagaagaagaaagaagaaagaagaaga

SEQ ID NO: 272884 - DNA, 436 bp, Homo sapiens
attgcagagataccccaagaattaaccaagtatgtgtgtgggtgtataggtttcttttggaggaggggaatgtaaaagagggcagagtaggagacaagttttcaggacaaaacatctggtccagtaggtaatagggtaaggagaacagaaaagaaagggtggttcaagatcctcactttaggccagacgcggtggctcaaacctgtaatcccagcactttgggaggccgaggcaggcagatcatctgaggtcaggagttccagaccagcctggccaacatggcaaaaccctgtctctattaaaaatacaaaaattagccaggcatagtggcatgctcctataatcccagctattcgggaggctgaggcaagagaatcacttgaacctcagagacggaggttgcagtgagccgagatcaccccactgcactccagcc

SEQ ID NO: 272885 - DNA, 405 bp, Homo sapiens
cagtccgaatcattctatctcactggtcaagctcagccttctttttccttattctcattttttttctttcacatgtgacaaaacaaatgcatttgaacgcccctcccaccctgtcccccacccaaatccctttagtagagaacacagtttgaaatgaaaaggaggcatagattataaaggggaagatatgtgtaagcaaaaaatgcagaacttagaaactgggcacgaatgtaaggaatacaagatctcaaacctactttgactggattttctactttattccatgtgttttggacgcatctagaactcttggcagtgttatctgatatatgctattcattccatgatacaagaaccacaagaaggtcatgcaaagtttattaaagtataaagcagaagcagcaa

SEQ ID NO: 272886 - DNA, 471 bp, Homo sapiens
gagtgacttgttctgattcccagttctccttcttcttaactccgataataaaatattaaccagtaaataataaaatagttaccagtagaagctggtgcagaaatctttggatttttgtaaaccactttatctgatttacaaaaatcagcctgtctgtgaagagggtctttggtagatacagtttctttgatcacgcatgaagtacagtggggaaaaggtggacggagtggtttggagaagcagatgacgttggtctgtctgtgcctgagcactgtgtggaaagcgattggtctttgccatatagagatatttcatcctgctcctcaggagttggttagggaacagataagttaaaagagtttggctttcattttgttagttctcacggcttctcattattttcatggtgtgtggttactgtaagctacataggtgttctcctttgcttctgattttgtgctaaaaaacaaa

SEQ ID NO: 272887 - DNA, 237 bp, Homo sapiens
tccagcaacaccctagccaatgcagtatttgatgccttaaacttcacatgcctttatatcgttacacattttacttcctatcttttataactgattcagtgtgttgtacatgtgtggatggatattcaattaatatgtgacacattgattatcagctcaaatgtggcagatggagatggatccttcttgacctctcattgattctttttagtcaattgaaattgcattatccctgaa

SEQ ID NO: 272888 - DNA, 308 bp, Homo sapiens
gccaactctcctgaaaaagtggtaggtgtatatgatctccgcataaagtgaaaaatatggtttctgctgaccagaggttagactgtggcaaagactgcttttgctcaaaatctattatcccttccgaaatgtatagagctgtctggagttcatgttgccttttcctggagaacaagtaaatcaagtaaatgggaggggaaagagtaaggacagaactgggactcatttctctcttactaaggggatgtcccatggaaagaacacctcttaccagcctcctaataaacgttctgatggtacttactgat

SEQ ID NO: 272889 - DNA, 699 bp, Homo sapiens
atattttcgacaaataggattatcattctcatactattatcgttctcatactgcatcctcctttttttgcttcatgatttttcttagaaatttttgataaccagcatatacagatttttacattctcttagcaacagcatagttacctagcccctgttgacagatgtttaaattgtgtttattatttttctgtcacaaataatgctgcagtgatttgtatatatatctttatattcttgaaatggacctagtaagtcagaggctttgtgaattttcagttttggtagattttaccatattgccctcctaaaaggttataccagtttatactcctgattacagtgtgacactgcttgattttccatatctccaatattgattattatcagaattcttaatttgttctactcctattactttaaaaatgactttttttttttgtatttctttacttttgagtgaacttatacatcactttgtaagtttataggtcctttaattttttttctggtaattgtctatatctgccccagtccacctttaaaaaaaaaaaaaaaaagaatcttttcctcttagattcatgggtaatttagttaagaaaattagctctttgtcatatgtatagcaaaatatgaagaaaatatgtttggttacttgcaaaacctagggaagggaaaacactgtggtagaaatgaaaga

SEQ ID NO: 272890 - DNA, 505 bp, Homo sapiens
aatttttttaaggctgtcagtaaactacttttttcatcataattatcaatatataccatttgaagagctactttttatggtagcacgtgcttctgatctaaaagatttgacacaagccttattttcagagaacttaaaatctgaatggatagtggttttattacttaaatctttaagggtgtgtctcatgtcttcttcatctttaagtctcttgggcatagtaggtgttcaataaatacttgtcagatgaatttaatgaaattaaataatacccttttgacttacttttccttgggaaaggaaaataactctggcaatactagttttatgttctgattcactagcctttctctctgaactgaccatctcacttatatttgaagataaatgtagggtgagaatggaagagcacagcctaagttcctgaaaagtacaagtaggcaaaatagtttctagtgtctaattaaaggactacaggggaaagttttgcttaaatcaaatgaca

SEQ ID NO: 272891 - DNA, 631 bp, Homo sapiens
cactgttggtgggagtatcaattagtacaaacactttgaaaaataagagggaattctataatatctaacatttgcatatatccatttatctctctagatctagatcttagccctctccaccctgcactgtgttcttggaaggggatcatgaatggtttccttgcattctgccttctgatttggttcagccaatgagagaccatggcaagacatttgtgagaagggtagagagtcaggtcaaggttcttagtgagatcaactctttctctgccagtttgttaactgaattctactgaaagctagagctctgttgagtaatcttttaaagctgcagctacccttttgagattaagtaatagctccctgtttgtgccttgttagggctagggatgtttaaggatccttgcccttgctagtcctagcatgttttgttgtcccataatagttctttttttaaactttcctcaattacacaatttgatcttgttcctaccagtacctttgctggtacaacctaaaactcaacagtttcactcttaggcatttacccaagagaaaccaaagtaggtacattttccagaagacatgttaagaatgtttgcagtacgctttggatgctttggtaatagca

SEQ ID NO: 272892 - DNA, 289 bp, Homo sapiens
cagcatgcagagtttttaatggggtctcagtgtgcagccacacagagcattgctgaccagggacgctcgcccaggtctcagagtgcagaatttctattgaggtctcagtgtgcagccagccacacacacagcattgctgggcagggatgctcacctgggcctcagcatgcagagtttttaatggggtctcagtgtgcagccacacagagcattgctgactagggatgctcacccgggcctcagtgtgcagtttctatcgaggtctcagcgtgcagtcagccacacacac

SEQ ID NO: 272893 - DNA, 291 bp, Homo sapiens
ggggtaggagtgaagggagggttctgaaaaaaaaagacagcgccagggcaaattatcttccagcttttcaaaggcagcagctccatgcttgccgactctgttctccgtcaatgcatctgacagagaattcacaggcaaggtcagacatcaccccagtgaggaaagaggaggagccacacccaagcaggggcctgggctgggctctttcacagctggctgagtgatctccctacttcaggcctcagtttcctcagtgtgtaaaataaagccattgagcccgttgctgtttaa

SEQ ID NO: 272894 - DNA, 432 bp, Homo sapiens
tcttaagttttagggtggtgtcaaagaaaaatatccacagttatctgcatggactagtaaaatattctgccattttccaactatgtaccatgagaggctagattttcttcatatacttcatatatatgattttcttcatatatttcaacctaaataacatattgccatagattgaatgcagaagcagatatgagaatccaggtgtcttttattaaaccatccatttaaaagatttgaaaaaatttaaaacatcttttgttttgttttagaaaagattatttttataacaaatcatttatgttaacagttaatggtttattgttattttaagtgaattagtaaatatcttaaaatttctctgtttaaatttttaacatgacaaatatcaaaatatataactacataaactaaaagtcttttgggtcctcaatg

SEQ ID NO: 272895 - DNA, 544 bp, Homo sapiens
cacctccaaattcactcttcaacatatgctttgtgattatgggcttcctgtaagcatttttcctttaaagtgagcacattgttaagctttctcattaaagggtactgtgggagcaccgtaggaacaagagggtctcctgcaggtgctgatggctgaaatgtgggtagggtggtgtggctgggatgacatccagtggagctctgccacaaccacaggcccagagtgcatggatccacagacaccttgaagtctcagtctggactgatgataacctttccatgaccctaaatagagaaaccagtgctctaaagaccttctgctggcacagctgccctgattccttctgcaggtaccagagtggtccctgaggcccagaggatcccttctggatgctgatccctctgccagaccaacatgtctggcctggggcctggaaaatccccacctcctctgcttgccctggttactgatggcctgttccccacttgcactctggaaggctacattgtactgacccagttgtgcagatcagctttagtatgga

SEQ ID NO: 272896 - DNA, 188 bp, Homo sapiens
tggactggcctcaagctccctctgttcccatgtactcaaggccagaccaattactatttgtagaaggtcacaccccaggtcttctgatcccaaaccctttctcccaggcacctgttcatcagcccctagagtcacccagattgtctgggttctgtccttggtgacagcgattaaacttgtaacactga

SEQ ID NO: 272897 - DNA, 313 bp, Homo sapiens
ggcagcccctgccatggtcccagttctcaccagatggccctgacttctatgatctagtaaagacacctcctgcccgcatctctgcagccctgtgggcattagtggcttcctgcaatctctgaatggctttagtatcttggttgagactcttagtacttctgtcacctgtgtagccagttttctgtattacattccttagcttggaataactggagtggtttctgtttgcctgatacaataagatacttggattgcgatgatgtatcttctttaggtgtttttaaaatgtctttatttcagtgtatagttagta

SEQ ID NO: 272898 - DNA, 501 bp, Homo sapiens
gatgaatttccagataattatgctgagtggataatgtcaattcgaaaatgttatatactgtatgattgcattttgatggcaatcttgaaagaacagaagtatagaaatggtgactagattagtacttgccaggcgagtggggaggaggtggctctggcaatagaagggtggcttgaggggtccctttgatggaactgttttgtatcttgattgtggtggtgattacatgaatctgtgcatgtgatatattgcatataactaaatgtgcacgtacacacgcacacacacaaataagtgcatgtaaagggaaatctgatacagtggatcatatctaataagatgggtcatatctgaatacagtggattatcaaccagggctttcttggttatgatgaaaccaaggagaaccataggagaaaagtgaatgaagaatatatggaatctctcatattatttcttccaactgtatgcaaatctaccattatttctcaataaaaagtt

SEQ ID NO: 272899 - DNA, 163 bp, Homo sapiens
tttttttttttcctccccaaccatgtagggattgggtatccctgatttgctcttggtattagccatgaacaatgttcctggctttacaagggctgcagctggcaagtggcctttcaaatttgtctttaaaaaagaagtactgcggctgggcgtggtggctctc

SEQ ID NO: 272900 - DNA, 407 bp, Homo sapiens
gggagggggcgggcgggccggcgggcggggggagccgccgccgccgccgccgctcgatttccgtaattttgagaagatttttttttagtaattttttattctgccccagctgatgtttgagccagcatgtcgcggaggaagcaagcgaagcctcaacatttccaatccgaccccgaagtggcctcgctcccccggcgagatgccttcgtagatgaccacacaccatttgtacaacagaagttggtgttccccatgctgggcaaacaatgggaagccatcctgtctttgaataggatgttagcttggagttagagatttttctgtttaatttacaaatggatcttagtgagaagacatctgagcaaccaatggaaacaaacatgaaataaagggatttttataataaa

SEQ ID NO: 272901 - DNA, 5239 bp, Homo sapiens
gggagggggcgggcgggccggcgggcggggggagccgccgccgccgccgccgctcgatttccgtaattttgagaagatttttttttagtaattttttattctgccccagctgatgtttgagccagcatgtcgcggaggaagcaagcgaagcctcaacatttccaatccgaccccgaagtggcctcgctcccccggcgagatggagacacagaaaagggtcaaccgagtcgccctactaagagcaaggatgcccacgtctgtggccggtgctgtgccgagttctttgaattatcagatcttctgctccacaagaagaactgtactaaaaatcaattagttttaatcgtaaatgaaaatccaggctccccacccgaaaccttctcccccagcccccctcctgataatcctgatgaacaaatgaatgacacagttaacaaaacagatcaagtggactgcagcgacctttcagaacacaacggacttgacagggaagagtccatggaggtggaggccccggttgctaacaaaagcggcagcggcacttccagcggcagccacagcagtaccgccccaagcagcagcagcagcagcagcagcagcagcggcggcggcggcagctcctccacaggtacctcagcgatcacaacctctctacctcaactcggggacctgacaacactgggcaacttctccgtaatcaacagcaacgtcatcatcgagaacctccagagcaccaaggtggcggtggcccagttctcccaggaagcgaggtgcggcggggcctctgggggcaagctggccgtcccagccctcatggaacaactcctagctctgcagcagcagcagatccaccagctgcaattgatcgaacagattcgtcaccaaatattgctgttggcttctcagaatgcagacttgccaacatcttctagtccttctcaaggtactttacgaacatctgccaaccccttgtccacgctaagttcccatttatctcagcagctggcagcagcagctggattggcacagagcctcgccagccaatctgccagcattagtggtgtgaaacagctacccccaatccagctacctcagagcagttctggcaacaccatcattccatccaacagcggctcttctcccaatatgaacatattggcagcggcagttaccaccccgtcctctgaaaaagtggcttcaagtgctggggcctcccatgtcagcaacccagcggtctcatcatcgtcctcaccagcttttgcaataagcagtttattaagtcctgcgtctaatccacttctacctcagcaagcctccgctaactcggttttccccagccctttgcccaacatcggaacaactgcagaggatttaaactccttgtctgccttggcccagcaaagaaaaagcaagccaccaaatgtcactgcctttgaagcgaaaagtacttccgatgaggcattcttcaaacacaagtgcaggttctgcgcgaaggtctttgggagtgacagtgccttgcagatccacttgcgttcccataccggagagaggccattcaagtgcaacatctgcgggaacaggttctccaccaaggggaatctgaaagtccactttcagcgccacaaagagaaataccctcatatccagatgaacccctatcctgtgcctgagcatttggacaatatccccacgagtactggcatcccatatggcatgtccatccctccagagaagccagtcaccagctggctagacaccaaaccagtcctgcctactctgaccacttcagtcggcctgccgttgcccccaagcctcccaagcctcatacccttcatcaagacggaagagccagcccccatccccatcagccattctgccaccagccccccaggctcagtcaaaagtgactccgggggccctgagtcagccacaagaaatctaggtgggctcccagaggaagccgaagggtccactctgccaccctctggtggcaaaagcgaagagagtggcatggtcaccaactcagtcccgacggcgagcagtagcgtcctgagctccccagcggcagactgcggccccgcgggcagtgccaccaccttcaccaaccctttgttgccgctcatgtccgagcagttcaaggccaagtttccttttgggggactcctggactcagctcaggcatcagagacgtccaagcttcagcaactggtagaaaacattgacaagaaggccactgaccccaatgagtgcatcatctgtcaccgggttctcagctgccagagcgccttgaaaatgcactacaggacacacactggggagaggccctttaagtgtaagatctgtggccgggctttcaccacgaaagggaatcttaaaacccactacagtgtccatcgtgctatgcccccgctcagagtccagcattcctgccccatctgccagaagaagttcacgaacgctgtggtcctgcagcagcacatccgaatgcatatgggaggccagatccccaacaccccagtccccgacagctactctgagtccatggagtctgacacaggttcctttgatgagaaaaattttgatgacctagacaacttctctgatgaaaacatggaagactgtcctgagggcagcatccctgatacacctaagtctgcagacgcctcccaagacagcttatcctcttcgcctttgccccttgagatgtcgagcatcgctgctttggaaaatcagatgaagatgatcaatgctggcctggcagagcagctacaggccagcctgaagtcagtggagaatgggtccatcgagggggatgtcctgaccaatgattcatcctcagtgggtggtgacatggaaagccaaagtgctggcagcccagccatctcagagtctacctcttccatgcaggctctgtccccgtccaacagcacgcaggagttccacaagtcacccagcattgaggagaaaccacagagagcggtcccaagcgagtttgccaatggtttgtctcccaccccagtgaatggtggggctttggatttgacatctagtcacgcagagaaaatcatcaaagaagattctttggggatcctcttcccttttagagaccggggtaaatttaaaaacactgcttgtgacatttgtggcaaaacatttgcttgtcagagtgccttggacattcactatagaagtcataccaaagagagaccatttatttgcacagtttgcaatcgtggcttttccacaaagggtaatttgaagcagcacatgttgacacatcagatgcgagatctgccatcccagctctttgagcccagttccaaccttggccccaatcagaactcagcggtgattcccgccaactcgttgtcatctctcatcaagacagaggtcaacggcttcgtgcatgtttctcctcaggacagtaaggacacccccaccagtcacgtcccgtctgggcctctgtcttcctctgccacatccccagttctgctccctgctctgcccaggagaactcccaagcagcactactgcaacacatgtggcaaaaccttctcctcatcgagtgccctgcagattcacgagagaactcacactggagagaaaccctttgcttgcactatttgtggaagagctttcacgactaaaggcaatcttaaggtacacatgggcactcacatgtggaatagcacccctgcacgacggggtcggcggctctctgtggatggccccatgacatttctaggaggcaatcccgtcaagttcccagaaatgttccagaaggatttggcggcaagatcaggaagtggggatccttccagcttctggaatcagtatgcagcagcgctctccaacgggctggcgatgaaggccaacgagatctccgtcattcagaacggtggcatccctccaattcctggaagcctcggcagtgggaacagctcacctattagtgggctgacgggaaacctggagaggctccagaactcagagcccaatgctcccctggccggcctggagaaaatggcaagcagtgagaacggaaccaacttccgcttcacccgcttcgtggaggacagcaaggagatcgtcacgagttaaagcagctcgggctggagacatagcattcattcctgttcagaatgcgacctatggtggcctcctactccttgccccccaccccgccccgccccttccttctgttccccagatctatgaactacaacattatgaagacattcttttgtaccttgttcaactttagagttctaagaaagcttatttattagcgatataaccttgctttgcaaacagaatgcaagcgttaactttggtcttctgtattttggactaaatactaattgactagagtgctgtaaacttgctgtaacatttatggcaattgcaagttgccctgctaggcagttgtaatctggcattaacttattttctatatccagtttaatatgaatctggtgttgatgcaatgcctcagtgatgcattagatctctaataaagtctgtatatacatgtacactttgatcctgctggaaaattttatcagcaaacacattgtctaatctttcaaaacagatttaaggaaaggactgaaagtacagactgaacagtgtggttctttgaaaggtttggttttttaatttttattctaaaattcaacctttttttttgtcgatttaaccatttccattttgaactgctatttgtattgtgctttttacttgagtcgtcttcaatgttaataagtttctgtacagtaataagcacgcagaattctttagagaaaaagaaaacaagcgttgttttggtagttgaaactgagacgtaacattttgccttgtaggtatattcacgatagaaaatgtgtgctggaatttcacaatgctgctaagtatagcatcttgaacaaccttcagtggagaaaatgtagatgctcttgtatatacaataagaaatatcactttcattcaaatgtacatatgttccttacaagagcaaatgcttcttcttgatcaagagagcaggtatagtgtttgtttattttgtcttaggtatggaagaaaaaaattggactgttacatgcactttcttggaaagttgaaaggaaagggggggtccaatttctttaacatttaatacttactaacaacagagatactgtaattttactcaagtaatcaaatacattttttttgcaacagataaaacaaaatactgtgt

SEQ ID NO: 272902 - DNA, 1781 bp, Homo sapiens
gggagggggcgggcgggccggcgggcggggggagccgccgccgccgccgccgctcgatttccgtaattttgagaagatttttttttagtaattttttattctgccccagctgatgtttgagccagcatgtcgcggaggaagcaagcgaagcctcaacatttccaatccgaccccgaagtggcctcgctcccccggcgagatggtacacatgggcactcacatgtggaatagcacccctgcacgacggggtcggcggctctctgtggatggccccatgacatttctaggaggcaatcccgtcaagttcccagaaatgttccagaaggatttggcggcaagatcaggaagtggggatccttccagcttctggaatcagtatgcagcagcgctctccaacgggctggcgatgaaggccaacgagatctccgtcattcagaacggtggcatccctccaattcctggaagcctcggcagtgggaacagctcacctattagtgggctgacgggaaacctggagaggctccagaactcagagcccaatgctcccctggccggcctggagaaaatggcaagcagtgagaacggaaccaacttccgcttcacccgcttcgtggaggacagcaaggagatcgtcacgagttaaagcagctcgggctggagacatagcattcattcctgttcagaatgcgacctatggtggcctcctactccttgccccccaccccgccccgccccttccttctgttccccagatctatgaactacaacattatgaagacattcttttgtaccttgttcaactttagagttctaagaaagcttatttattagcgatataaccttgctttgcaaacagaatgcaagcgttaactttggtcttctgtattttggactaaatactaattgactagagtgctgtaaacttgctgtaacatttatggcaattgcaagttgccctgctaggcagttgtaatctggcattaacttattttctatatccagtttaatatgaatctggtgttgatgcaatgcctcagtgatgcattagatctctaataaagtctgtatatacatgtacactttgatcctgctggaaaattttatcagcaaacacattgtctaatctttcaaaacagatttaaggaaaggactgaaagtacagactgaacagtgtggttctttgaaaggtttggttttttaatttttattctaaaattcaacctttttttttgtcgatttaaccatttccattttgaactgctatttgtattgtgctttttacttgagtcgtcttcaatgttaataagtttctgtacagtaataagcacgcagaattctttagagaaaaagaaaacaagcgttgttttggtagttgaaactgagacgtaacattttgccttgtaggtatattcacgatagaaaatgtgtgctggaatttcacaatgctgctaagtatagcatcttgaacaaccttcagtggagaaaatgtagatgctcttgtatatacaataagaaatatcactttcattcaaatgtacatatgttccttacaagagcaaatgcttcttcttgatcaagagagcaggtatagtgtttgtttattttgtcttaggtatggaagaaaaaaattggactgttacatgcactttcttggaaagttgaaaggaaagggggggtccaatttctttaacatttaatacttactaacaacagagatactgtaattttactcaagtaatcaaatacattttttttgcaacagataaaacaaaatactgtgt

SEQ ID NO: 272903 - DNA, 396 bp, Homo sapiens
tgtgtggaagctcagactgcacagatccgttgtacagattagggctgatcattcagtcagccctaacctgtacaacactccccaccccttgcgttttggccctgctctgccaatagatgccagaaacccaacttgagctcactctgctgaacagtgatgagagatgggctggtggtcagggctgacgggactaaggttccttctcaccccatgccactcccctgtgtggcattgcccattctccattctctctgcagggacgctgtgctgctcagcccaccccaggcagggcagggaggacagacactagagaggctcccgggagctccctggtaagaagtggagtgggatggatgcagtccaacgtctctctcttttgttgttgtcaggttattg

SEQ ID NO: 272904 - DNA, 545 bp, Homo sapiens
cactgaagggtgtattatgtatgccaggcttaaaaggaaaggggagtgagacaatgattaaaatcacactaagcaacagtcctaaataaaatgcaataagtatttatcttctttctccttaaacatttatttttatatacgtacacatacacacatttacatatatatgttcaaatattaagttaaaataagctcatcttctgtaaatataacttacctcctgagatgggattggaggacatggttctgagatgagaatgaaaacaaaatataccacacacaccccttgatattccttagtgagagataacacggtcatattcccatattccatctttcactccaaaaatattttaacaatttttttcttcttatcacagaaatcccattgcttcagaacccagttctagatagctgtttgattaaacacatttaataagcaaatttaggccaaagtataaataattgataatagcttaatattgtaactttcccaagagataatttttgtttaaaagacgatgcttaggaaaacatttttaaac

SEQ ID NO: 272905 - DNA, 605 bp, Homo sapiens
tataaatttacttatgtcaattataatgagaataaaataagtaaaaaaaaatacaggcttatgtagaattctttaattaaaagaacaaatggaatgtcctaattaaatgaaatgtaatacacaattttggaaatacatctaaaaattgttttgtgtgcactactatattttataaaaatcattcttattagtcatgaccagctcacataatacctcataaactataaaagaaaaaaattataagagacaagaaaattataagtctagcatgagaaccaggcaaagaaaaacagaaaatgttcatggggagattctgaatcataagtcagaagattttacagtaatgaatttaataaaaagcagagtatagatttgctttcagcatttttgaggttttcagttttctagtaaatttgtcaccttattaagatatttgttttgttccaatattgctctattcttctgaaaacaggtataaactcatactcacccaaacacacttactctataattttcttgcacctaaggtctatttttagagtaatatatgtgcatagctaactctatgtaaatcagaactaaaattctgtatgtttgcaggcaga

SEQ ID NO: 272906 - DNA, 277 bp, Homo sapiens
tggatggatggatggatggatggatggatggatggatggatagagagataggagctatagacaaaaacttgtctctttgtagagtatcaggaaggattcacactaaactatccccaatatctttgggatagaaggcgaagagccttggaagcataactcaccctcatttattttagtaccctcaactctcagcacctgagttccaccaaacttcaaattgcaaatcttagattgaatggtatgttactgttttcaggagaacactcgaaatcatgaa

SEQ ID NO: 272907 - DNA, 424 bp, Homo sapiens
ttccacccaagtcttctctttctcaagttattttttaatagaattaatgaatgcaaattgtgtgttcttttgaggaggattaaaaaatggtgcctcaagatcaaggccagttattcatgggcccaaaataatctgtccccactacttcatttatctcatttttaggtccttctttcctgtattacagctggggtctttatgaaaattaagaaatttaaacagttttgtattgtgcttatttttatttgaccagtttgttacttaattattcaataacattcattttatatatatgtttatatatatacataataatatgtaaatatatttttatatattttatatataaatatatttatttatatacatgtatattattattgttattattttttagacaaagtctcactctgctgcccaggct

SEQ ID NO: 272908 - DNA, 406 bp, Homo sapiens
tgtcaagttaaagggcgtgactcagatacacaccggctacaagagagcaaagctgtagacctcacattttttattatagagcaatttcttccaaatcagttaaggtttcaatgtttgccttcacaaaaaaatgaaacgcggttttgcaaattaatgttcgttatccgtatcttgggggaattgtttaataccgtgcagttaatgaaacaattcagcgatacttcttccaaaatcattgctaccttatcttcatctaatctaataatcaaaacatatcttctagtaacaagacttctgattttaattatcttaactccttgttgccagattgtcctgatacgaaacccacatgcagaaagcatctgacttcaccaaaccagggtttcctctcgccccaaaggaataa

SEQ ID NO: 272909 - DNA, 358 bp, Homo sapiens
atccttgtgtcaagcgcttaattcaattattttgttattttgacttctaaaaaatcagttaattctataagttttcctctatgtactacattgagcaaactccacagatttctgtagggggcatactaattgtaattcaatttcgttttccatgtgtaggtccagatttatttgaatgtccaaatacttagaattgtaggctcttgttttgttattaaagtctggttttattacattgtgtttagagaaaataatatggaggattttaattttagataaagcattaatatcttttttatcctcaaacatgatcaatttttgacagtgttccaaaaatatactatgaaatatatattat

SEQ ID NO: 272910 - DNA, 433 bp, Homo sapiens
accatctgtttaacaaaatgatgttcattacattagaagtgtatgtattcatctggtttagttttgtaatttagaagagctattgatctgattcaaagataaccattacccatctttccaaggcccatctaagtagtacaggtgttttgtcttttaaaattgacagtcctctttgcattaagtctgtagggggggaatacaatataaatattcttctgtgtaaacgtaagaatgtgctgtaatctccagttcctttggatacctcagaattctatttattgtatacacttatactgtttattcaatgttttgggtcttactctttttgacgtattctcatcagtcttcactctagtttgcaagctctgaagttattgattacgtctaatgtgcaatttggcttctattaaatgctattttatgataaaaaaaa

SEQ ID NO: 272911 - DNA, 803 bp, Homo sapiens
gggatttcaccatgttggtcaggctggtcttgagctcctgacctcaggtgatccacccacctcagtctcccaaagtgctgggattaaaggtgtgagccactgcacccggccggccttgtacttttgaggcggtgttgactcttgcaatccatagctttgagagctccccatccgaatctcaggcacacttgactttttcactctcgtaggagtgatctccttagtccatcgatcaaactgctgagagcaggccatggcctgcctgctgtcatggcccgtgaagcagaattggagatgagaggggaggacctgggctggagagtgggcaggaggagatcctgcaaacagggaactgagagaggggagggaggaggagggtttgagagtggggaggggagctgggggtgctccctgaagaccaggaggagaggaaggaggggagctgcaggctatgaacggggctgcaggttatgaatggggcactccggcgttctgagaactgagcactccgacattctgagaactgggcacaggggcaccaggccctaagtgagttctgctccggggtggccgggcccgagagcactgacgtccaacgggagtgtcgctgcccaccgcctcccacaagaggacacttcgatttgccagagaagggcagagtgggagatgactttttctcagcatcttgcctcattttcctcttcccagaggtttgtttttaaggaagtttaagcttgctgcactggaaaagcaaaaaacaatattttgtaaaataaatatttgttttgtgcagaaaaaaaaaa

SEQ ID NO: 272912 - DNA, 671 bp, Homo sapiens
ggttgaattaggcacagcaaattcaaatgctatttattgaaggctggaggtgtccaggctcttgcagcttgtggaatggtcccctcttccccaccctgctccccactctcccagtcctcaccccccactggcaaatgaacttgcgtttccttccatgcaagtccattgaaatcaggatattagttatatttgaagcgacatattctaaagttactcggaaagaaaaaggtatcagttttccatcaaggcacttcccatctcacacgtggtcctggcgatgtgcccctgacaccgaaaccagcagaccctgcctgtggctatgaacggggctgcaggttatgaatggggcactccggcgttctgagaactgagcactccgacattctgagaactgggcacaggggcaccaggccctaagtgagttctgctccggggtggccgggcccgagagcactgacgtccaacgggagtgtcgctgcccaccgcctcccacaagaggacacttcgatttgccagagaagggcagagtgggagatgactttttctcagcatcttgcctcattttcctcttcccagaggtttgtttttaaggaagtttaagcttgctgcactggaaaagcaaaaaacaatattttgtaaaataaatatttgttttgtgcagaaaaaaaaaa

SEQ ID NO: 272913 - DNA, 414 bp, Homo sapiens
agtctgtcatatgccacagtggtgttttcatcctccctgtgagtctgtcagggaaacactactgagcaaagccagcccagagagtgagaaaccatgtgattcctatcctttttttccccatgcaaatggactaaataggtgatcaccttcaactatggccttgtgttaggatgagttgtgaatgcagcaagagaaaaagaagggagaccagtttaactggtttcaaggtttgcagccctgaagtgaacaaggatggaggattggattaggatgttaacaatggaggtgacatgcccccagatgaaaccagaggccgccaacattgaaaaggtgatggaagcaaaaaaacacttctaaaaacagtaaagacgttggtaactaagaagttttaattataaccttctgctcaaaaaa

SEQ ID NO: 272914 - DNA, 265 bp, Homo sapiens
gtacgtacttgcagttataagatgaataattttcagagacctaatgcacagcatggtgactggagttaatgtattgtgtacttgaaatttgctaagagagtatatattaagaattctcaccacagaaaggtgaggcagcacgtaagttaattagcttgattgtggaaatcattttgttcctggaccaaactgagagttgggctgctatttctcatggcccaataatgagacacagatgtactggggaggaagagagtttttattt

SEQ ID NO: 272915 - DNA, 761 bp, Homo sapiens
atgacagaatctcagtatcagggtagcatttaaagcaaaaagcattaaactggatcaaaaatgtcattttacatcaacacagggtacactccaggtaaagacttaacagttatgaacgaatgtgctaaacatcaaaatgtattaagtaaaagctgaaagaaatgaagaataattggtagaaaagcaatgataggaatccttaatgtacttcaaaaggcacgaagtaagaaggtacagtcatgtaccacataatgatgtttgagtcaacacctgacctggtatacgacaatggtcctataaaattataatggagctaaaaagcttctatcacctagtgatgttgaagccgttgcaatgcaatgtatcactcacatgtttgtggtaatgctggtgtaagcaaacttactgtactgtcagttgtataaaagcatagcacagttatgttcagcacataatactttataatgataaacgaatatgttactagtttacgtgtttacagtactattattttagcatgtgcttctgcttattaaaaaatgttaactataaaataatctttaggcagatcctacaggaggtattccagataaaggcattattgtcataggagatggcagctccatggatgttattgccccttaagaccttccagtgggacaagatgtataggtggaagacagtgatattgatgatcctgaccttgtagaggccaaggctaaagtatgtatttattagtttttaacaagagtttaaaaaaa

SEQ ID NO: 272916 - DNA, 469 bp, Homo sapiens
agtcaaataaataattcattagtaaccaggataatagaaaacctcaaaaaaattaaaatacataaaacccaattttttaaaaacagatttttcaattctcactacaactatgttctctccaaagcgtaagctagtaaggaaagacactgccaactggaaacctaggtcggcccccatggagaatgatgggtcatgtcttttaaacaaaagcaaacagaaaacattcatgtgttcaactttatggactgtcaaacctaatgcaagcttgaatttaattcaagaaaattattattttagcaaaagtccacattaaatagggactgctgtgtaaagagactacttatttttttttttttaactaagagttatattcctatcacctataatgagttttgtggaatccacaactctataatcaacttgtaaacacgtaacttacatattggtttatcattcccagattattaaa

SEQ ID NO: 272917 - DNA, 731 bp, Homo sapiens
atagccattgtgtattactgggttctagtgagtgctgctttacacaattcatgttttacaagtaccatttcatttaatctccataagaggcctaaaagtaggaagtattggtttcacaatgttacaggtgggattaagtaatttaccagaaatcacgaagtaaatcatagagccttgacttgaactcaggaagttaacacaattctgggaatatagcaggctgccaagaaagggagctccgaaggacaatgaccaaatatggaaatattcagacaaagatcaattaaactttgtggagacatagagttatcagagtcctaaaagttcaattagaccaacctccaacatagaacacagacttcctctgcaacctctccaacagatggccatcccagctgccacctaaacaagtccaatgacaaaagagagtgctctacttgttaaagcagctcattgcattgctgaacgtctttgctggaaaaagtcttctttatatgaagctaaaatctgtttctccataagtatgagcaatttgttccaagcaatcaaaagaaaatgaattttttgtctcatgcatgtgataactcttcagaacaaataacccagatccttccatttttgctcacttgacatggtctccaagcccatcccttatctggctaacccctctggagtagaaacagtctagtttctcggtttttttattaaaatgtattcccagaaaaaaaaaa

SEQ ID NO: 272918 - DNA, 868 bp, Homo sapiens
cgggggatattattgcccagactacagacagtcctgacttgttggcattgtataaagcatgctccagataaacactactatgtacattgcttccaaaagttcatagtactgcaaatgttataacccttatgctgtgtttaaacccttattcctgagcctttccgcttcatgagcccacttggccagactttccaaaaaccgtatttaggggccttatagtaatattaatcaacacagatcttaggacctcttttcaagatcaaataaaaaatgaattggttaacctcacattgtagtttattttgactagcacagatgtaatcttaaataatttttaaaaatccagaaaataagccaggtgtgctggctcatacctgtaatcccagcactttgggatgctgaggtgggaggatcacttgaggccaggagttcaagaccagcttgagcccagcatggtgggaccctatgtcttcaaaaagttaaaaaaaaaaaaactagacaggtgtggtggcgcatgcctgtagtcccatctacttgagaggctaaggaagagaatcactggagcccaggactttgaggctgcagtgagctacacaagacaataagtgctaacaggtatgtggagaaattggaacccttgtgcaatgatgataggaatgtggaatggggcagctgctgtggaaagcaatataatgattcttcaaaaaagtaaacatggaattaccacatgatccagcagtttcaattcgggctgtatatccaaaagaaaggagggtctcaaggagatatttgtacagccacattcatagcagcactattcacagtaaccaaaagtggaagcaacctaagccttcatcaacacaagtga

SEQ ID NO: 272919 - DNA, 283 bp, Homo sapiens
ggatgacacagacagacataagttcttaaatgtcttaaatgttatgtgagaattaaacagaattcaaagacttgtggggagcacttaggaagttactgggaatgtcataaagggttaatttgtattttattttattttttgagacagtctcattctgtcacctaggctggagtgcagtggtgcaatcaggctcactgcagccttgaccacctgggctcaagtaatctcacttaatttttatttggtttaagaaagtcttggttgagggtggtggcttatgcct

SEQ ID NO: 272920 - DNA, 338 bp, Homo sapiens
ggagcacacatgcccaggtgtggaaggaaggtgggaggaagagtcatccttttggccccagtgggggacagagaaaggggtgagctgttcctctcaagatcctgcctcacttggtagggggagggggtccaggaagatcacagcagagcaccccctgtcatccgaataaagggctggaagggacccaaggaaacctgccagtctcccgaggccaggcctgcggggggcggggcggggagtccctgccgcactcccatccaccccccatgttgtgcctctccctgcagacggtaaatattggtgttgtgacttcattaataaaggcttctgtgagcctg

SEQ ID NO: 272921 - DNA, 732 bp, Homo sapiens
aactcacccaggcggccagacccgggcgcgggctccggggcacgcgctagacgacctgtcgcgccccctcctccctgcgggcgggcgccgaggcagcggatctagggcgcaacagaagcttctctccgctcccctatgcagaccattgtcagtgctccggtcgccggcgctttccgcacggtgtggcgactggcagcagctctcccgttgcgagtagtcacagcgctgtcccgcagccaggggcaaaagctgcttttgcatcagagccgagggctgcaccaggtgtaacttccaccccttgacctattttagagtgtgaggatgaaaggaagaggaaaaaatagacggagggcgcgcgggggtgcgggcggcagggtgcgcgcgtggccgtgggggagcgcgcgcgcgggccggggctcgtgtcggggcttccaaagagaagttgcagcgaggcgccccccggcgtccggcgcctgggcccggtcgggggtgcttcgctagcccttcttcccgccgcggccgcaggccagcttggcccgccctactccggcgccccgcgcgggaagcgcatctaccggggatcgggggctttgggctggcccccgcgacagccgttgggagaccgccagaggcccccgcccccgtcaccgtccccgcctccccgggccgccttcacctttcgggaggcggcgctcgggctcagctgtccggtaacccaggcctgcggcgcct

SEQ ID NO: 272922 - DNA, 346 bp, Homo sapiens
accaaatgcaagagacagcattttccaccagctctagctggaaaatccttagaggaggactgtagttatcagctcaaccaggacaacttgatcggagaagagtggttatccagaaagggatgctgagcagataatcaacgttctctgaagtgggtataatgactatctacatgcatatgggaaagggaggcacagagaaatgaagtaacttttccaagatcacacggttggttggtgggagaggtaaaccaaaaacccaggcctcctcactcagacctctgctcttgcctgaataaccatgttatttcgccacttcaaaataaaagtgagacctaccagttttcat

SEQ ID NO: 272923 - DNA, 376 bp, Homo sapiens
gagatgattgagcttagtgaggaagacatgttgaaaactgagacaggctgaaaggtatgtctcccaggctaaagggcagggcacaatcatagttcattgtaacctcaaacttctgggctcaagtgatcctcctgtctcagtctcccaggtagctgagattacatggcccatgtcacggtgcccatctctgcaaaaaatggaaagattggctgggcatggtggtgcatgtctgtagccccagctactcaggaggctgagttgggaagatcacctgagcccagggaggtcgaggctgcggtgggccatgattgtgccactgcactccagagttccagcttgggtgacagggcaagacactgtctcaaaaagaaaaaag

SEQ ID NO: 272924 - DNA, 312 bp, Homo sapiens
ggatattggtagcagcattgcctttctaaattatttccttcaaatagccatgacatgaatgataaatgatgataacattcagagaaactgttgtttcctaaatgtcacacctttgtattcaaatcaggaaacagacaatggagaggtgaagtgacttgtctaaggtcacactgttgtttagaattagaagcagtacttgattctgggtctctttccatctagccattcccagattcagctgctggtacaaagccttcggtggtgtcatggtagcacatctgccttccttgccgcttaagtataaccttaaaa

SEQ ID NO: 272925 - DNA, 291 bp, Homo sapiens
cctgcctctcgaaggcctgcacgggcccggcctcggcctcacagcggactctccacgcccagctagctctcgcctcactgcggcctccccagtccacagctcctgcctttcggccacttcggcaggtccagctcctgcctgccagtggcctctttaggcccagctcattcctcacaacggcctttccaggccccgtttttcccttctggcagcctcttggcctctaatttgtttatcttttgtgtataaatcccaaaatatggaattttggaatatttccaccattatata

SEQ ID NO: 272926 - DNA, 505 bp, Homo sapiens
aagctagaagtctgagatcaaggtgccagcaggcttgatttcccctgaggcctctctccttggctcgcagatggcaaccttctctctgtgttctcacacggtgttttcttggtccatgtgcatccctcgagtctgtgtgtgtgtccaaatttcccctttctataaggacaccagtcagactggactagggcccccgctaagggtctcattttaacttaatcacctacttcaagccccaatcccccagtacattctgaggtactggggggctaaggcttcaacatatgagcttggtgggtgggggacgcaatccagcccataacactgtatacccagggtgacttgggcagaggagggattcagggtggagctaaaatcagcctcagccactccttgatgctctgctatctaaattaaatcatttcattcatcaaatagtagttgggagcccattatattcaagacactcaaggagcttacagtctagaagaggagacagacttgt

SEQ ID NO: 272927 - DNA, 213 bp, Homo sapiens
ctcaggtgttctctcgggctctccaactgcctctgctttctgtgaaggtttaggctcagtcatttatgctggcaggaggccctcttcttcatgttgatggtgtggcctgtggagaggtggagccggtgtcttgctcctagagggagtcctgactccagcagagaacatgttccgggatgtgctccacagttggcaccagcacccacaagctcc

SEQ ID NO: 272928 - DNA, 492 bp, Homo sapiens
gaatccaggaggcggaggttgcaggttgcagtgagccaagatcgcaccactgcactccagactaggcaccagaacaagactccatctcaaaagaaaagaaagacagaaagggagaaagagacaaagagacaaagaaaggaaagaaggaaggaaggaaggaaggaaggaagggaggaaggaaaatgatggctctgaaaagagcctttggttgatgttacacctctctgcagtgttagcagctctttggtattacagtcttagtgttactgctcttgcagttttgatgaccaatttcctcaccatctctcgctgtctcactgatcattgcctcttgctgtctctctcactgcttgctgtctcttgccatctctcactatctcaccaaccattatctctcaccattgcctcatcaatcactgaccaccatcctctcttcactcctggctgactcatcaccgatgcagggcagattcttggctttgctcaggaaag

SEQ ID NO: 272929 - DNA, 512 bp, Homo sapiens
  misc_feature (38)..(38): n is a, c, g, or t
  misc_feature (57)..(57): n is a, c, g, or t
  misc_feature (67)..(68): n is a, c, g, or t
  misc_feature (79)..(80): n is a, c, g, or t
  misc_feature (92)..(93): n is a, c, g, or t
  misc_feature (112)..(112): n is a, c, g, or t
gcacgaggggcggcacgttggttttccattctgatgtnttctgtacctctgatttgntgaactattnncctagactcannttctgggaatanngttcggcccaacttttttnctgttgttttacagtttcaccatctctggaattctgctgcataaattctagtcattttgacctccctgaattccaatctcttctcacctcaggagaaaataaagagaacgtataatccccttcttgagctgtgtaaaactaccacctggcagaaagccaggaaaattataggtttcatcttgtttgcttcctgcttctcaagtgtcacaagactatgttgcctattgttgaatatcttagaagcgttgtttcatattttgttcagttttgtggttatttacagtgggagggtaattctcataacctttttatgatatttttgttttctattaccatactttttattcatacatgttttattcttcccttcttttccagcaataaaattttctttgttcca

SEQ ID NO: 272930 - DNA, 510 bp, Homo sapiens
aacaaaggaaaaatttttaaatttttaaatctaataaaaaaaaacctttagagggacttgataaaacatttccataaaataagaacaggttgttatgagaaaggaaaatagcccaagaagtatttcttggaaattaaaaatgcagtcaccaacattaaaccttccatagaaggagccgaagaataagtcaaggaagtatcccacaacttagattaaaagtcaaagaaatggaaaaggcgagagagaaactgagaaacacagatgactagcaataccaatatctaactaatatcaacccagaaagagagaacaaagaaacttaagagcaggaaattaccaaaggaataacagaagaaaactccccagagctgagctaagatatagaccttcaaaaagaatgacccactgagacagaagcaggggggaatgaaaaaagacccacagttgtatagttgcgtatcctcttgatatttcagaacatttaggataaagagaagattctcaaagctt

SEQ ID NO: 272931 - DNA, 451 bp, Homo sapiens
cagaattgcaaaagaagcaaggttttcgggggtggttccttcaagacgctaatagggtttgatggaggtgaaaacgggggcctctgaaggaaacaaagaggcagtgaatttgctttcttccatggggtgggggagaaatgtgaaggaagaatgaagcaagcttgtccaacctgccttatttcgttgtggttttgttttgttttaggcttttagcagcctgaagccatggtttttagtttctgtctctagaggtaaatggaaaagagggatgaggaaggggctttactggctcaactagaaacagaaactatgaatccatgactgtattctctcccttggacacccctgagaggccggagttcattctctttggattagttcttcaaggccttttcccggatagaaaaacatttccgaaatattatgcccaatggaagcctctataaagaat

SEQ ID NO: 272932 - DNA, 540 bp, Homo sapiens
tatagtcagtaggtgttgagtgttactgatttttggtccccgagctgggtacattcaggaacacacatatgcccaggtttatgggccgttattcacaaggctctcttaggttttctaatgtgaacattgtgtagtcttggcaagactcaataaaaactctctaaaagaaaatggctagaaacaaacatggtataaattgcaatatcagaagccctgtgctgaaataaagcaagagttcatgtagcctgtgttcagcttctgaccacagcatccagagagagcctgcagtgggaatcatgcttctactgagttttcaaattatgatcatggaacacacattctcctggatgccaaagtgactcatgtttcatggatcagcctaaaggtcagttcctctactaaactactttgaatccatagtcctacagtttaaaaatctggaaggcaattccgaggtcacccagagtgataaggtcattgcaatatttaaatcatgagttgaaagcactttgcacaatgtaacatgctataaaaaaacaa

SEQ ID NO: 272933 - DNA, 344 bp, Homo sapiens
agagggaagaaaagtaacgattcttaaattttctttttatgatatatatgatcctatgtacatatatgttggtgtgtgtatatatatatgtgtatgcgtatatataatgtatgtatatatacatttatttatacacactccccctctgtccctgctttgtggatttagctgcatggatagtaatgtctatctaaggggctatagtctagaatctagaatatatactatttgcttttttttctttcatatcattgaatctacagagtttggtaacctgcatctttttccacttagtgttagttacattctgaatattttcccatgctattaaaaaacttgtggaa

SEQ ID NO: 272934 - DNA, 487 bp, Homo sapiens
gaagcagtctggacaccttactgcaggtgtcctaacctggggtccacagcctaagggaccgtgaactgaggggatccgtgaacttgaatgggaaaatattacatatttactttttgtaatctctcaacgaaatttagcatttccctcaattatgaatattattagcaaatcccagcagcacctgtggttttgttaccaatacagcaaaccaaatatttttctatctcattacagttgttgcacgtatcttgaaataaggtttacgttcatcactacttcaaaatatccatagttgccaggcacagtggctcacgcctgtaatcctagcacttttggagtctgaggtgagtggatcactagaggccaggagttcaagaccagccttgccaacatggcaaaaccccgtctctactaaaaatacaagaactcgctgggagtggtggcatgcagctgtagtcccagctacttgaaaggctaagagacaaga

SEQ ID NO: 272935 - DNA, 410 bp, Homo sapiens
ctgcttccatttaatctaattgttctttagttctgctgtaccactgaggacttccctttactgcactccaaagttagagccactcttttctagtatctatgtcttcgatatggtttggctgtgtccccactcaaatctcatcttgaattgtagctctctcaattcccatgtgttgtgggagagaccttgtgggaggtaattgaatcatgaggggtgagtctttcctgtgctattctcgagatagtgaataagtctcatgagatccgatggttttgtaaaggggagtttccccgcacaagctctcttctcttgtctgccaccgtgtaagatgtgcctttcacttctgccatgatcgtgaggtctcctgccacttggaactatgagtccattaaacctctttcttttgtaaa

SEQ ID NO: 272936 - DNA, 123 bp, Homo sapiens
taggattttccttactttcttgctagtttggctgtgcattcaaaaaaactctctattctttctgaattgtatgttgggatagtacaaaagagcttattttgagactatttagtctgccatctt

SEQ ID NO: 272937 - DNA, 514 bp, Homo sapiens
gggccctcaaaggatggggaaagacagagtgaaagggatgcgggagagaaagtcacagtcactttgttgtatggcccagagtgactcttcttgtttcccaagtctcggctcaaaaagtagcgatctccattcacctttacctccttctccattctcatgccctattttattgtaactttgtttcccaatttttaggtcatttgtgtcacttgcaattctcacaggagtggtgatgtcaaagaaacccaaagaagagatagtggattacgggcgtgagccaccgcgcctggccttctgttcttctttggattgcttttcctacagtttttgttttccttaagttggggtctcattctgtcgcccgctggactttgataacagtaggaatgtacatctcagacaaaatgcagatgcctaaagtacatctgaaagatgatgtgaataattcctgtagtctatgcaaataaagaaataattgcccttattaaagatttcctataaggtgagtacttta

SEQ ID NO: 272938 - DNA, 845 bp, Homo sapiens
cagtcattaagtgacaagcttttcctggtttttccttttttttttttcgagattgcaccactgcactccaagcctgggcaacaagagtgaaactctgtttgaaaaaaaaaaaaaaagtcatgttgttttaactattcattgccatttgttggttgggcctcttcaaccattgtgatccaatcctagttcaatcccttgttgaattcaagtattgaggtcttaggatgaatgaacaaggctttgggctggcacataaaggtgggacacccacaggtcctgctctttgggagtttgggtaagtgtattttattcccgagatgcacttgtaaaaatatacatggtaggccataggtggtctcacagtttgtctgtagtagtacagttactgtttgattcaggggagtgagaggtgagtctgtttcagagcaggtgcctgggggacaacctggagaggaaggttgagcctgcagggctttggatgtgtgaaggtaatgattcccagtagtgttttgtattatttcaaagtacttctataccattgctacctcccaccaggtctcatctgcttctgtcagtaggttggccatgtccccatttcacagatgaggaaacttggctttgagagtgtggcttggtgcaactgagatttgggtctaaatgcaatcatgattgcatttagacctgattttaggcatagtcatttagtcattgcacctgctgcgatggcttccttgtcattgtgaaatgacgttatggctccgataacagtccaagttccttgtattctaaatcgccaggatctttgtttaggggatatatacgtactttaccatcgaggctcacgt

SEQ ID NO: 272939 - DNA, 237 bp, Homo sapiens
gggcagccttgctcccgagacagtgaacatggagccaagcccaccctggtgggggctgtcgttccagccttgagaccgccctggcatcacattttccataatcacttatcagggcagccactgagcatccaggccaactcaggtaccccttttgcttgagccagtggcctcaagctactactctgtgtggggaagaaaaagtagtgtctctgttcttctgagttcctacgaggggtg

SEQ ID NO: 272940 - DNA, 437 bp, Homo sapiens
aggctccagaaaaatgtttcaaagggaaggatgaaggcttatagaatacctgattgcttgaatgcgttgaaaaaaatatttattcctagaagtctgggaatgaatattcattaatattggatgaagaaaatagacttttattggccgggtgcagtggttcatgcctgtaatcccagcacttttggaggccgaggcgggcggatcacgaggtcaggagatcaagaccatcctggctaacacagtgaaaccccgtctctactaagaatacaaaaaaaaaaaaaaaattagccaggcgtggtggcgggagcctgtagtctcagctacttgggaagctgaagcaggagaatggcgtgaacccgggaggcggagcttgcagtgagcagagatcgtgccactgcactccagcctgggtggcagagccagactccgtctcaaaa

SEQ ID NO: 272941 - DNA, 319 bp, Homo sapiens
cagagggctgctcaagtggcctaacatggcagctggttttccccaaagcaatccatgagaaagttcgtgggggggggctgtaatgccttttatgacctagtctcagaagtcacatgtcattatttctgccatgttctatttgttagaagcaattcactaagtacagcccacttataaggcaagggaaatagggctctgcattttataagaatattgaatttttgacatgtttttaaactattacacatatgcatataaaagtagcatgtaagttaataagtgtggcaaagagataacttcaagggaaacaaaatctaaa

SEQ ID NO: 272942 - DNA, 1313 bp, Homo sapiens
gctaaaggtcgtaagcaaggacaatgaacctggaatttggaggaattcatactccagtgaagaatttccagacccctcatgaaaatagcagattgcctactcaccagagaatactcaagctgaaactaagcagcccctggagggtaagcaaatgattagaagggtagatttcaggcaagcaaaagggtgagagcccagaatctccatgtgaatgaccctaaaattacaggtaatataggaagtggcttccttgtacctctagaaattgaactctcagaacctgactgacagtctgctcttaagaacattacctcaatctggagagaaatgtgtgtttcctctcctatatggatttcagacagaagcagaaggaggcttagaggttcttcgtcacaagttgccaaaatgaaacagaactgtgaaaagaaaatggagatgcttcttcaggaggtgcccgtgatgtgatttacttgatgattatggcctgcagggtattgagatgggattatgtaacttaaataaactggatatgagtagagatctgaaagatttttcaaaaacattcagctttactttttttttctcctaaggaacaagttgttcactcatagagctgaaaaggataaatgaagtgttcagtacacagaagcaaaatatgagtagttcatatatcttttgtaaatgttctatgtatcactgtaaactagacatcttccacatgcccctatgtttttccattttgaaatcaatttctagttcaaacttgtcaatagacaatgaatatttgcaaagttatagtttcactgaattaggatgtaacctgtagctcacaatgaaaatgccattagcttgagtttaaaatttatgttgctatttttttcttttgtcaatattttccttctgtgggacttattgcacaagggtcggatatcacaactgagggaaactgcagaacaatggttcttccaatcattcagacccatttaagccatagtctttgttggctttgccaaatgactgaatgcttgggtctattagcactgtcaaatagtgttgagtacatacttgtggcataagcaagttaatatttatagggagcacttttgcatgtcttttaagtcacatactaattttggaaagtctctatgctttatattttgccctgaaaacagatattctagtttaaaaatgttaatttagtgattagaaaccgctgtatatattattacatatattgtctaacaattgaagataattatgtttattaattgcaaataacaggacacataaataataaacaaagatcggccaat

SEQ ID NO: 272943 - DNA, 831 bp, Homo sapiens
taactcattttatatagactttggcagtgttctgtgatctgttaaaatactaatatacctccagttgacatatttctgctttttttttcctggagaaaagtggaagttgagaatagtataaaggaaaatgctggagtaggaaaggacatgtactgggggggcagaaggcctgggtgaccttggccaggtcatttcctcactctggatggcttcattttacccatttagaaaacggattggggtcaatgggattgcactagtgattgctaagttctcttacagctaggattccgttattctattgtcctgatctgaaatctcccagccaaagctttaggaagccacctattctccctgttctcctatgaagtttgttactgtgaacttgaggagcagttgatctgagtggactcgccagtctagctaacatggagggctagcttcctctcagggatgcagagtgtgctttgttgtgctttcttcctggagaaaagcatgtccagtagtatatacatcagctaggtgggattctttgggacagtggcatgtgctgtgtttgaaagtcctttgacagagttgaatctgacaaagctatcccagtttgtaaccatgttaagtggtggctttcattagccttaagccacttttagatataggagacttcctatattggtacatcaacatttttcgagtacctcctgtctgcaagacaccatcacagtataaacttaaaagtacttatgactcactaatccagccacatgaaagtgatcattcatctgaataaataaataaacagttttcattattttctccatgaaaaggtctgaa

SEQ ID NO: 272944 - DNA, 553 bp, Homo sapiens
  misc_feature (536)..(536): n is a, c, g, or t
  misc_feature (541)..(541): n is a, c, g, or t
taactcattttatatagactttggcagtgttctgtgatctgttaaaatactaatatacctccagttgacatatttctgctttttttttcctggagaaaagtggaagttgagaatagtataaaggaaaatgctggagtaggaaaggacatgtactgggggggcagaaggcctgggtgaccttggccaggtcatttcctcactctggatggcttcattttacccatttagaaaacggattggggtcaatgggattgcactagtgattgctaagttctcttacagctaggattccgttattctattgtcctgatctgaaatctcccagccaaagctttaggaagccacctattctccctgttctcctatgaagtttgttactgtgaacttgaggagcagttgatctgagtggactcgccagtctagctaacatggagggctagcttcctctcagggatgcagagtgtgctttgttgtgctttcttcctggagaaaagcatgtccagtagtatatacatcagctaggtggggttggtcgnggggntcctctaaagtc

SEQ ID NO: 272945 - DNA, 456 bp, Homo sapiens
cagtcacagataaaaccagctgggaagttaacaggaaacaacttttctcccaaggtcaggctgctgctgttgagtcagaacaacgtctttcatagctgcacttttactgagaaaacttgttttttaaaatcatagactgtcagaaaatatgctctttaaaatcatatcaataagaatgggataccctactctttcctggctgatctaaatccatttgacacaaataagcagcctagaagaaaatacaggaaaaaatctaggtgaccttgggtttggcaatgagactttagataaaacacttaaatcacaattcataaaagaaaaaaacaatttaaacttctgccatgcaaaagacactgttaataaagaaacaaatcacatactgggagaaaatattcgcaaaacatttttacaagacttacacccaaaatatacgaagaactcttgaaactcaac

SEQ ID NO: 272946 - DNA, 271 bp, Homo sapiens
ccagccagctcacactcttttgcacagctcctgggactcccgttgacacacagggaacagccacccacaatggactgcactgttctgtttgcacccttaaatttatcgtgcttacagaatgacacttctgcaaactagtcaagtagggggaagtggtttgtggatatgcacccttgttcattctctttgaaaaggtaaccagctctgaattctttctcctttgaggaggagtttcacttgtcgcccaggctggagtgtagtggtgcaatct

SEQ ID NO: 272947 - DNA, 485 bp, Homo sapiens
ccttctctcttccagcctgcatcggtggcttcatggggacttccctgtgatcagctgacagagaaagagaagacttaggcctggtttacagagtgttctgtatgatatgcaggtaccaccctaaagtggatagctgcagcactacatctcacctctgggctaccttgaaggacagtggtgaagggaaatcctcctggtggacacaactttgagcagtccccctgttgactttgcttagaaggaaaaatagccagatattcaattatatgccaattcataggccgtggccagtggtttggctggatggtcagggagttcaatataactggaaaattggtgacaaagaaatttggagatgaagtatgtggatagacactgaatgggcaaaaagggtgaagatatttgtgccccatgtgaatgctcaccaaagggttagcaaaaaaggattttaataaagtggacaagataacctgttctgtggatac

SEQ ID NO: 272948 - DNA, 746 bp, Homo sapiens
aatgagggagctcttgagctcccttgatgagcaccacacagggccctctgggaagcagtaagaacccatcccagggctcaataagaacctaacccagcctgggatggcccttccctttctgccaaggtccttcccatgccaaacctcaggcccttatcttggtatctgtcaccacccaccacccccccgacacacacacagtcatgcaagttgtaagacagtgacagaagatttgaagaagaccaccagagcaggggatagcagaacatgcagacttagggggaagccaggcgttcataccaaagaattagacctgttgggtacccaggctgggggtcaggtgaggagggagctgggatccagcaagcctagtgaaacccaggggacagtggactcggtcacatccaggatggtgatcaacagctgcatcatcccgcttccttctcaagcgacaattccagagccttggccacacggtgcttgtatctttcgtattcagaccccctgggttccagccccttactgccttcactttcctctcaccccttgactcatctttcctgctacttgtcacttgagatacctaagatgatgtgtgttatggagaggttagagcaccagcttcagaaccaccctgtgactttggcctagtcacctgacatttctagactttggtgtcttcattcataaaggcagtgtggactgcttgctgatgttatcgtgaacctgaattccttcttagagtt

SEQ ID NO: 272949 - DNA, 724 bp, Homo sapiens
tacttttccattgtatgtatataccgcattttgtatccattcatctggtgacagacgtttgggtcatcttcacctcctgacgtttgtgaataaagctgctatgattactggagtacaaatactcatttgagtttttgttttcagttctttgggatctatacctagaagtggaattgccacatcatatactaattctgtgtttaaactttgagaaaccaccaaattgttttccaccgcagctacactattttacattcttaccagcagtccactgagtttccaatatcttgtagcccacacttaccttctggcctttatattttggtttttgtttgtttgtttgctttttatttttgaacagttgctctttcttatatctcatttggggttgggaaaatgaattaattgatctcaacaaaccttttaagtatcaggaccaggcacggtggcatatgcgtgtaattgtagcactttgggaggccagggcaggaggatcacttaagcccaggaatttgagatcagcctgggcaacacaaggagaccctatctctacaaaaagtttaaaaattagctgagtgtggtggtgcgtgcctgtagtcccagctactcaggaggctgagataagaggattgcttgagcccagtctgaggttgcagtgagctatgattgtgccactgcaatccagcctgagtgacagagcgagaccttgtctcttaaaaaaaaa

SEQ ID NO: 272950 - DNA, 203 bp, Homo sapiens
actttgtgatggggaaaagttacttccacaatctgaaagctggtattttggagaatatttaaaatatttaaggcccatgcatttttcagctaatctgtagttttccacaaattggtagggatcttagagactgttaccacctcccctgggcagaaatgtcttgacgtatatacagctactgtgtacccacaaaaaagaaaaaa

SEQ ID NO: 272951 - DNA, 593 bp, Homo sapiens
tttttaattgcaaaacttgttgcaataacaagttagtcaaagcacaactatcaatagaattttgagtctgttgagtcaatgagtcagcacttaatccattggagataataggtcatagagaatgttccagtaattcttgctatattcataaacattgattagtgctgcagagtaagcaactctgcctaagcacattagcacttagctgaccacaatttatgatttatgccagatgaataattcactgaaatggaatcctttatttggagttatttttcatgctttccaattgctaaacacatggcagaagtgagaaaaattgtaagctcttctgaggataggaaagttagttcaaacttcattctcctcccctaagtctagtacaagtttgtcattctgtaagtatttgttggtaacaaatgctcttttttcttatgtaatcatggcaatttccttataactaaaaataattggctttatgggaaattatggccaaaattttaatgaaattattcatactgctgggtcaacatttataattttgattgaataaatatgttattagaactaataaagtgttaaaaagttaaaat

SEQ ID NO: 272952 - DNA, 500 bp, Homo sapiens
aacaccacttctcatattccagctcactttgtctggtcacaaaactccaaaagtcctttgaaaatctaactcactgcacctacagtccattagtctcatatcctttccctggcctggacccccacaccctgtgtcctcacttcactacttaactaaattccacggtcaatcgtcataatcactcccatgcagataccttcactaagtttttccccattccttttcttacctatctgtgcctaaaccaaaaccctcattaaatctaaactctttgctctgccctaagccacaaaatgtgaccaaaggaaaaaacacagtcctgccatcatctttcatttccagttcaggaaaatccacctcaaaaggtctgttattcttcctctctcttcacacctccttggctcatggccctttttcctgatccattgagaaaaagatccaatcaaaagagaaactgtaccagctcccacgatatctacccacttacctgcaccttgaaa

SEQ ID NO: 272953 - DNA, 366 bp, Homo sapiens
aaaggattagtggtacgagatacactatttggtgttctgagggcatgataagtaatggtgttaaatcaatatgtaaacactgacatattctataataacattaagaacccactgaagtctgggcgtgatggctcacccctgtaatcccagcactttgggaggccaaggcgggtggatcacctgaggtcaggagttccagaccagcctgaccaacatggtaaaaccctatctctactaaaaatacaaaatttagctgggcgtggtggcacacacctgtaatcctagctactcaagaggttgaggcaggagaatgacttgaacccaggaggcagaggttgcagtgagccgagatcacaccgctgcatt

SEQ ID NO: 272954 - DNA, 427 bp, Homo sapiens
ttcctaatgttcctaatgttctagaaactcaaataacagggctggcacacacagtttccgggaacctatcccattgtgggcccctactcagccagatacagtcaaatatttaggagaagggccagggaatctactttcagcaaatgttccaggtgacacatttagtacctaatttgggaaatgttaatctagtccaatcccattagtaagaaaggaggggtccttagtccaaaggaagtgaccttccaagataacatagaccagcagtgtcagggttgggacttgaaccaagccaggtctccaggcccccactagggtcttgttcaatgggtaaccatgttagttctaggagaattttatcattggaaatgcacatttgtcacaaacagcttatagatgagttggataaattagggctcattagggc

SEQ ID NO: 272955 - DNA, 656 bp, Homo sapiens
agcaggtgaggccctgagacctgcccaggcagcccacaaggtggtaaagaaggggctagagtgagaactcagggctcacagctccactggcctcttcccagcactctgacttccctgagaaagaagtttgccatgaaagaagagagtagggctgggggagcgccctcctgtgagtcaggcagaggctgcaatgggctcagcggggagaaggcctgcctgcagtgaccagtgggccctcagctgccaaacccacaactgtcagatgcttctcaaaagcaaaactggaacattaaaggtagaaatcatgctcggccagatttactctcacatgtgcacacacaacttacacatacacatgtgcgcacacacacaacatacatatacaccatacacacaacttacacatatacacgtgcatacacaacatacatacacactcatacacaaacttacacatacacacgtgcgcacacatacatatacacatacacaccttacacatacacatgtgcacacacatacactcatacacaacttacacatgtgcacacacgcacaacatacatatacacccatacacacaacttacacatacacatgtgcacacatacacaacatacatatgcactcatacacaacttacacatgcacatgca

SEQ ID NO: 272956 - DNA, 333 bp, Homo sapiens
gaacaagatgtttctttgtagctctttttaaagtgaaccctttgagtaatgactgcattagaacttcccagaaaaaggaggttaaatcactatagacagacggataagcgtaaatgacagagaagcagaaaatatatctattgatcatttgacaatagtcttgaccagtatttgtaacacaatacactgaaggcatcgtgttttttgaaagtgtatacactttggattcagacacacttggttttaaataacagtttggctactcgtgtgtgtgtgaccttgggtcagttacttaaactttctgagttcattttcctcatctgttcaatggtt

SEQ ID NO: 272957 - DNA, 963 bp, Homo sapiens
tgctcaagcctgcaccctcgtccaagtcctagccccactgaacgctatgcctggtcagcagtgcgtgtcaggggtgcctggcagagtgtgcattttccgtacacccaacctgtctctgcctctccccaggccctcacagcaaccaggccaggcgagaagcttgggagatagatactcagaggaggcactgtggggccatctgaagatcctgcgtcccctgtcacagcctttatgtcactcagggtccatgactgtgctagaagcatgtccctgaggcccatggtggtgggaggagggtgtgggattcggatctgggcacctggctgtgctgcacaccagttgtgtaatcatgatcatctgctctaaacacgtatctttaacattcgagaggaatgaccgcctggtggggttgccatggagagtacgtgagaaattaaacctcacaggtgcttagcaaaagttaattcgctcttctctgaaggcttaaagtgctaatcccctggcgaggggggaggtccagtgaaaatacacaacccctggccacaggttccattgttgtccggactcctctgaccagtggacagccctggacctgggttctcagacctgagtcagaaccacgtggaggacaccatagagcttaggctgctgcccctcaccgctgcccccctctcacaggatctggggtggggcctgggaatttgcattttaacatgtttccaagtgaccctgaagctgctggccctgggaccacacttagagaacccctggttcaggctatggggcctgggccaggctcgccgtctagcagaggatcagaccccaggttggagcataaccgtcatgatggctccattcatcaggcacctgctgtgtccccgcacgcccagatccctgccacagcgcagcctccctagagaagtgacatccaatgctcgaggggaaataaatcaaaggtagttt

SEQ ID NO: 272958 - DNA, 373 bp, Homo sapiens
acaatccttacaatcggcccaacaaagcataaggaagcagggtatttatccaccaactcatgatgtgatggctgttcttggggatttaactctccacttcaggcctggccctccgtcatgttagccacgcaggctcttatgggccacagaaagacctcaagagttcagaagccagctgcatgcaagggaatggtacaaaaacttcagatgacatcctgcataggccaaaggaatctgccaacaacatctgtcaaagctatctacaatacagtacgttgtatcatgttttcccaagcatgagacaagtaccaccagtggttcaggagatgattttaggtggttctgggtcatggaattaaataacattgaatta

SEQ ID NO: 272959 - DNA, 195 bp, Homo sapiens
tccataggtcccctgggcataaagccctagacagtctccctgtactgctggaataatccctttgggaccacccccattcaggacaagtagcactttgatcacttactaaatctgaggtgaatctgggctacaggcacaatctagagccaaaaaggcagtgacatagcgtcaaagattcgccaagcaaatataccc

SEQ ID NO: 272960 - DNA, 438 bp, Homo sapiens
aacgcccctcccagtctcacagctaggaggcttcatcactgctaggccagttggagcgttccctagagctcagaacaaattgtttcctctgctgtccctaaatataggacacctacaagcactctgaagcaagggcagacattcccacctggtacctgtcaaagtcctaggatgcctgggatcttccatctttcagtctagcacgtgggaccaaatacaagagatgctgccctcacaacagccttggaaaagatgagcgccagggctgtcagtacccatcggttcagtaagcgaggcattgtccacgctgcctattcactcgagagatgaatagtttcctgttttcgatggctggggagccagtatgagctcataaaccaaacagcaattttcagagacatctgttcctgatcttcagaataaactcagtgtccagtt

SEQ ID NO: 272961 - DNA, 816 bp, Homo sapiens
aacgcccctcccagtctcacagctaggaggcttcatcactgctaggccagttggagcgttccctagagctcagaacaaattgtttcctctgctgtccctaaatataggacacctacaagcactctgaagcaagggcagacattcccacctggtacctgtcaaagtcctaggatgcctgggatcttccatctttcagtctagcacgtgggaccaaatacaagagatgctgccctcacaacagccttggaaaagatgagcgccagggctgtcagtacccatcggttcagtaagcgaggcattgtccacgctgcctattcactcgagagatgaatagtttcctgttttcgatggctggggagccagtatgagctcataaaccaaacagcaattttcagagacatctgttcctgatcttcagaataaactcagtgtccagttaaaaaaaaaaaaaaggggggggtagtcccctcgggggcccaagctttagcggttccccaggtttttttgtaaaaggggggccccctattagggagagcgcggttatattaagcggtagggcacggggcccggtcgtttaacacacgttcggggatgtggggaaacactggctcgcctggggattctttttgagaagggaccctaacttttttgggggtggagcttactttggggacaaacttaccttacagagagagattaagcggtctaagggtagaatatttaaaatttcaaggtgttttatgggtgtatccaacgctgattttcgtggccgtgaagaagttggctgacggagtatgttttttgaaatttttttcg

SEQ ID NO: 272962 - DNA, 597 bp, Homo sapiens
taggactttataaactgacatttattgttatcattttggaacatatcaaaatccgttcctcaaaattaaaaaaaatctaagcatatataattcaccagatctgaaaagaatgtgttaagggttactaaaagtgactgagagcaggaagaaatgatgcaagaagtgaagagcagagccatggagaagtgggggtaggggggcagctatttcagaatgtaccagcatttcctgaaggtgagagatatgcccaggagagcagatactagattctttgtttacgacactggatgtgggaacaggtttaagcagagatgctggcagaagctgtcacagaatgaatttggtagaggaaagcaggggacagggacctcatccagaattgtaccttcaacaaggtggctatagttaatgacgatatagtctcaaaaactgcagagagagtggataagtgttgtcaccacaacaatgataactatgtgaggtaataaatttgttagctagatgtaagcattccagaatgtctgtatacctcaaaacattaatgttgtacatgatcttacactgtcaatttttgaaacacattaaaacttaaattta

SEQ ID NO: 272963 - DNA, 782 bp, Homo sapiens
gtgggttgaccgtggcttgtgggttgaccgtggcttgtgggttgaccgtggcttgggggggtgaaaagagttgctgaaaatctcccgatgggcaaattgagggttcccccaaggagggacagtggtttggatggttccatgggcctgagtcacctgtgacagggccaccccccaacccccagggtatttttagctgcaggctgcactcccgtctgggcctgggtctgagtcacactctgtccgtgagaagcgtcttcccttccggctccaaagccacctccccaagtcgctccctgcctgtgaggcaggagggtggcccccagccaggcagccctatggagccagtgttccccccacccttgaggggtcagcctgtctaagaggaagacttcccttgggcagaggggtgtgggtcggatgatgcccatgttgctcactctggcttcccgggagttattttctgtcctgggaaaatagaaatggatggaaaatgtctgggcttgggccgagcctcagccacacccccacactcgctcactctctggcctctgccattcattcccccccgccccaccccaactcacccgcttcctccatccttatcctttccaggcaccaggctgtctgggggacaggcatgcacacgtgtgcacccgctcacacacgtggccgggctctgggacctcggggccacttctcccaggcacccatcgtcacccacggagatgggaggcatggagcatgtctcctggccctcccctctctccaggatctccctgtat

SEQ ID NO: 272964 - DNA, 564 bp, Homo sapiens
aaaatgataacatgtttttaacacatgcatatcaattaactgagtaattctgtttctagagtttttccctaggcaatacataaaaaggtacactcaagaaattgatcacagtatcatttataatagaaaacattgtaaacaccatgaaaatctaatattaggaattggttagatcattatttcccaaagtatttcgaaaagatcaaaagttctaggattgttaatgtgtaattcacaaaaggatgttatggtcaaatagctttaggaaatagttgtttaaacctattattctgtttctttactctagcacatctgaacagatcatacatgatctcagtagaggtaactaaattagggtatatccataaagtagaagattaagcattcataaaaagtgatacagatgtgtgtgatgtgtgtgtgtgtgtgtgtgtgtatgaatatagaaatgtgttcttgatatagtaagtaaacaagtatgtattatatgaagtcatttatatgaaaaatgttttttaaaaatttagtgaagtatacaataaatgttaatagtggtcatcttgg

SEQ ID NO: 272965 - DNA, 441 bp, Homo sapiens
ttgcagtgagccgagatcatgccattgctctccagcctgggcaacagagtgagactccatctcaaaaaaatttaaaaaaaagtttatcatcaggctcttcattttttggctgttgatttttttccttattttgagagtaggcctcaaagagcaggaaggctattcttgattaggcgtacttcagggcacagtgacgcatccactgcctcttttaaatctcatctgagtccttatttttatttttttaaagatagggttgcactttgtcacccaggctggagtgcagtggtgcaatagcccattgtaacctcgaactcctgggcttaaacagtcctcccacctcagcctcccagttactcaggaggctgaggcaggagaatggcatgaatctgagaggcggagcttgcagtgagccgagatattgccattgcactccagcct

SEQ ID NO: 272966 - DNA, 456 bp, Homo sapiens
ttgcagtgagccgagatcatgccattgctctccagcctgggcaacagagtgagactccatctcaaaaaaatttaaaaaaaagtttatcatcaggctcttcattttttggctgttgatttttttccttattttgagagtaggcctcaaagagcaggaaggctattcttgattaggcgtacttcagggcacagtgacgcatccactgcctcttttaaatctcatctgagtccttatttttatttttttaaagatagggttgcactttgtcacccaggctggagtgcagtggtgcaatagcccattgtaacctcgaactcctgggcttaaacagtcctcccacctcagcctcccaggtaactaggactacaggtgtataccatcatgcttgggtaatttttattttattttattatttttttttgagacggagtctcactcttgcccaggctggagtgc

SEQ ID NO: 272967 - DNA, 510 bp, Homo sapiens
aaaagggctgatgggacctcagtcatgtggcagagaatctgaaagccagaagcttggcaggtctgtctcggggtggggtgacggagagacatttccctagaattcagctgctgggagcagaaagacagagcaggggcaagtgctgggtttctgaggcccgcagtcctgagcatggcctcaggcagtctgttctatgacagaacctgaagaaaggcccaggcatttgcatctatgtgtgcagttctacttgtcctaaaggcacttctcacactgggagcctgcctgtctgtacctgtctagaaatcagcctggctgggacgcacaccaataggagggcatcctcacctttcccacccatgagtcgggactgttgcctgctgtgcagcaaaggcaccaggaacacggagtcagacacttagggtctaccccaggctccacttcccactgcctatttgactctgggcaagtcttttacagcttttcaaacttctctctttcttaaaacaaaaa

SEQ ID NO: 272968 - DNA, 302 bp, Homo sapiens
cttctcctcttctgggactccacctacacatatagacctttccaacagatctcctctgcctcatacactccgtcctgtactttctctcagttttgatctgttactctgcctcattatttcccagggaccttcttccagctcactcatctgctcttccttcatactcaatgttttgtgatgcccatctattgagttattagattcagctctagaatttccatttgattactttgtttatagaatcaatttttctggtgaaattttccacttaccctttattttcttgaacatatcaaccacag

SEQ ID NO: 272969 - DNA, 1085 bp, Homo sapiens
tgctgctcctgctccatgggaaatggtgaattacactgcccatcaatagagccaatagcaaacacaagcaccagtgagcctgtgattccttcgtttgagaaaaacaatcattgtgtgagtcgctgtaactcccagagctgcatattagcccaggaagaagaacagtatctacagagtggagaccagcaactgacccgacatgtgttgctgtgtttacttctcatcattggcctgttcgctaatctttccagttgtttatggtggctattcaaccaagagcctggaagactttatgttgagttacagtttttctgtgccgtgtttaactttggtcagggatttatttcctttggaatctttggattagataaacatttaatcatcctgcctttcaaaagaagacttgaattcctatggaacaataaagacacagcagaaaacagggattctcctgtttcagaggaaataaaaatgacctgtcaacaatttatccattatcaccgtgacctctgtatccgaaacattgtcaaagaaagaaggtgtggtgcaaagacttctgctggaactttctgtggctgtgacctggtgagctggctaattgaagtcggccttgcctccgaccgtggtgaagctgtgatatacggagacaggctggtacaagggggagtcatccaacatattaccaacgagtatgaattccgggatgagtacttgttttacagatttcttcaaaagagtcctgaacagagtcctcctgctattaatgcaaacactctccaacaggaaagatataaagaaattgagcattcatccccaccctcacattcccctaagacctaaattatgcaggggagaaccctacatggaatcatattctagccgcgtattcattagtttttagctgggtgaccttgggcaagttaacagaggcaacctctctgagcctcagttgtctcttctgtaaaatgtgaaaagatgtgctcccaccacatgcgcagggtctgtgattttacatgtatgtaaaacacataggaagctgacttaggaaaaagagaaaaccaaattaaagttccgttgatgccgta

SEQ ID NO: 272970 - DNA, 445 bp, Homo sapiens
gttgggggttgggatttcgacgttttgaagcatgaaatgatctgtaaaccatttcaaggattttgaattttatactaagaacaatgggaagacactgcaagtttttaggtaacggagtgacaaacagaactctccttattttgtgttgatctgacttttgtttagatcaagaataaccttgatctcagccacatactgcatacatgatgtgtctttccagagtatcccatctggaggtacatgggtatctgtctctcgtaggtgatgttaattttgattacccactcaaggttttgccctgttttgttgccgtattttctctgttttgcaattagtaactaatctgtgggaaggttaagaccttgtaaatatttgcttctcatcaaatatttctctttgatttggggtccattgattagttactaatgtcgacgcggccgcaatt

SEQ ID NO: 272971 - DNA, 648 bp, Homo sapiens
aagttccacttcgtggacctggcgggctcagagagggtgctcaagacgggcagcaccggcgagcggctcaaggagagcatccagatcaacagcagcctcctggcgctgggcaacgtcatcagcgccctgggggaccctcagcgccggggcagccacataccctaccgcgactccaagatcacccggtgagctgccccctggctcctatgtggcctgggggccggggaggcggggagtgtccagcacaccagtgggggtggaagcccaggtcccctgaggtctccagcccacgggaaccgcgccaggagccggtcccaggtctggcccgctggccctgggcctggagcgtcggggcccctgagagcctccccctcgcgccctcaggatcctcaaagactcgctgggcgggaacgccaagacggtgatgatcgcctgcgtcagcccttcctcctccgacttcgacgagaccctcaacaccctcaactacgccagccgcgcccagaacatccgcaaccgcgccacggtcaactggcggcccgaggccgagcggccacccgaagagacggcgagcggcgcgcggggtccgccacggcaccgctccgagacccgcatcatccaccgcggccggcgcgccccaggcccagccac

SEQ ID NO: 272972 - DNA, 373 bp, Homo sapiens
ttccttccaaagccagaagataaagggggaaaataccccagcaaacctgtggtcatcacgtccattcttcacgtttttaactcccttcacatctgcctgctattatttgtatttctgagtcttcaggtggtttctttttgtattcactctggggtgttaagtagaaatcggtgagagagatgctgaaatgtgcttatctcatcttggccagtaatagaagtctgccttgtatatgttattgtatgtatgtgtatatattaagttgtatatacacatattaaatatacatacatatattacattttatacacatacatttgtttcctcatgcaatttgtttcagcagaagtaaaaattaataaaggtacaagta

SEQ ID NO: 272973 - DNA, 518 bp, Homo sapiens
gattgagctaacggccatctgttatgatgggacaatgctgattcaagaagtgtcatttgccactttatctgatgtcaggaggcaacacatgaaatctgaggacctttaataactcacaacaccttgtgtgtaagatccccggggaaaggcaaccccaaattagaaacatgtttcactggaagggcactcacttactgatacctcagggactccactttgagggatgcctttatcattcatacctttccatggcatgaatggaaaactgctgcaatgctgcttctgtcctaatgcatttcatgagtcagcatatgacaaagggaagggacacccaggtcagccccatcattgtatctgaaaccaacacttcgaatataattggaatgattacatacgattctagatgttgagtgattagcacagcaagtggtgcccagttggttgctattattactgttgttgttgacattatgattatgcttattttgtgttatttattaaatgaatatacttaaaaa

SEQ ID NO: 272974 - DNA, 983 bp, Homo sapiens
tgatttaatcatctgatatggcaataactctgaagaattctggctaggatgtatcagcaaactgcaatgcagcacagaatttcaatgaaaatgcattattctgaaaatctttctctactggaaaatttccagaccaatatctcttcaaaagaggaaaggctgttaaataatgggccccaatgccattatgatacaatccattaattcatattcaagattccccatgatccaggaaagccactgatgctacagctattttcttcacatttcatataagaagaaggagtaaaattgggaattccagcgaaatgacatctgcttacatctgttggccatctctagctgccaaggagactgaaaaatatagggtttttttggccaagtatgttgtttatcagcacaaaattatggtgctgcaagtaaaattgaatggaaacataaatattggcacagtaactagtaatctatgaaacaaagcataacatcaaattaatcctctttctgcaactgtggtgttctcttcccatttcctggtgaagccttggtagcaccatccactcaatgagcaacagaaatctgacagtaatttttgatatgtatttttctctctcacctcatatccaatcatgaaaatattctcagaattctctctctttttataatgtcagccagatcatgtgctgatagcataagaaggtttgaggaaggcatgtctcacacatgagtctgaaaacctaatcatcacacttgtgaaccacaaaaagatctctcaggatgcttaactaccttcaacttgggtcctttaactgcatgacactctagctccagctacatgtttttttccttgcactttcaatccaaaacattaaaacctatcagatatattcatgatcagtttctcattagtttcttgatcctttgcaatttgttttctattgcttttctccagtctgcacacccctttaaaaggtattcaaggacat

SEQ ID NO: 272975 - DNA, 447 bp, Homo sapiens
catactgtcagtagagaaatgtgtgctataatcattattacttatgacatttctacttaactaagaaggcatttccaggaaatatcttttaaatcagtaactttaagaagctgacgctcaaaggggatttagaatctggattatttttctgattcaaattatcttttcttttggcctttgaagaagcaaatagatatttatttctcttgttccctcctctgcaaatgcttaattgattttattcctgtcagctgactgcaatagaaatcgctgtttccacttcttcctgttaacaccttttctgcaggggtggagggctagggggaagctgggacaggtgaatgtcttcttgcgttcggctgtgttgtgcatggagaagatttggagaattttcattcttccaaaattatccacaacactttgaaatgaggtgacctcctgttcggc

SEQ ID NO: 272976 - DNA, 380 bp, Homo sapiens
gaccccatgtgccaggcccggtgcccacagacatgaggggagccactggtctggcctggcttggaggttagagaagggtagttaggaagggtagttagcatggtggctcatgcctgtgatcccagcactttggaaggccaaggtgggcagatcgcttgaggtcaggagttcgagacctcatggccaacacggtgaaacagcgtctctagtaaaaatacaaaaattagccgagtgtggtggggcatgcctgtaatcccagccactcaggaggctgaggcgggaaaatcacttgaacctgggaagtggaggttgcagtgagctgagatcacaccactgcgcgcgagcctgggtggcagatggcagagcgagaccctgcttca

SEQ ID NO: 272977 - DNA, 283 bp, Homo sapiens
ggttggggggacagattgtgtatagttgggagagagattgtttatggttggggacagattgtgtagtgttgttggcaggcattgtgtagggttggggccatagatggtatagagttggggaacagattgtgtagcattatagggagagatgtgtaggattgggagagatttgtgtagggttggagagatggattttgtaggcttgtgggggacagattttgtagatttagagagatagattgtgcagggttgagggggacagattctgtagatttggagggat

SEQ ID NO: 272978 - DNA, 828 bp, Homo sapiens
acgttggagtttgcagcaacctccaagtaggaggctgtgcgcgcgtgtgtgtggagtggctgcgcggccggggaggatgtgcgctgcagggcggccgccgcagtgagcaacgcggcaaccggagcccggcgggcagccggggaggccgggactgagaggggcgagccgctggtgctccccggcggcagagggccgcgtcggccacgggcccgggagagacgcgctccagccggccccaggatgtaggcgatcggcggcagcgctcctgcaggcggccggctcatcatgaagaagcactcggcccgggtggccccgctcagcgcctgcaacagtccggtcctgacccttaccaaagtggaaggggaggagcgcccccgggactccccgggcccggcggaggcccaggcaccggccggggtggaggccggcgggagagcgagtcgccgctgctggacgtgctcccgggcgcaactcaagaagatcttctggggcgtggcggtcgtgctgtgcgtgtgctcctcgtgggcgggctccacgcagctcgccaagctgaccttcaggaagttcgacgcgcccttcaccctcacgtggtttgccaccaactggaactttttattcttcccgttgtactacgtggggcacgtctgcaagtccacagagaagcagtctgtgaagcagcgatacagggaatgctgtcgattttttggagacaatggcttgactttgaaggtgttttttaccaaggcagcaccctttggtgttctttggacactcacaaactacctgtacttacatgcaataaagaaaataacactacggatgtctccg

SEQ ID NO: 272979 - DNA, 455 bp, Homo sapiens
gccctaaaataatcagaactctccctccattccacttttgtgccagtgtgtttaaaagcagcagtctattaaagcaaaaccatatgtcatttagggaggattcaactttttactttcatttctttgttttaaggcaaatagattatttctctgccagagtcacagaaaccaaaatccagctataatcattactcctattgtgatgtggactgaccaagacaaggctcttttctcttactgcaggtgggagtataaattggcgccacctttctggagggcattcgtacattcattcaacaattatttgctaagtacctactatgtaatagacctagtactaggagctaaaacaaatatgtattaagggctttgaaaatgttcttatcctatgaccaagtaattctgcgtctaggagggtatcctaagaaaataatcagagatcagtaaaaaaaaaa

SEQ ID NO: 272980 - DNA, 364 bp, Homo sapiens
ggccttgtgacctaggtggaataaatttccgagtgctgtagctgaagctatcagtcattatgcagtcaaagattagaggggtaggcccggtgcggtggctcacgcctgtaatcccagcactttgggaggccgaggcgggcggatcatgaggtcaggagattgagaccatcctggctaactcggtgaaaccctgtctctactaaaaatacaaaaaattaaccaggcgcagtggcatgtgcctgtagtcccagttactcaggaggctaaggcaggagaatcgcttgaatccaggaggcggaggttgcagtgacccgagatcacgtcactgcactccagcctggacgacagagtgagactccgtctc

SEQ ID NO: 272981 - DNA, 513 bp, Homo sapiens
acccaccctctggaattggcctgctagagtgcctgagaaggatgttcatagggaaatgtttcagcagaggaactctactacaaaaaccacaagagggagggtgccaggggaagcggcctggtgctattgaaactgcaacacagaagccagccactggagagagctgcacaagctgcaggaacaccctacccagtaagccggccagaaggagggagcaaaaccttttctctctgcaacatctttccagtttcctctactggaaaagcttcattgccagctgacaaaaggaaaaatacttaaatggatcagatccattttcacagagcagtcaataatggtgaatttggagatgataagcaacaaattgatgaactggcacaacttccctgctactttcttgattgtaatgcctagatagggaataggaaagttattgaaatgtatgtgttcccatgaaatgtgtttatttgttgttcaagatcaatactaataaatggggactaatgttctgaa

SEQ ID NO: 272982 - DNA, 379 bp, Homo sapiens
agcacgtgggtcgggtgagtagcctaaagcatatttgcccgtagtgtttgtggaatgcttcctggaatggcatgctctttttttctgaataagaaaaaggaagaataagaataagatgaaagcaagatttcaaagccatctgtcctgtttttttcataggatttttttattctaagtttaatttttcctgattatagagcttaaactatgtaacatcttcatgcaaggtagtataacacagaggaaggagcactagatttgggaatcagaaaatatgggttccagtttcaacgctatcacttaattttcataagttgtttttgagtatcagttgttttgttttgttttgttttgttgagatggagtctcgctctgtcac

SEQ ID NO: 272983 - DNA, 452 bp, Homo sapiens
cagagacagcttctttatagtgtttattaggattttaggtttttcactacaagcctcattgggtttgaaatgtacccttgcagattctagaaaaatagtgtttccaaagcgctaagtcaaaataaaggttaaactctgtgagatgaaaccacacattgcaaaagatttttacagatagcttgttctagtttttatcatggcatatgtggtttttcactataggcctcaatgagctccaaaatgtcccttcttttattctacaaaaagaatgtttccaacctgcccaatcaaaacaaggtttaactctgtgagatgattctacacattgcaaaacattttctcacataccttgtttctagtttttatcctgggatatttggtttttagtataggcctctatgggctccaaaatatcccttcatagatattacaaaaagagtattttcaacctt

SEQ ID NO: 272984 - DNA, 522 bp, Homo sapiens
tcttacacaaatctgcagcttttggacagtcaaaagagagacccacctggcacacaggaagccacacacgggcagcaggaccactccaggccgtcgaggcccatggtcgggacgctgctcaccatatgtggagatgttgctttcctccagaagctctgtcacattaacgtcaaactggtcttagatgtcattgagggctttggcatcattctcctcagacacaaaagtgatggccaggtctttagtgccaaagcaacctgcacaggccactgggtggaggtaggtgtccgagtcttcaggcatgccatagttaagacgatgttgaatcactcaattcctacaatggttaggaaatgactgaaagtgaacacggggactctgagcaaacctgctgagatacaggcttggggctgcctcagtaaattcctccagtgaagtggatgggattatggtgtggatgatgacaaaagagtagaagagaagttgtcgacagatttgcacagaggccattgaagattttat

SEQ ID NO: 272985 - DNA, 427 bp, Homo sapiens
cccgcccattttgggcccagggttgccgctggggcctgtacccaaatgcagccccccatggccatggccccaggagtgcggcagagcagggaggagtcctggaaagaggagacgcaggggcaggaaggaatgggcctcaaactccaggagggggtccttctcatgggtcctgctttctggcctctcctcgcttacccctgggctgatccccctgggaagaactgagccaaggtttctcactctcaaatccgagggattcaattaccgggcccttagggaggtgtcagccccctgaaacgatgcaaggtgcccggcctaatttttatatttttagtagacatggtgacttgcgcctgtagtcccagctactcaggagactgaggcaagtgaatcacttgaatccaagaggcggaggttgcagtgagcc

SEQ ID NO: 272986 - DNA, 305 bp, Homo sapiens
aaaaaaaaaaaaaaccatattgtgtttttatgtcacccaatgttgtataaacatattgaattcctggcttactcaatggtaaagtaacttagcctttgtgactatttacaatttaattgtgtagtgatttatttaaagcttatctttccttttgatgtaagttccatagaattgtagaatatgttgtatttttaaatctttgtatagctaattcttgatacattgatatacagaagccccaatacatatctattgaacaaatgaataaattaataaatttagttttatgattttaaaaaaatgtt

SEQ ID NO: 272987 - DNA, 440 bp, Homo sapiens
cttctcttctgaagttgctgttgttcactgtgggtttgcaggacattttggccacaggatttaaataagaaaaagtgttggaaaggtttgtgagaactgtgaccagcagctataaactctgaatttccctccctataggaatagtaaactggaaaggccttcctgtcaaaaatatcttacccatccccactcttttatgtgttctggcgggccatggtacgggtcagttccaagagttagtagttatatctttttcaatctttctttcctgaccgaacggtgaaatgtttttcgtattggtcgctttgcttgtcagcaaagccctgaatatcagtagagtctggtttgagtctttttctgcaatggttggggtaagtatgcttcgttagtaccctcaaatgcttccgaggtcttgataacagttggaaagccaaaaaata

SEQ ID NO: 272988 - DNA, 406 bp, Homo sapiens
cttctcttctgaagttgctgttgttcactgtgggtttgcaggacattttggccacaggatttaaataagaaaaagtgttggaaaggtttgtgagaactgtgaccagcagctataaactctgaatttccctccctataggaatagtaaactggaaaggccttcctgtcaaaaatatcttacccatcaagaatcattgatatgatcaggcaaacaatgctaggcttcagtggggaaagctaatagtaatatcttaatgttacttaatttcctgatacatacttgaaatgaatagacgattgggagttttgcttgtcaggaaagcaaagaataagcaggaggaaacaggactgagtgatatgatgaaatgggcggggacgtatgcaacgtgagtaccctcaaatacttc

SEQ ID NO: 272989 - DNA, 205 bp, Homo sapiens
ctctggtgcacttgaaattcaccgtctgcttccccagtctggaagactgatatcttcattcccactggtcactctcagcttgggctaaagcacatttgctggattcctggggccagaggcaaaggcaaccacaggaggaagaagttggttgaatgttacagccagagagcacgttagaggcattttgaaccaacctccctttgct

SEQ ID NO: 272990 - DNA, 717 bp, Homo sapiens
caatcattatgcattctatgcatgtaacaaaattttacatgtatcctataaatgtgtaaaaatataatgtatcagaatcatgaaaacaggccaggcatggtggctcatgcctgtaatcccagcactttggggggccgaggtgggcagatcacttgaggtcaggagttcaagaccagcctggccaacatggtgaaatttcgtctctactaaaactacaaaaattagctgggtgtggtggcggggtggcctgaagtcccagctactccagaggctgaggcaggagaatcacttgaacccacgaggcagaggtttaagtgagccgagatcaggccactgcattccagcctgggcaacattgcaagactctgtctcaaaacaaacaaaaacatgaaaacaaattttaaaatacaattaaaaattcacttcacaggaaggccacgtgcagtggctcacacctgtaatcccagcactttgggaggccgaggcaggcagatcacttgaggccagcagttcaagaccaacctgaccaacatagtgaaaccccatctctactaaaaatatgaaaattagccagcgtggtggtgcatacctgtaattccagctactcaggaggctgaggcgggaagattacctgagcccaggtagctgaggctgcagtgagccatgatctcgctacactccagcctggggaatagagcaagaccctttctcaaaaaa

SEQ ID NO: 272991 - DNA, 812 bp, Homo sapiens
ctgtgttggagaagtacatcaaaaaggaaaatcaaatttcatcctcaataagtaatcacaatacactgtgatgagagttagggtgaaggaggttcaggttaccatgggcttatattaggagggcaaattctgtcttcaagtctttttgcttcaacagtagcgtttagatcttgtgggctgggcatggtggctctagcctgaaatcccagcactttgggagggtgaagtgggcagactgcttgagcccaggagttgcagattagcctggcaacatggcgaaaccccgtctctacaaaaaatacaaaagtcagccaggcatagtggtgcctgcctgtagtttcggctacttgggaggctgaggtaggaggatcgcttgaccccaggagttcaaggctgcagtgagctaccatcgagccacttcacttcagcctgggccgcagaataagaccctgtctgaaaaaaaaaatcttgtgatataataacagcttgtgcactcttcgatagctcagctggtagagcagagggctgtagactgcatagataataataacagtttgcgtttttgagtcaaagatgataccccagaatcattatcgaaaataatggttgttccattcacctgtgcctatgactgtgagccacattgtgaccaatctgtgagcaacatgggtgggaatgcagtttggggccatggaactcacttaacaggaagttccaatagcagtggatttaccatgttgcagctgtaggatcttgcgccagagttttaccacgtcatcgacgctcggttcatcgacgatccagtacacagc

SEQ ID NO: 272992 - DNA, 372 bp, Homo sapiens
tgaaaaactgtaatttatttagctttagagtactctcgtgatatgagattgccaaattaatactttgggtgcatttcttttctcaaaggacttgcaaatttacaaagaagtgttgaagaaaagccacacattggcaggtaatgtttgcaaaagacagatctgatgaagaacaatatttttagaatatacaaagaatacttaaaactcaacagtaagaaaataacctgatttaaagcaggccaatgacctgaacatctgttcaccaaagaagatacacagatgcaagtatgcatatgaaaagatgcttgacatcatgtcattagggaactgcaaattaaaacaagtagataccactgcatacctagtagaatg

SEQ ID NO: 272993 - DNA, 466 bp, Homo sapiens
aacattacaaactaggtattttactttataaaagaaatttatttactacagttctgggagctgggaagtccaaggttgagggaccacatccggtgagggcctcctttctgcatcataacatggcagaggatatcacatggtaaaaaagcaagagcatgccatctcaggtctcccttcctcttcttatatagccaagattcccatcatggggcctcaccctgatgagtttatctaatcctaattttttccctaagacctcacctcttgatactatcacgatggcaattaaattccaacatgaattttggagggcaaactcaaacaacagtccataaggcagtttggataaaggaatctaggaattgagctttttggagttcaaggcttacttataataggtgacggcatgaggaaagatagttcacccaagaaagtatgcagaatcagaatctgaagtaaaaaaaaa

SEQ ID NO: 272994 - DNA, 744 bp, Homo sapiens
  misc_feature (18)..(18): n is a, c, g, or t
  misc_feature (55)..(55): n is a, c, g, or t
  misc_feature (119)..(119): n is a, c, g, or t
ttttaaatttgggggaanttgggccccaacccattttgggccccggggggggganttggtccttttggaacccttggaaatcccttttaggttttaccttgcccctttggtgtaaaggnttaattttgaaggaaccagcttccaaaagaaaccagcatatggcactataaactatttcatttgagcaccattctttaccatggatatattaattatgtattatagtggagtgatcatacagttcccccaaatgtgatgtttcagtgtatttatttaaaacataaagtagaccaggtgcagtagctcacgcctgtaatcccagcactttgggaagccaaggcaggaggattacctgaggccaggagtttaagaccagccttggcaacatagcgagacccccatctctacaaagaaattttaaaagattatccaggcatggtggtgcatgcctatggttccagctactcgggaggctgaagcggtagaatcacttgagcacaggaggtcaaggctgcaggtgagccatgatcgtgtcactgcactccagcctaggcaacagagcaagaccctgtctcttaaaacaaaaaacctcacacatacctaaaataagtatatatctgtaaccaaaggaacttaattttagagccaaatttttctatcttgttggattttttacagtgtttaagatagacacttaagtgttgccgtagtatcaatatttctgtcattgaattttttctcacc

SEQ ID NO: 272995 - DNA, 653 bp, Homo sapiens
atactttagttttactgaccttgtgtaaagataatatgaagaaccagcttccaaaagaaaccagcatatggcactataaactatttcatttgagcaccattctttaccatggatatattaattatgtattatagtggagtgatcatacagttcccccaaatgtgatgtttcagtgtatttatttaaaacataaagtagaccaggtgcagtagctcacgcctgtaatcccagcactttgggaagccaaggcaggaggattacctgaggccaggagtttaagaccagccttggcaacatagcgagacccccatctctacaaagaaattttaaaagattatccaggcatggtggtgcatgcctatggttccagctactcgggaggctgaagcggtagaatcacttgagcacaggaggtcaaggctgcaggtgagccatgatcgtgtcactgcactccagcctaggcaacagagcaagaccctgtctcttaaaacaaaaaacctcacacatacctaaaataagtatatatctgtaaccaaaggaacttaattttagagccaaatttttctatcttgttggattttttacagtgtttaagatagacacttaagtgttgccgtagtatcaatatttctgtcattgaattttttctcacc

SEQ ID NO: 272996 - DNA, 611 bp, Homo sapiens
tgcagagagtgggagagagaagacttaaaatccccaggaaaaagaggaaagaggcagagaaaacttagacatagcataaacaaaatcacctccagaaagtaaaagtttcactgctaagtgacacattcacagcacagttaaagggaaggggattgaaaataagcagaaccagaagtagcagcttcaaaggagcattgcttcttggggagaatcacataaactaagaaacagtagtgctccttagagacttgatagtgatgagaaagaaggagctaagagggaaaaatagaggatcttgcagaaattagagagaaataagacataatggcccactatcccattactacccatttctgcactgcactgacaggagaggatattcctgaattaagaacctgtccaaaaaattttaaaataaattttaaaaagcaacctaattccaaaaagagctactattagaagaacacatacacacacaaatgcgaatcattacagtttaactgatgagaattcttaaccaaaaccaaccaaagagcagaagaaaactgtaacccaacattccaaactgaagtagttatcttcaaacaatgggacgtatttagaaaaaaaaa

SEQ ID NO: 272997 - DNA, 329 bp, Homo sapiens
tattttttttatatggtagactgcttttctttttcttcatattttgtgtatctattacagttttttactttggagttatcatgagacttacacgaaagatcatagttataagtctattttaagctcgaacaatttaactttttctgcatacaaaagtatacactttaacttctcctacatcttatgctattggtgtcacaatttacaacttttatatattgtgtttccatgaacaaattattataattacttttcttttaattttacactagagttaaaagtgacttatgcatcactgttatagaattagagtattctgaatttaacta

SEQ ID NO: 272998 - DNA, 246 bp, Homo sapiens
atgctcagatgggagaatatatgacagtaccttatcttttaagtgtcatacaactttattaaatgaagtgcggagaataattgttgaaattgataattttatttgctgtatctcttcacttttaaggcaagatggtatcattttttaactatctctcatggttttagtttaaatttgcagttactgcttaccagaacatgtgctcttgagtctggggattgggtgatatgaaagggtttatataga

SEQ ID NO: 272999 - DNA, 292 bp, Homo sapiens
cccccattttcaacagcaccacatgagctctggagccgcacaagccaaaagcctgctagtaacaccctccattcccttccttaccactcccccagcccaatccgtgtcagtcctggtggcgctccctcctaaatgtggcccagatccatcaccagctcctttcttcaactcaaaggcaagccaccatcctcccgggcctaagcaccacatcagcttcctaggggtctcccatctccagcctccatcaccaccactgccaagtgatttcctttacagctggggcggacctctt

SEQ ID NO: 273000 - DNA, 806 bp, Homo sapiens
aaggcatttcacttagcagtcaggaatgaaaaaacgatactgaatttgaacattaggaaagcttggtaaatttcaagagtataatttctgcaaagttggaacacagtgaataaaaaagtgctaagaaattgaggacaattgaaaagtttagcaaatgataagacaaagcagaagatagtagatagtgaggacagcagaatcaataggagggtttcttgggaaggccatctttgttttaaagtttatggggagagaaccagtgtgcgaatggaagtagctagggggagaaactgaaaatgctaggaagactgggtgtggtggctcatgcttgtagtctcagctgctcagaagcctgacgtaggagaattgcttgacccagtagttcgtgaccagcctggaatatagccagaccctgtttccataaaaaaaaaaaaagctaggaaggtaaaaaataaatgtgaagcaacaggattccccctttgagtagctcatgcttactgtgcagtttcagtaccccatactgttctaggtatcttaacatgtcataactcattcacttctcaaagctctgtggggttggtacaactattatctctattttataaataaggaaactgaggcagtaaaacaccaatttgcctgaagtcccgtaatcagttcatggtacaactgaaattgaggcccagctggctttttgagtctgccctctgaatcaccaaattgtactgccactcttcctgttgtaaatgttgtttataaatgtatttaattttattacacaagtaaacttgaacctgaaaaatttg

SEQ ID NO: 273001 - DNA, 621 bp, Homo sapiens
actctagacgatccctaatgtgagtatagaaaaattttgcagaggatgaggcaatatattcttatagaaaaaagatttttttgggttcaaaatatagttattcccttaaaaagatgctttgtgctgggtgtggtggctcatgcttgtagtctcagctgctcagaagcctgacgtaggagaattgcttgacccagtagttcgtgaccagcctggaatatagccagaccctgtttccataaaaaaaaaaaaagctaggaaggtaaaaaataaatgtgaagcaacaggattccccctttgagtagctcatgcttactgtgcagtttcagtaccccatactgttctaggtatcttaacatgtcataactcattcacttctcaaagctctgtggggttggtacaactattatctctattttataaataaggaaactgaggcagtaaaacaccaatttgcctgaagtcccgtaatcagttcatggtacaactgaaattgaggcccagctggctttttgagtctgccctctgaatcaccaaattgtactgccactcttcctgttgtaaatgttgtttataaatgtatttaattttattacacaagtaaacttgaacctgaaaaatttg

SEQ ID NO: 273002 - DNA, 268 bp, Homo sapiens
agattttatatttttgttgcatgatggtaaacagctgtaaccaccagcttggcctttttggcagctggctttatttagcattttaagctttaagtttgcctctggtgcctggaattgttcaattaaaattttaaatttattcttatcatcctctaacacaaagcttacttatacaataccaaatctagcctgagacacttgttcttgaatcgattcttttttaaataataagttcagtatgaaataaatctctgctgaaatgaaagaa

SEQ ID NO: 273003 - DNA, 287 bp, Homo sapiens
tggaccccatcccaccccacatgccactaaagcagtgaggcttacagtagctatctaatccacgttctctaaaactcaagcctcaaactcttaagaatttcgctgctgggccagatcttactttatctagctctgtagtctgtagttcatgatagcatcaaaactcacacagtgtaaggggagtacttttcaaactccctgtggttaaataccagtcttaaatttctaatccatcacagattagcacttttgtaaaatacaaataaaaacacacagaaaaacgaaaa

SEQ ID NO: 273004 - DNA, 335 bp, Homo sapiens
cgtaaaacaccaggtgcctaacccggcacagagcaggagggctaagcgtgacatccagcacgtgctgcccctgcagtgagatgtggccatcggagccagcattggccaatggactctgcatgggagtgacgcatgctgcctccaggcttgtctctaaaacctcccacgtgtcctccgcctgctcttcccacctccaaggagcacggcaattgtggaagacccagattagtgatggcagaaccatagatgggaggaacctgggtccctgacttaaagtatcatggatttggatgttcccttagtgagaaataaacttccattgtgtttaagccttt

SEQ ID NO: 273005 - DNA, 365 bp, Homo sapiens
tttagttttctgcttgggttcattcttgtgtcctctggctcaatgcacacaatatttgaaacaggacactgcaagtaaatgttctttacctttctcttttcctaattataaatgaaaattcccctcaggtagacttaactaaggggaaaattcatattctgcatttagctccagggtgatctggaagcttctctctgagactctgtatctgaatctgggttgcacttgacaactagacctgagcttttcttaaggacaccccgagcaacgccagctgaccagtggtgctctgtatgtatgatctaataagatcactatagcctctctgtgacagtacctacattatacaaccatgtatattttag

SEQ ID NO: 273006 - DNA, 572 bp, Homo sapiens
ggtgcaggaacctgaaagatgacacctgaaaactcaaattacatttcaggaacttgtgctggcgagagatagggataacacagataaaagtgtaatttgtagatattctaaaatcccttatcttagccaatagtttcagccgtggcttaaaacaatatatctatctgtactttagcaaaatgggtggatttgcatttcacatgctcctcctttggttgaaaacaactgattacataggaaagggaagatgatactataaactaggtcttcgttctcctacaatgtgacattggacaaggcatttcgtctctctggtttctaacctgcaagtaaaaggatgatttaatattggtttagataatttttaaagttcctttagaacctgaagggtctttatttctacaacaaaaaaatcacccatgaggtagaattggctatacattctcaaatgtaaaaaattaagcaaaatgctgatctagtaggttcacataacttttaagtaaagcatcttgaaggtgtccctctatcaactgaagaacaaatgtctgagtttaatatatgactgcatcaaa

SEQ ID NO: 273007 - DNA, 463 bp, Homo sapiens
ttatatacatcttataaaaattgtttgatttataccaaagtatttcatttttgtgggggttaatgtaaatggttttgtatttttagtttcaaattgtgcttattcattgctggtatatagaaaagagactgagttttataaatattaaccttgtattattgtgcaccttgctataatcacttattgattacaagtaaagtttttttttgtcaattctttaattgtcatttgtgaacaaagccaattttatttcttcctccttaatctgtataccttttaatttttttcttgtcttagttgcattagctaggaattccagagtaatatcaacaagaagtggtgagagaagatacccttgctttgtttctaatcttatcagaaaggcttctagtttctttctttctttttttttttgggacggagtctcaccctgagcgacagagcaagaatctgtctaaaaaaa

SEQ ID NO: 273008 - DNA, 435 bp, Homo sapiens
ctgactataagaccctgaccgctcttttcttacagctctcactttagaaaacttgcaattgtaaattcttcctctgcccctttgagatgtaaatcttctacaaccaaggagtatctttctcaaggacatggaaggcatccctttgaaatataaacatcaagaaaaacagcagccctatcttccagtctccgtgagaagatagaagcctaacttcaataagaaccaattagcaaacagagatggcctaagcacacaaaccaacttccgggctaatgtcctctaggacttttccagtagctcacctcagcaagcacaaacactccaaccttttgttttggagtagttgagttcaatttttgtcctctgttgtaacagtcttgacccctttgcaatggtcttaaataaagcctttcttgcctttttaatgtgtccagt

SEQ ID NO: 273009 - DNA, 291 bp, Homo sapiens
gtcttgaagtaggagagaaagcaagcagtctcctgccacatggagagattgtcattggataggaacacccttaagtcatccactgtccaagaaacacatgcaagtatgtggtttgttatgatggcaggagcttgtggaaactctcttttgagtgtttctattttctctggaagcaaggtcatcagctaggagttagggtttaggagaaagtattagaagttagaagagagaataaaaagtatgaaatatttttcagggggagtgggagaatgaatgatgtgaagaaataag

SEQ ID NO: 273010 - DNA, 554 bp, Homo sapiens
ctgtacttgtgtaaaacgcctggcagatcttagagggttcttaacttggaacaaacccttgggatgatgagcctgtattgacacaatcattattactaaaattccattgtttacattagggttcattcttggtagtgtatattccatgggttttgacaaataacaacatatatgcaccgttatagtagcatactatatgggtatataatggggtatataatctccaccccaaggggagacattactctgatttttccacctcatgtttttccctggtaattgctgtgacagaatgttgtttttggagttgagtaggcaagtggtgtgcatgatatgaaaaaccaaaaaaaaaaaaaaagaaaagaaaaaaaagccaccaaaccccacaaactttctgacccaaagcactcatcagttttagcctgtctatgcagtgatcgaggacttttcctataagtgagaagatcctacctcagttttcagctgggttttagatctgccggcaagcgtgttccaatctaagaaccgggctaggcggcagggtgtttacatct

SEQ ID NO: 273011 - DNA, 856 bp, Homo sapiens
tttcttgcttctcagaccagaaatagaagctttctcctggagatttttccttctatacccagtgtgcagttttcaacttcaggctgcctttgagtccaggtcaagcaatattagagttaaaaactaaaggaaaagcaaagaaaaatgaaaacatagaaacaccccaatttaatactaaatcaaattacagcttttttcctaatctataagctacggtttatttttaattaataaactttatttttagagcagatttaggttcacagcaaaactgagcagagaattcccatatatctcctgttaccgcacttgcacaacctccctcacaatcaacatcccaaaccacagtggcacatttattataattgatgagcctgtattgacacaatcattattactaaaattccattgtttacattagggttcattcttggtagtgtatattccatgggttttgacaaataacaacatatatgcaccgttatagtagcatactatatgggtatataatggggtatataatctccaccccaaggggagacattactctgatttttccacctcatgtttttccctggtaattgctgtgacagaatgttgtttttggagttgagtaggcaagtggtgtgcatgatatgaaaaaccaaaaaaaaaaaaaaagaaaagaaaaaaaagccaccaaaccccacaaactttctgacccaaagcactcatcagttttagcctgtctatgcagtgatcgaggacttttcctataagtgagaagatcctacctcagttttcagctgggttttagatctgccggcaagcgtgttccaatctaagaaccgggctaggcggcagggtgtttacatct

SEQ ID NO: 273012 - DNA, 446 bp, Homo sapiens
atggtatttcactgtagctttagtttgtgtttgcctaatgaccaatgatgttgaacaactatccatgcacttgtttgccatctgtattagcatcctattgctgctataccaaactaccatgaagctattggcttgaaacactttccattagcctctttgacagtacacaaggggagacttgaatactgaacaggagagaatgatgagagaaatttctctagaaagagaaagagctctgcagggatgcatttctttctggaggccctaggagtcactctgtgtattagtccattctcgcattgctgtaaagaaatacctcagattgggctgggcatggtggctcatgcctgcaatcccagcactttgggaggctgaggcaggcagatcacctgaggtcaggagttcgagagcagcctggccaacatggtgaaaacctgtgtctacta

SEQ ID NO: 273013 - DNA, 285 bp, Homo sapiens
gctcgacggggcggttgcgggcgcccctagctaatttttgtatacttagtaaagacagggtttctccatgttggccaggctggtttcgaactgacctcaggtgatccgcctgccttggcctcccaaagtgctgacattacagacgtaagccaccacgcccggcctgcaaaaatatatctcatatttgaacaaaaaaagtagttgacattgggacaagtgcttttcccctaaagaaatgatcagaagtacaaaagtgatgtacattcatctcttctaagctcgtcg

SEQ ID NO: 273014 - DNA, 301 bp, Homo sapiens
ggtgagggctctgccaagacccagtatgcatgagtagatggtgagggctctgccaggacccagtatgcatgagtagatggtgagggctctgccaagatccagtatgcatgggtagacagtgagggctctgctaagacccagtatgcatgggtagatggtgagggctctgccaagatccagtatgcatgggtagacggtgagggctctgccaagatccagtatgcatgggtagacggtgagggctctgctaagacccagtatgcatgggtagacggtgagggctctgccgagatccagtatg

SEQ ID NO: 273015 - DNA, 388 bp, Homo sapiens
cacacccagacacatgcttacacatgcacttacctgcacattcccacacacggacatgcaggcacacccctccacacacacataaacgcacatgtatgcacagcttctcacagatacacaaagcaatgcaggtactcatgtatgtatacatgagtacacatgcatgcacacaggcacacacatgtgcacaaacatatatatgcacacacccgtgtcatgtgtctgtttataaacatgtccccttccctttccttccccctcggccacccgcctccctctcaaccttgtaaattccccttcccaaccccgaggggcttgcagggacaaggcgaccgactgcgctgagctgcttatttatccaaaataaacgacggaaaagtctgaaaaa

SEQ ID NO: 273016 - DNA, 209 bp, Homo sapiens
tttacatatagataattgattctcaaagctttgtggcacttttttttttcctcacatcattgaaatgtccttgcttaaaagcctgtcaaagactgaccagttaaacctgcagatacagggactctatttacaaacccgcgtatttaggcttcttttcatttacctgttgaagtatcatacacttgaattatttgggccactttctttcc

SEQ ID NO: 273017 - DNA, 295 bp, Homo sapiens
aaattgtcaggttgaagaggttaacgatataacatggcaagaatacatttattgtctttttcttccacctggcttcatagtagtgttggtgtaccgtgtgagatccttagattagaaggggttggccagtagggactatgaaatgattgttgttaaattctaggggtttaatttaggatataggtacaaatgttagttctggaatcaaagggaagaaagagaagatttggatgacgcatcacctttacttgaggttctttaggttggcatcaggctaactttggtaaaaccacat

SEQ ID NO: 273018 - DNA, 306 bp, Homo sapiens
atacgctgtgaggagcaaaaggaattgctgcaggcacatcctgggcatggcccctcttcctctttggcaccatgcagtccatgccatgtggataaagagcctccaagagagcattttgcaaggctgacagagcattgcttgtcttgacaatgaagcccagaatataacaaaacagatgcagaacgggttctccatcctcgcggctgatgagccattcttagtagtcaacagggcttctgtgcttacaatgaaagaaaaatgccaagcccctgactgcctcactcttcagtctccgacccctacccc

SEQ ID NO: 273019 - DNA, 370 bp, Homo sapiens
ttgagacaaagtctcactctgttgccaggctggagtgcagtgcacaatctcggctcactgcaagctccacctcccgggttcacgccattctcctgcctcagcctcctgagtagctgggactacaggcgcctgccaccacgcccggctaatttttttgtatttttagtagagacggggtttcaactgtgttagccaggatgatttcgatctcctgacctcgtgatccgcccgccttggcctcccaaagtgctgggattacaggcgtgagccactgcgcccggcaccgtgtgctccaattgttaaagtacaacaataacattatatttgaaaaaaaaggaagatagtgtatatggtactaccacaattagag

SEQ ID NO: 273020 - DNA, 317 bp, Homo sapiens
ggatgtattgtacagcaaggtgactacagttagtgatgatatagtatactcttgaaaacgtaaagagagtagatattatgtgctctcaccacaaaaaaaagatacctgtgaggtaatacatttgttaattagcaagattcaaccatccaataatatgtctgtacttcaaaatatcatgtacataataaaaatgtacaatgttatctgtcaatttaaaaatgtaatagtaaaaagaaaacaatagagaaaatgatgaaattggaagcaaaaaacaatagaggaaatcaatgaaacaaagcactgattccttagaaaga

SEQ ID NO: 273021 - DNA, 470 bp, Homo sapiens
ctggagccagagttcagggcaatgaaaaacagccttgtcaagaactcttaaggcttcatgaccctgcatattcaagtcaataggttgtcagatacagtgtttggtacctactaacctattgacttgaatataccaggttaatataagattttctttggcccaaagtgagttgacttcaaagccagtagccatagactagaaagccagagaaaaatgaggctgtaagaacaaaggaatctggggaaccctctcttaccctagaaatggagcgggcatgtgttagaaatatttgtgtttactaattaaatacatatcatttatttttacatcttttttgcttaactcaggggaaaatgtgcattatttaaaagaaccacacagaatgaaaacacgaaaaagaaaccgtttgtattcaaatcttggcaaatatccaactagcaataacttgaagatttaatattattacatgc

SEQ ID NO: 273022 - DNA, 431 bp, Homo sapiens
gagaggaggaaaaggagccaagagtgatactgaaaggcaaagcaacagatatctcctgttgaaaatgccctctgtgttactgtataggatctgctttcctgtaccatgattactcttcctggtcttaatagtcaggggccggccgggcgtggtggctcacgcctgtaatcccagcactttgggaggctgaggcaggtagatcacttgaggtcaggggtctgagaccagcctggccaacatggtgaaaccccatctgtactaaaaatacaaaaatgagccgggtgtggtggcgtgtgcctgtaattccagctactcaggaggctgaggcaggagaatcacttgaacccaggacgcggaggtagcagtgagctgagaccgtgccactgcactccagtctgggcaacaagagtgaaactccatctcaaaaaaaa

SEQ ID NO: 273023 - DNA, 589 bp, Homo sapiens
  misc_feature (40)..(40): n is a, c, g, or t
tagatagagtctctgttacccaggctggagtgcagtggcngatctcggctcactgcaacttccacctcctgggtctaagcgattcacccgcctcagcctcccgagtagcctggaccacaggcgcccaccaccatgcccggccaactttttttgtatttttagtagagacagggtttcacatgttggccaggctggtccgcactgatataacctaccctgctggattcatggatgtcatcagcattgacaagatgggagagaatttctgtctgatctgtgacaccaagggtcactttgctgtacatcgtattacacctgaggaggccaagtacaagttgtgaaaagtgagaaaaaatatttgtgcgcacaaaaggaatccctcatctggtgactcatgatgctcgtaccatctgctaccctgatcccctcatcaaggtgaatgacaccattcagattgatttggagactggcaagattactgacttcatcaggttcgacactggtaacctgtgtatggtgactggaggtgccaacctgggaagaattggtgtgatcaccaacagagagaggcaccctggatctcttgacg

SEQ ID NO: 273024 - DNA, 302 bp, Homo sapiens
aaaaagagtcaaaacaaacatggcaaccaaataaataagcaacaagcaaacaaacatggcaagactttaacctgggactctcagaatttattaaataagaaagcatcactcttcacatggatccccttttctcctctccatacaccatctgcctccgcctttcctgccttggcacctgtatttgcttttatgtatatcttagtgtgattctatttatatataaatatatgttcatatttaaatcatttcagaaattgaagtgatatagatcctccaaaactattgagggggtgtccaatgtt

SEQ ID NO: 273025 - DNA, 375 bp, Homo sapiens
tggcgtgactcagccgggtgctgcgacccagctccaactgcctttacgtaggtgctgcagggtgtttgatgatgcaagaaggaggccttgaggccgggcgcagtggctcacgcctgtaatccctgcattttgggaggccgatgcgggacgatcacgagatcaggagatcgagaccatcctggccaacatgctgaaaccccgtctctactaaaaatacaaaaaaattagccgggcatggtggcaggcgcctgtaatcccagctactcgggaggctgaggcaggagaatcgcttgaacccgggaggtggaggttgcagtgagcggagatcgtgccactgcactccaacctggagacagagcaaaactccgtctcaaa

SEQ ID NO: 273026 - DNA, 419 bp, Homo sapiens
acttgatcctgtgagtcagagattgcagtgagccgagatcacgtcactgcactccagcctgggtgacagagcaagactctgtctcaaacaaaacaaaacaaaacaaaacaaacagaaacaaacaaacaacaactttccagtaagctaaggcatctatccagtgtgccaggcctcctgtgttcgaggccctgagctgcccaaggctgggacccagggagcttcagatcttgccctgacaactccaccaccataggactagtgagctggaaggcacagatatgcctttctgaaaattaagttttggtaggaatgcaggaagtattttgccacagagaaaactctttaagataaatgaagggtaaaaataaatagcccttgtttagatgtggacataggaaatacagttccagcagaatctc

SEQ ID NO: 273027 - DNA, 300 bp, Homo sapiens
ttttaaactttaccgtggaaactttcaaacatgagcaaaataagaggataatacagttcagcccccaggcaaccataaacatatgcctaatcttgtttcatcaattactacagacctgctgaattattataaagcaaaactatatcattttatctgtaaatactttagtatatatttccaagagataatgattctttaaaaaaacataaccacaaccccaccattatcacacctacaaaatgaacaataattcattaacatgaaatgtctagtcagtgtttgaaacatcccggttgtctc

SEQ ID NO: 273028 - DNA, 284 bp, Homo sapiens
ccaggctggagtgtagtgatgggatcttggctcattgcaacctctacctcccaggctcaagcaatctcctgattttaaaccctggcaacttatccaaagaattttaaagcactaaggagaccaaacaaaacatatttgtgggtcatatccagtcacagacctctaaatttgcaatctctctcatccagatacatcccataaacatgagatcaggcaccaagacattcatgatggtttaaggaaataaacaaagatctaagtttcccatatggactttcaaaatt

SEQ ID NO: 273029 - DNA, 379 bp, Homo sapiens
atatctgtgtctctcttaaagcaaaatctactttaattaagccccaaacattctgatgaaagatgataatcctcttgtactgtgaacttgtgatcttacaaagaagtctggagtagcagagaggtcaaagaaataaacactaccctcatgcccaactctctccatgccttccaagtttgttaatacagacacatccaatccaatcacatatgtactgaaatccttttttaaatgatgcagattcagatggagattattacaccgttagcaattcaaagtggctaacactgatttcaatgtgggtaaccacattccttgaaatcaaagatttgatatgaaactgacaataaagaattcatatggaactcaatttttcttg

SEQ ID NO: 273030 - DNA, 503 bp, Homo sapiens
aaatgaactatcaagctatgaaacgacatggaggaacttaactgcatattacgaagtaaaagaagtcaatctgaaaaggcttcttactgcattgttccaactacgcaacattctggaaaaagcaaaattatgaatatggtaaaaagatcagtggttgtcaaaggattggcaagagaagaaaagaatacattggcagagcagagggtttttagggaagtgaaaataccttacatgttactgtaatgataaacacatgtcattatacctttgtgtaaagccatgcaatgtacaacaacaagagtgaaccctaatgtaaactatggactttgagtgattaaatgtcaatgtaggatcatccatcaaagcaactgtaccactgtggtgagcaatattcatcatgagggaggctgtgcatgtgtggaggcaggggtatatagaaaatctctgtatctttctctcaattttgctgtgaacataaaactgctctcaacaagtagtctttc

SEQ ID NO: 273031 - DNA, 1649 bp, Homo sapiens
  misc_feature (381)..(381): n is a, c, g, or t
  misc_feature (396)..(396): n is a, c, g, or t
  misc_feature (550)..(550): n is a, c, g, or t
gtgcctgtatcacctgcccttctgctgacactcctgcctgctgttcctgactacagccatcatgcctcggggtcagaagagtacgctccatgcacgtgagaaacgccagcagacccggggtcagacccaggatcaccagggtgctcagatcactgcaactaacaagaaaaaagtatccttttcatcccctcttattttgggggctactatccagaaaaagtctgctggtaggtcacgtagtgctctcaagaagcctcagagagcactatccaccactacatctgtagatgtttcttacaaaaagtcatacaagggagccaacagcaaaattgagaaaaagcaaagcttctctcagggtctatcctccactgtgcagtctcncacagaccctctaancatgaagacaaatatgttggtgcagttcctgatggaaatgtacaagatgaaaaagcccattatgaaagcagatatgctaaaaattgtccaaaaaagccataagaattgcttccctgagatccttaaaaaagcttctttcaacatggaggtggtntttggtgttgatttaaagaaagttgattctaccaaggactcctatgtccttgtcagcaaaatggatctccccaacaatgggacagtgactcgtgggaggggatttcccaagacaggtctcctgctgaatctcctgggcgtgatcttcatgaagggcaactgtgccactgaggagaagatctgggaattcctgaataagatgagaatatatgatgggaagaaacacttcatatttggggagcccagaaagctcatcacccaagatttggtgaagcttaaatacctggagtaccgacaagtgcccaacagtaatcctgcacgctatgaattcctgtggggtccaagagcccatgctgaaaccagcaagatgaaggtcctggagttttgggccaaggtcaataaaactgtccccagtgcgttccagttctggtatgaagaggctttgagagatgaggaagaaagagtccaagctgcagctatgctcaatgatggcagtagtgccatgggcagaaagtgttccaaggccaaggctagcagctcttcccacgcctagtgaagttgaagcaaattttgcattttgtggttaaagagggcagtcactgttccaaggagtgaaggactgggtgttactggagggaacacactgtataataccttttgtttctgttctaaatggataatttgaagttttatctgtattttggggcatatttttcaaatgttccttttatttaacattgtaatctaagtttaggattgatactggtcacatttgttgtttaagagtaaaaattttgctgttttgtaaaacagattgagaaaaattcgatcttatttagtgatctgttgcaagataacttggaattagaataagcatttccttgaaaatgtttaaaaaaaaaaagtcagcagtaaaatgtatggcattaagaaatagagaaagagtgtaagatggtcaatatttggtttcctaaatgcttttactctgtgttttaagaaaatgaaagataaataaccatatatgtctggcttacttaagaatgtagaattaaatcataataaattagacctcatgctgacacactcattctccaagtgtt

SEQ ID NO: 273032 - DNA, 360 bp, Homo sapiens
aaaattggcagagacatggggcctatttctaaatgtgcaatgagttctcatgaagacaagatatttggatttgtccttcatgggtaaaacaggaataatttgcctaaaggaaagaaaatgttatctgaaaaccaagacttttcagatagggagcactatctaaatgagtagtatgtgtcagtcaggacctcatggaggtgtaaagcagtctgaatatagaacaaatccaactattaagttcccgtccaaccttgagattctatgattccaagagtcagagtaatgctcacagtataaaattgtcacttatgcatcatttataagcagcactatgtacccttaagcataaaaaataaatat

SEQ ID NO: 273033 - DNA, 257 bp, Homo sapiens
attcccttgcagacaccatttaaatcctggagcttgggaagcagggatgaagtcttctgcccattcattaatagatggcccaggctatgacattattgagagcagacatttagaagggcgaaagagaaggaaagggccgggcacggtggctcacgcctgtaatcccagcactttgggaggctgaggtgggtggatcacctgaggtcaggagtttaagactagcctggctaacatggtgaaaccccgtctgtactaaa

SEQ ID NO: 273034 - DNA, 326 bp, Homo sapiens
taggaggcaacagggaagcttccatctgctgtcctctcgtgcctcaggcatgggcctaacatggctcctgtctgtaatcccagtgccttgggaggctggagtgggaggatcacttgaggccaggagttcgagaccagcctaggcgacacagtaagactctgtctctgcaaaagatttaaaaattagctgggcttggtggcacgcacctgtagtctcagctgctcaggaggctgaggcacgaggattgtttgagcccaggagtttaagattgcagtgattgcaacactgcactccagcctgagcaagagtgaggccccatctcttta

SEQ ID NO: 273035 - DNA, 2118 bp, Homo sapiens
gggagcttggccgcgcagtgccggaacccggctgcagcggtgggaaggcgggggcgtgccggcccagcggggagaggcatctgcaggggctgctgagagtaaatacttggcgcctccagctgctggccaaggagacagatggagctcaagttgggagatacgccctgagagccgatgatagacacaagtccagatctcggattttgatactgtatgttccctgggttcctgagagaggacattgaggagtaggagtcggcgattaaggagatcggtacaattgggaagcctcctgtcagagcttccagcaatttcctcatcagaggtggacaagccctatgggctaagacagagggtcctcagaaaggagtgcggacgccgtcatgctgcagcagctcctgatcaccctgcccaccgaggccagcacctgggtgaagttgcgtcatccaaaggcggccacggagcgggtggccctgtgggaggatgtgactaagatgtttaaagcagaagctctgctgtctcaggatgctgatgagacccagggcgaaagtttagagagtagagtgacccttggatccctgacagcagaatcccaggaactgttaaccttcaaggacgtatctgtggacttcactcaggaggagtgggggcagctggcccctgctcaccggaatctgtaccgggaggtgatgctggagaactatgggaacctggtctcagtgggatgtcagctttccaaacctggcgtgatttcccagttggagaaaggagaagaaccatggctgatggagagagatatttcaggagttccaagttcagacttgaagagcaaaacaaaaaccaaagagtcagccttacagaatgatatttcgtgggaagaactacattgtggcctaatgatggaaagatttacaaaaggaagcagcatgtattccaccttgggaagaatctccaaatgtaataagctagaaagccaacaagagaaccaaagaatgggtaaggggcaaatccccctgatgtgcaagaaaacattcactcaggagagaggccaagagtctaatagatttgagaaaagaattaatgtgaagtcagaagttatgccaggaccaataggtcttccaagaaaaagagatcgtaaatatgacacacctggaaagagaagcagatacaacatagatttagttaatcattcaaggagttatacaaaaatgaaaacctttgagtgtaatatttgtgaaaaaatcttcaaacagcttattcaccttactgaacacatgagaattcataccggggagaaacctttcagatgtaaggaatgtggaaaagcctttagccaaagttcatctcttattccgcatcagagaattcatactggtgagaaaccctatgaatgtaaggagtgtgggaaaaccttcagacatccttcatcgcttactcaacatgttagaattcataccggggaaaagccctatgaatgtagggtatgtgagaaagccttcagccagagcattggactgatccagcatttgagaactcatgttagagagaaaccttttacatgcaaagactgtggaaaagcgtttttccagattagacaccttaggcaacatgagattattcatactggtgtgaaaccctatatttgtaatgtatgtagtaaaaccttcagccatagtacatacctaactcaacaccagagaactcatactggagaaagaccatataaatgtaaggaatgtgggaaagcctttagccagagaatacatctttctatccatcagagagtccatactggagtaaaaccttatgaatgcagtcattgtgggaaagcctttaggcatgattcatcctttgctaaacatcagagaattcatactggagaaaaaccttatgattgtaatgagtgtggaaaagccttcagctgtagttcatcccttattagacactgcaaaacacatttaagaaataccttcagcaatgttgtgtgaaatatactaaacatcaaagaatctatgttggagcacaagattctaaatcagtggttccctgatccctcaaaaatccatttgtttttggatttccaaaaacgaacattaaaaaaaaatggtttggcacaat

SEQ ID NO: 273036 - DNA, 2032 bp, Homo sapiens
gggagcttggccgcgcagtgccggaacccggctgcagcggtgggaaggcgggggcgtgccggcccagcggggagaggcatctgcaggggctgctgagagtaaatacttggcgcctccagctgctggccaaggagacagatggagctcaagttgggagatacgccctgagagccgatgatagacacaagtccagatctcggattttgatactgtatgttccctgggttcctgagagaggacattgaggagtaggagtcggcgattaaggagatcggtacaattgggaagcctcctgtcagagcttccagcaatttcctcatcagaggtggacaagccctatgggctaagacagagggtcctcagaaaggagtgcggacgccgtcatgctgcagcagctcctgatcaccctgcccaccgaggccagcacctgggtgaagttgcgtcatccaaaggcggccacggagcgggtggccctgtgggaggatgtgactaagatgtttaaagcagaaggaactgttaaccttcaaggacgtatctgtggacttcactcaggaggagtgggggcagctggcccctgctcaccggaatctgtaccgggaggtgatgctggagaactatgggaacctggtctcagtgggatgtcagctttccaaacctggcgtgatttcccagttggagaaaggagaagaaccatggctgatggagagagatatttcaggagttccaagttcagacttgaagagcaaaacaaaaaccaaagagtcagccttacagaatgatatttcgtgggaagaactacattgtggcctaatgatggaaagatttacaaaaggaagcagcatgtattccaccttgggaagaatctccaaatgtaataagctagaaagccaacaagagaaccaaagaatgggtaaggggcaaatccccctgatgtgcaagaaaacattcactcaggagagaggccaagagtctaatagatttgagaaaagaattaatgtgaagtcagaagttatgccaggaccaataggtcttccaagaaaaagagatcgtaaatatgacacacctggaaagagaagcagatacaacatagatttagttaatcattcaaggagttatacaaaaatgaaaacctttgagtgtaatatttgtgaaaaaatcttcaaacagcttattcaccttactgaacacatgagaattcataccggggagaaacctttcagatgtaaggaatgtggaaaagcctttagccaaagttcatctcttattccgcatcagagaattcatactggtgagaaaccctatgaatgtaaggagtgtgggaaaaccttcagacatccttcatcgcttactcaacatgttagaattcataccggggaaaagccctatgaatgtagggtatgtgagaaagccttcagccagagcattggactgatccagcatttgagaactcatgttagagagaaaccttttacatgcaaagactgtggaaaagcgtttttccagattagacaccttaggcaacatgagattattcatactggtgtgaaaccctatatttgtaatgtatgtagtaaaaccttcagccatagtacatacctaactcaacaccagagaactcatactggagaaagaccatataaatgtaaggaatgtgggaaagcctttagccagagaatacatctttctatccatcagagagtccatactggagtaaaaccttatgaatgcagtcattgtgggaaagcctttaggcatgattcatcctttgctaaacatcagagaattcatactggagaaaaaccttatgattgtaatgagtgtggaaaagccttcagctgtagttcatcccttattagacactgcaaaacacatttaagaaataccttcagcaatgttgtgtgaaatatactaaacatcaaagaatctatgttggagcacaagattctaaatcagtggttccctgatccctcaaaaatccatttgtttttggatttccaaaaacgaacattaaaaaaaaatggtttggcacaat

SEQ ID NO: 273037 - DNA, 1194 bp, Homo sapiens
  misc_feature (21)..(21): n is a, c, g, or t
agttcgacggagattctcggngaatctccaaatgtaataagctagaaagccaacaagagaaccaaagaatgggtaaggggcaaatccccctgatgtgcaagaaaacattcactcaggagagaggccaagagtctaatagatttgagaaaagaattaatgtgaagtcagaagttatgccaggaccaataggtcttccaagaaaaagagatcgtaaatatgacacacctggaaagagaagcagatacaacatagatttagttaatcattcaaggagttatacaaaaatgaaaacctttgagtgtaatatttgtgaaaaaatcttcaaacagcttattcaccttactgaacacatgagaattcataccggggagaaacctttcagatgtaaggaatgtggaaaagcctttagccaaagttcatctcttattccgcatcagagaattcatactggtgagaaaccctatgaatgtaaggagtgtgggaaaaccttcagacatccttcatcgcttactcaacatgttagaattcataccggggaaaagccctatgaatgtagggtatgtgagaaagccttcagccagagcattggactgatccagcatttgagaactcatgttagagagaaaccttttacatgcaaagactgtggaaaagcgtttttccagattagacaccttaggcaacatgagattattcatactggtgtgaaaccctatatttgtaatgtatgtagtaaaaccttcagccatagtacatacctaactcaacaccagagaactcatactggagaaagaccatataaatgtaaggaatgtgggaaagcctttagccagagaatacatctttctatccatcagagagtccatactggagtaaaaccttatgaatgcagtcattgtgggaaagcctttaggcatgattcatcctttgctaaacatcagagaattcatactggagaaaaaccttatgattgtaatgagtgtggaaaagccttcagctgtagttcatcccttattagacactgcaaaacacatttaagaaataccttcagcaatgttgtgtgaaatatactaaacatcaaagaatctatgttggagcacaagattctaaatcagtggttccctgatccctcaaaaatccatttgtttttggatttccaaaaacgaacattaaaaaaaaatggtttggcacaat

SEQ ID NO: 273038 - DNA, 946 bp, Homo sapiens
tttctcccggtcttttcccctcaaaaatctctattgtgatgccagagagacctttctgaaacctctccttttttctgtgtttaaaaccccccagtgccgcccatgaaatacacagcaaagtccaaactccttatcttgcttggatcctcctttccaccctttttaactgttcagccatatttctccatgtacttctgagattggaacccagggcaacaaagctaatgtgggttctccaagattaacacaactgaaaggaggcccctttatgccatctattctaggtcccttggaatataattaaaaacaggaatttcaacattgaaatgtaatgatgttcaggtaagggcagtaaggtacattgacttgagtcaatctcccaccatgtctggggactgggacagctgagccaggggtcctacctaagggtcaggcctgtgtcttcacttctcctttcaaccctttacttcttccagagttgaacggcttactttccttcgctcactaggccatttcatggcttgtgtttgcctgaaatacaactctttccctccctggtctacacctgctcaccctgaaagaaatacctctgagcccactttctttcttggaagcattttatgactcttatttctgttatcaacacagcttttatttatgtctccatgtatcctttgaagaaacacaacttttcaggttctatgttttatttgcattcttagtgtctggcacattgtctgacacagtgtaaaagctgagtagaattttgcctgatagcagatgtgcctgaagtgagggtgtccaaaatttcattaaatgacgactgctttaatatgaattcttggctaaggcaggagaatcgcttgaacccaggaggcagaggttgcagtgagccgagatcacaccactgcactccagcctggtgagagagggagactgcattctc

SEQ ID NO: 273039 - DNA, 577 bp, Homo sapiens
gaggctttctctttctctcttttcccaaggtgaggctggcaagctatcagtctctccagagcaaagagaaatggcaggagaattgactgcgtgaaccccacagggccgttagtggaaaaataaatgtctaaattgaaagggtcacacttgtgtagatggtgactgtcttgcttgcagcagctgaggacaccgactgtgtttagcgagtgtcctgcttttcatgtacacatctggcttaataagaagtcacgatgcagacgtggccttggctcagaccctctgtgctggacacaaatgactttgattcaaactcaagtccttggagtgtcacaaaggactaacaacgctggctgggacaaaacctacagcttctctaaatgctgaggggcccctatggagaaatggcccagtgtgtttctcatgggtgtctcctccacttccccacagaatgcaatgaactcctgattccccaggtcacctacaggatatatgtccaatggatggggatctcctgccttccagagaatttgaggggaagaaatgaccttttcctgagacaggaccatctcaatttaaa

SEQ ID NO: 273040 - DNA, 486 bp, Homo sapiens
ttttgaatgctttctaactgccaggcactgtttaagtgctttacatgtattcataggaggtaggagtttacctaccctatgaggtaagtaaactaccattatcctcattttgcatatgatgagattaagaacaggtaggactaatagagggtctgtgggcactgtccattccaagatggtagtgccttgggtcaaaaagtttgatttttagttaagataggtttggctgcaatggggcagtagttgttaggtatgcagaccctgggtctggacaggatttgtatcccacattaccactcaccagttttgtaccctaggacgagttacttccctggtcttttagtttccacagctaaaaatatgaaggaaataatgatactttacttcatagaattgttacgaggattaaataagttaatacatgtaaagtacttagaacaatgtcttgcccataattgcaatgttagaaaaacaataaaataaaaa

SEQ ID NO: 273041 - DNA, 293 bp, Homo sapiens
  misc_feature (137)..(137): n is a, c, g, or t
ccctcctagcacagcccccagccctgcagatgtcagaaagaaagaccctgctctgaaagacagacagacagacagagagaaacagatggagaaacatagtcagaggcagagagacaggaaatgagaaagagaaaatncaagctcatgcccagcctcaccatccccctttcatggatgcagaaatcatggactgaacccttaactctgcaccggccagcctcaacacaccaggtcctcaccaaggactccaggactagatgctggtgtcctgtccacttcatagataaggagct

SEQ ID NO: 273042 - DNA, 298 bp, Homo sapiens
aatcattgagataataaactataacttaagtaaaaatgtacactgtcctgtttattaagtttgtgtaaatgtgttatgtgttgttatgtagctttagaataccttcactgacttttcagcaattacctttaacagaatagtttttatttatttttacatttattatacatttagaaagaagatgagagcaatagttttttattagtataaggcaaacttaactgattaaaccttcttaggaaaagcaatagttctgaaagatatgcaagaaaaaaaatgacaaaagtgaaagaactct

SEQ ID NO: 273043 - DNA, 589 bp, Homo sapiens
gtcctcctcacttatagtagagacttacatagaaaatgaagttgatcagaccacatttctcatatgttcttatctccaaacctgcaaatgaacttgaatctatacctatattttcactagttacaagagaatagtaactatttcctgtattttcacttctccaatatcttaactcctacattctgaattctagcccctccttcttcttcaggaacctgaaattctattggttttccttctttcttctgtgttttcaaactctgtctatgtaccttttgccaactttagagtatgtcactcacattgtaacttgactttattgtaacgatgcctcctagagagacatgcaggccagaatcatcaaatgacaagaatctgtctctctgtcattattacgtctttctatcaacagctttcaaggaagaaagagaaaaagagagagaaagagagaaagaaggaaagatggaaggaaggaaagaaagaaagaggaaagaaagagagagaaagaaagaaaagaaagaaaaaaaagaaaaaaggaaagaaagaaagaaagagagaaagaaagaaagaaagaaagaaagaaagaaaa

SEQ ID NO: 273044 - DNA, 1296 bp, Homo sapiens
ttttttttcaaattctcttttattgctttatgtccctgactcatgcaggccaaagggtgaggaggagtaatagccaacaagagcgtcctgcagaaagaaacaggctgcgtgggtccggaggagcttgaaaggaagaacccgaccaaagggcaggagacccggctctccaggtcgcggaggcgtgggtgcccagccaggcggagtgcggggcggggcctctcgggccgcaaggtggggcctcctgggccgggaggtgggaggtgagctccgccagcccagcccactgcagacaggttacccaggacctcaaggtgtgctgcgtcaccccgcccgcgctgcgctgattggttcctccagggagcccccgccccctcagctgtaaccgggccggcttcagtgtcgccgccatctttgttgatgtgtcagctccgcaggggtttggggaaacggccgctgagtgaggcgtcggctgtgtttctcaccgcggtcttttcctcccactcttggctggttggaccccgctatggaaaagttggcccctgagccagagctccagcagccttgttagggcgtggcctgaggcttggataagtgggatgtaaaacgaagatcaggagcagatttgaagaattacaaagtgaattggtgccagtcagcatgtcagagacagaccacatagcctctacttcctctgataaaaatgttgggaaaacacctgaattaaaggaagactcatgcaacttgttttctggcaatgaaagcagcaaattagaaaatgagtccaaactattgtcattaaacactgataaaactttatgtcaacctaatgagcataataatcgaattgaagcccaggaaaattatattccagatcatggtggaggtgaggattcttgtgccaaaacagacacaggctcagaaaattctgaacaaatagctaattttcctagtggaaattttgctaaacatatttcaaaaacaaatgaaacagaacagaaagtaacacaaatattggtggaattaaggtcatctacatttccagaatcagctaatgaaaagacttattcagaaagcccctatgatacagactgcaccaagaaatttatttcaaaaataaagagcgtttcagcatcagaggatttgttggaagaaatagaatctgagctcttatctacggagtttgcagaacatcgagtaccaaatggaatgaataagggagaacatgcattagttctgtttgaaaagtgtgtgcaagataaatatttgcagcaggaacatatcataaaaaagttaagt

SEQ ID NO: 273045 - DNA, 1421 bp, Homo sapiens
ttttttttcaaattctcttttattgctttatgtccctgactcatgcaggccaaagggtgaggaggagtaatagccaacaagagcgtcctgcagaaagaaacaggctgcgtgggtccggaggagcttgaaaggaagaacccgaccaaagggcaggagacccggctctccaggtcgcggaggcgtgggtgcccagccaggcggagtgcggggcggggcctctcgggccgcaaggtggggcctcctgggccgggaggtgggaggtgagctccgccagcccagcccactgcagacaggttacccaggacctcaaggtgtgctgcgtcaccccgcccgcgctgcgctgattggttcctccagggagcccccgccccctcagctgtaaccgggccggcttcagtgtcgccgccatctttgttgatgtgtcagctccgcaggggtttggggaaacggccgctgagtgaggcgtcggctgtgtttctcaccgcggtcttttcctcccactcttggctggttggaccccgctatggaaaagttggcccctgagccagagctccagcagccttgttagggcgtggcctgaggcttggataagtgggaggaaaaagtcctggatttcgagtcagaacatctggattagaatcctacttctttcacttgataatcttgttacctgtggaaatcagaagagagaatatagtaaaaatacgcagtacagtcccagatgtaaaacgaagatcaggagcagatttgaagaattacaaagtgaattggtgccagtcagcatgtcagagacagaccacatagcctctacttcctctgataaaaatgttgggaaaacacctgaattaaaggaagactcatgcaacttgttttctggcaatgaaagcagcaaattagaaaatgagtccaaactattgtcattaaacactgataaaactttatgtcaacctaatgagcataataatcgaattgaagcccaggaaaattatattccagatcatggtggaggtgaggattcttgtgccaaaacagacacaggctcagaaaattctgaacaaatagctaattttcctagtggaaattttgctaaacatatttcaaaaacaaatgaaacagaacagaaagtaacacaaatattggtggaattaaggtcatctacatttccagaatcagctaatgaaaagacttattcagaaagcccctatgatacagactgcaccaagaaatttatttcaaaaataaagagcgtttcagcatcagaggatttgttggaagaaatagaatctgagctcttatctacggagtttgcagaacatcgagtaccaaatggaatgaataagggagaacatgcattagttctgtttgaaaagtgtgtgcaagataaatatttgcagcaggaacatatcataaaaaagttaagt

SEQ ID NO: 273046 - DNA, 231 bp, Homo sapiens
cccccactcaagggaacaccgtgcccagctaccctgagacagccccactcccaggaaatgcaggtgccaaccagccccagtgaggcatggcacctgagccagacacccccaaatagtcccttcccacctcctcaagcatctgcactctgggtgaacccagaaaaactggggtacctggggagacatagaagggccaggccaggaactccccaataagcaggaacagagacc

SEQ ID NO: 273047 - DNA, 364 bp, Homo sapiens
ccccagggccagcgcggttttgctggcgcgggagctgggcggggctgcattcctgccccagggtgcggcgaaagctggccctgccgggtacacgtgacggatgccccttctcctgggcccgaggccagcgcgcgcggcactgactgccttgcagcgcgtggccctctgcagatcctcagactctgccgctcaagtcccctcccagcccaccgtttggctccggctttgagggagaggagggggcagtctgctggagtcagaccttgggcttcaaagccagaatgtcgtgggttcaaatattgggtcatttgtgcgactttgggccggttacctaaacaagaccgtattttaaagtttgtatgca

SEQ ID NO: 273048 - DNA, 276 bp, Homo sapiens
ggtggcgagtgcagtggcaggggccgcagggatgcagacaaagccacgtccccattggtcctgctgctgtgagaatggggaggaaagtgactgcacaccctctggaaccttctgacggccaggggactttgaatagtttgccccacacggcaggagggtgggggccgcgctacggagcgttggcttgtggactgaaacaaagcgccccaggaaagaacaagctccgggataccagctccgggctccttgctggctgcaacttgaacgtggtctgag

SEQ ID NO: 273049 - DNA, 298 bp, Homo sapiens
ggagaaactttggggccaggcaggcagccccctggtaagagctgcttcttggaacacaaagagccgttgcgtcctccagccggccttgaggaaggtgtgacttctctgctcccagcaacgtcttgggcacccttctctgccctgcacagcagctctgcctgcagggtgcctggacactctgggtgtctactgtgtccccatatggtgcttgcaagtcttcctcccagactgccccctgcttctgtgtcccctccctggtgcacagcgccacatccagccctcctcccacccagcccac

SEQ ID NO: 273050 - DNA, 231 bp, Homo sapiens
aaaaaaataaaaacaagtgcttcattaagaaaaaaacatctttttcaacacatacaattctttgttaatgaacttaatcattgaatgccaactggttgggaaatggtatacctgacaacatagaaagccatcagacagctaacatggtatttgcaacttctcgtgagggtgggagcaccataaacacatatatgaagagataataaaagtccaaggcaacaatataagatg

SEQ ID NO: 273051 - DNA, 421 bp, Homo sapiens
ttaggaaaacaggaaatccagcattccctcctccttccccaaaatacaaagtgattaaaacaaaggcatacataaagttctgtacaatacgaatttaaaattgttcgttagatttggcagttaagaggttgttggccaaggaagccaaaagattggatacccctgctctagaggaactgtcaagtgggaagtgagagaaactaaatttaaagagtagaaagaatgggagtgatgtactataggagtttggagggaataggttaagcgaatggttgaaaggattggccctgagaaggagggtttcttaccctcttgagtgaaaaatagtggaaaggtttgtattaggtacctgtcctttaaaacagagctgctgcatttacccttggtgtttcaaattaagctaagcttagaaaaaataaaa

SEQ ID NO: 273052 - DNA, 617 bp, Homo sapiens
tacctaattcagtgtggtactaaatgaacactattaatgcttgatctttgttcagtgacctgggaaatattaattggtagcctacatattagcagatgtttttgaaccactctacttagagatgtgagccgagtttggaaactgtagtgatagtgagcagatagttcaacagattaacactggtaaacccacttactcggaaatttcaagtttaggttagtgagaaaattttctgtccttttaaactaaacccaaaaatcagtgtgactccttcccaagaatttatagcacttaatgttcaattcatcagaatttttcaggtattagtccataatctccttcacactaatccagctttcaggagtcattaaaaaaacaaatggaaaagttttattctaataattgattatttgtttttatattcttttataccgtggtgatgactacctatacattatttcaaggttatttatttcaatggcatggaaatgcttgttttaaaacactatttctttagtgatcccaatagaacatttgtgtctatcagcaaatggcttatcaaagatttataactgtctcacaagggtgcgtcaaaataaattcctttcttaaataaa

SEQ ID NO: 273053 - DNA, 711 bp, Homo sapiens
caagaccagtctaaccaacatggcaaaagcccattgctactaaaaatacaaaaattagccaggcatggtggtgcaggcctgtaatcccagctacttgggaggctggggcaggagaattccttgaacctgggagagggaggttgcagtgagccgagattgcaccactgcattccagcctgggtgacagagtgagactccatctcaaaaaataaataaaaataaaaattaaaagaaagctctcaaatcagtcacctaactatacactttaaaggatctagaaaagaagagctaaacccaagctagcagaatacgggaaacaaagattacagtgaaaataaataaagaataggaaaagaagagaataggtagaattaaaacttttttacaggtcagcaaaatcgacaagtttttagctagatttactaagaaaaaaaaaagaaaactcaaatagccaaaatcagaatgaaaatgaggacattactgtaactttacagtaattaaagtgattataagagaatactataaacataggtacagcagcaaattgaataaccaaatgaaatggcaaatctctagaaacacaaaacaactcggaggctgaggcaggagaatcacttgaacccgggaggcggaggttgcagtgaaccgagattgcaccattgcactccagcctgggggatgagagcaagacttcgtctcaaaaaaaaaaaa

SEQ ID NO: 273054 - DNA, 798 bp, Homo sapiens
gctcaggctggagtgcagttgctcgatcttggctcactgcaacctctgcctcccaagttcaagcagtcctcctgcctcggccccccagtaggtgggattacaggcatgcaccaccatgccttgctaagtttttgtatttttagtagagatggggttttgccttgttggccaggtcagtctcaaactcctgaactgaggtgatccatcctcctcggcctcccagagtgctgagattgcaggcatgagccaccgcgcccagcccttatcttggatttccagaactccatctcaaaaaataaataaaaataaaaattaaaagaaagctctcaaatcagtcacctaactatacactttaaaggatctagaaaagaagagctaaacccaagctagcagaatacgggaaacaaagattacagtgaaaataaataaagaataggaaaagaagagaataggtagaattaaaacttttttacaggtcagcaaaatcgacaagtttttagctagatttactaagaaaaaaaaaagaaaactcaaatagccaaaatcagaatgaaaatgaggacattactgtaactttacagtaattaaagtgattataagagaatactataaacataggtacagcagcaaattgaataaccaaatgaaatggcaaatctctagaaacacaaaacaactcggaggctgaggcaggagaatcacttgaacccgggaggcggaggttgcagtgaaccgagattgcaccattgcactccagcctgggggatgagagcaagacttcgtctcaaaaaaaaaaaa

SEQ ID NO: 273055 - DNA, 118 bp, Homo sapiens
ggggatcctgctctgcatggagcctgcccacttcctgggaatcagacaggtcctcttccccactccgaccacttcccgcatctgtaaccatggcccgcccaactcccttccagttgcc

SEQ ID NO: 273056 - DNA, 451 bp, Homo sapiens
tattttgcacaggctataggtttttgtttgatgagtgtttccaaagaactatttttctctgttagatagcatatcaagtataaggtaaacatattttcagagaaaacttcattttaacactaaaaattagactcttgtgatacagaattaagtataaattttacttggcaaaaactcgttttatttttacctgcaataatacagagcttaatattagaatgatatcaggtcataataataatacaccagaatcttttgagatggaattttgctcttgttgctgaggctggagtgcaatggtatgatcttggctcactacaacctccacctctgaggttcaagcgattctcctgcctcagcctcccagctacttgagaggctaagggaggagaatcacttgaacccaggaggcggaggttgcaatgagccgagatgatgccattgcgcccta

SEQ ID NO: 273057 - DNA, 277 bp, Homo sapiens
ggggtgatgaaaatctaaaataaattttgatgatgttctgcacaactctgtgaatgtactacaaaccactgagctgtatacatatatacagcttgttctgtcaaacagggtcttgttctgtcaccaggctggagtgcagtggcacaatcccagctcactgtagcctcaacctcccaggctcaatcgatcctccacctcagcctccgaagtagctgggactaaaagtgcatgccaccacacccagttaattttttgtagagaaggggtttcaccatgt

SEQ ID NO: 273058 - DNA, 365 bp, Homo sapiens
gaagtctgcaagaagagactgaatggggaacacagagtaggagagcagacatagtgagcaaggctgctgcaagcttaggtgagagccatatgtcaggcagctttgcatggcaggttaaagagtttcagttcagctgggcgcggtggctcacgcctgtaatcccagcactttgggaggccgaggcgggcggatcacgaggtcaggagattggagattgcaaccatcctggctaacacggtgaaaccccgtgtctactaaaaaatacaaaaaattagccaggcgaggtggtgggtgtctgtagtccctgctactcgggaggctgaggcaggagaatggcgtgaactcgggaggcggagcttgcggtg

SEQ ID NO: 273059 - DNA, 453 bp, Homo sapiens
ttgatttttctttgattccatacaacagattgcttgcctgggttagtgcttattttaagttcttggtgcttcttgtctgacttctgtatttgcaattaaaaacaacatgaccctccccacctgcagccagatatcgttagaaattcaacttcgaaatatattcctatcactcctgttttcactttaatagaaggctgttgcagtactgcatgatgggctcttataaaacttctactatctgctaattcttatctttgtgacaggattgtttgacactgagcaaggaaacacaataaggaagtaatttggatgctaggctggcagaagcctgcagctgtcaaccacagcctgccccagtgtgttcaacacggtggcattgttctccctgacttcataatgagcaaatgtttcacatttgaacttaaggaataaatttttactaataaaagatca

SEQ ID NO: 273060 - DNA, 477 bp, Homo sapiens
cagacaatcattctgtgaacaatcaaaaggtgagtgtatatttttaaaggtaagtaaaaatatggcaggaaaaagtctgctcttgatttttttgtttactaaaaaattttcaatgagtcttacaaacttagatgattattagttaaagtctatagaaatagttatacgtcatggacattataataattttaaattttctttaacggaagaactttcccctaaagttaaattttgttttagttgcaagacaataaagctatcaagattcaatggataaattttgtagaatcaaagaagagtgaaagatcttaagagaacatctagttcatgcactgttctacagatatgttctgcaggacacattcacagcattccaagaagatgaaaacctattcttgaattttcttgtttcatttagtattgtattctagaatttaagaaatgtttagcaataaaagttttcttatggctaacctt

SEQ ID NO: 273061 - DNA, 513 bp, Homo sapiens
atgtagtctacaaattttgaatcagcatatcattttgacatttatagtactaacagcaaagttgtttttttttctggtactgattttagcaactgaaagaaaaaatattatttcttagagaacttcctaaagccaggtgatgctattttcagatagccaaagaaccatgttttaaatcttttagtttatcctagacactttccccaatgaaataatattgtagcattggaaaaaaatattattggcaatgaaagctgctcttaagtatgtgaattcaaatcataccatatttttatttattttgggtggaaagagcaatctaatgatcttcagtaatcttttttcaataagttataagcataaatgagaaaagttatggttaaaaactgaggtttcaagaattaaagttggaaactcatctaaatgttaaatcatgtctaagttgcaaatttgtaagtatctcagagctcatagaagttgacagttgattaaagtactggctttttaaaaaca

SEQ ID NO: 273062 - DNA, 287 bp, Homo sapiens
ttctgctagacaccagggatataagatgaaaagacaattttagtcactgctcttaagctggtgacactcttaggggaagacagacattctcacaagtaattaaatacttagttaaaaaaaaaatagtggcatatgtgggtatagtgagagcccagggtgagcagtggctttcagaaatgttttaaacaaagacgtcatccccagaatgcattatcccccaagttggcattcatggttttgtttatttggcgtgaaaattcatcttaaatgggcgtgatcctttcaaa

SEQ ID NO: 273063 - DNA, 412 bp, Homo sapiens
  misc_feature (124)..(124): n is a, c, g, or t
ttagtatccccgctgcaataagagaaatggggtctctctctgttgtccaggctggtctcaaactcctgagctcaagtgacctgcccacctcggcctcccaaagtgctggaattacaggcgtcangccaccacaccccagccaccttctgcactttctaattcccctcgtttccctaattttgacctgaaattcttccccagttggtccatacattcccagtagtatgcgtaggagtgaacagcttccttacctgcgatgctttctgcctggttttgctgagaatagggaaggaggtggggcttagggagcctccacctcagggttcctcccagtcagaggctgaaaccctggtgggcagctggcttttgttaactcagaatacacctgactgggaatagtgacttatttgaa

SEQ ID NO: 273064 - DNA, 551 bp, Homo sapiens
tgtggggagatgccagagggaaggtatatcggtcaggggtagcgtcaggctgcggataggggctatgatctttgctccagcagggcgaagccctacagtgtaaagtaccattcacatggctcccacttggcagttcactcagagaggctcctctgaccccattgcctgggagtctgaggtagaagccagatgaggagctgaggttaggggcctgcctggctctaccacactttgctaggaagccgctgggtctgggaaagttgcaagctgaaagttgccagagacagtggggggcaggaaggcagcagcattgtaacaggagctgggatgagctaactcccaagccctaaagaccagaaccagggtaaggggatttgggctgaaatagcaaactccttcatcttctggaagggagacccacttagatactctctaggcagaagaggtgaattcagcctgatagttcagtatcattgatcattctagaagtcactactgcacaatgttggcatatagtaggtattcaataaatatttgattgaatgagctta

SEQ ID NO: 273065 - DNA, 379 bp, Homo sapiens
tttgagatggaatctactcctgttacagacgctgcgacattattggaatgacaacaaaagactgagaatattacacaagcttagttgataaagcagcagcagggtctgtgagaggattgattccagttttgaaagaagttctgctggaggcaaaatgctatcaagcagcagtgtatgctacagataaatctttcattaaaggaagggtcaatcaatgtggcaaactttattgttgtcccactttaagaaatcatcggtggggcctggtggctcatgcctggaatcccagtatttgtgggggccaaggtgggccaatcacttgaggccaggagttcaagaccagcctggccaacatggtaaaacctcgtctctaccaaaa

SEQ ID NO: 273066 - DNA, 464 bp, Homo sapiens
ctgggcctcaagcagcacaactaacgctcatgggacactcaccgtgtgccaagcccttgcatgcacttcacctcgttgaatccgtacagccgtattttggggatcttcaagtgaccttgaaatggctgtggctgctcctttagaggactccatcctgaccctcttctagccatgcctctccctgtggggaaggagtctacagggccaaggagacgtgactctgtgaagcccatggctcccttctaaaacattctctggatattctctgcagtcttgaactcctgggctcaagtgatcttcccgcctcagcctctggagtagctaggactacaggtgtgtaccaccacagccagcccttccttcggtttgcactttcctcttccaacttatgctcatttcccccgacccaggcctctccctttaagatcaaatataataattcctggaattccccaaaacaaaaa

SEQ ID NO: 273067 - DNA, 305 bp, Homo sapiens
ttaataataaaaaaactggatgacgtagctcatgcctgtaatcctgacaactcctgaggtcaagccaggcagatcacttgaggccaggatttctagaccagcctgggcaacacagcaagacccttcatctctaaaaaaaaagtttaaaaattagccaggtgtagtggcctgtgcctgtagtcccagctacttgggacctgaggtgggaggatcactggagcccagaaattcaaggctgcagtgaactatgcctatgccattgtacttcaacctgggtgacagagcaaaactccaacactcagtaa

SEQ ID NO: 273068 - DNA, 237 bp, Homo sapiens
gaaccttgtccaatcaggcttttactcctccaccgctaatactaccaataacctctaaattgccaaatgcaatggtcaaatctcagtcctcagctgttcgaccagcaacatctgacacagaccacttcctcctcctggaaacactttcttcacttgacctccagaacaccacaaactctagcacatcaccaatcacatcttttcaatcttatttgccattccttttcttctccagga

SEQ ID NO: 273069 - DNA, 623 bp, Homo sapiens
  misc_feature (587)..(587): n is a, c, g, or t
  misc_feature (623)..(623): n is a, c, g, or t
cataagccaccacacacggccaaattcaccattttaaaatacgctatgcaatatttttagtatcatcatgaagttgtgtgaccatcgccaccatctaagtccgttcattttcgtcactctgaaaagaagcctgttacctcattagcagtctctccattccccagcaccccccactccagcccctggtaattgctaatggttgtctctctgggtttttgatagcttatttataacattcagccttcacctaccatatgactaggtatttacctatgagaaatgaaagctcaaattcacataaaaacctaaagaggaatatgtatagtggctttattcataattgccccaaactggaaacaattcagatgtcagactgcccagtgaataaacaaactggaacatccatactgtggaatattagttagcagtgaaaaaggatgaatgatggataccacaccaccacggggaaacctcacgagcattgtgctaagggaaggaagcagactggaaaggccgcttccaacctagttctgttcatatgtggggttttttttttcgagaccccatctctacaaaaagatttagangtgggagggtggtttgagcccagaagtttgagaccn

SEQ ID NO: 273070 - DNA, 509 bp, Homo sapiens
gggtcgggaattcccgggtggacaactactactaaattcgcgcccgcgtcgacttaagaggagaattctgttttaatttgttgcccctccatttgttctcattccaaattaaaaagaggtatgtatttgataagacttaccaaataaaaatacaaaaaatcaccatgcctattttggtaataacttttaaaaaggcacgtggaaaaaaattattctgggccgggcgtggtggctcatgcctgtaatcccagcactttgggagcccgaggtgggtggatcacctgaggtcaggagtgagaccagcctgaccaacatggagaaacctcgtctctagtaaaaaaaaaaaacaaaagaattagctgggcatggtggtgcatgcctgtaatcccagctactcgggaggctgaggcaggagaatcgcttggacctgaaaggcagaggttacagtgagctgagattgtgccgttgcactccagcctgggcaacaagagtgaaactgtctcaaaaaa

SEQ ID NO: 273071 - DNA, 601 bp, Homo sapiens
gttgcagtgagctgataactgcaccactgcactccagcctgggtgatagagtgagactcagtctcaaaaaacaaaacaaaaaaaattattattgactgtagtcaccctgttgtgctatcaaatacttgatgttattcaccaggtattcaagtctttctatttgtcgtaccctcatagtgcatttaaatggaacgacaaggcttttttttacccatctgattaaaacatgtttgataggcctgtgcatttttaaaatttctgctcaatttaaggtaattttgaaagttaagaggagaattctgttttaatttgttgcccctccatttgttctcattccaaattaaaaagaggtatgtatttgataagacttaccaaataaaaatacaaaaaatcaccatgcctattttggtaataacttttaaaaaggcacgtggaaaaaaattattctgggccgggcgtggtggctcatgcctgtaatcccagcactttgggagcccgaggtgggtggatcacctgaggtcaggagtgagaccagcctgaccaacatggagaaacctcgtctctagtgaagtcgtattactttcactggccgtcggtttac

SEQ ID NO: 273072 - DNA, 864 bp, Homo sapiens
  misc_feature (146)..(146): n is a, c, g, or t
acatctatcccagtattcgccaagcttggaattacccttccctaaaggaccaaaatgtgaagcccaccccggtgcggcccttctagacaagtgttcccccggcggcaagaaatccggcagaggttcacattaacttaataccgccnccattccattcaagctgggttataaagttaagctccaatctcaaaaaacaaaacaaaaaaaattattattgactgtagtcaccctgttgtgctatcaaatacttgatgttattcaccaggtattcaagtctttctatttgtcgtaccctcatagtgcatttaaatggaacgacaaggcttttttttacccatctgattaaaacatgtttgataggcctgtgcatttttaaaatttctgctcaatttaaggtaattttgaaagttaagaggagaattctgttttaatttgttgcccctccatttgttctcattccaaattaaaaagaggtatgtatttgataagacttaccaaataaaaatacaaaaaatcaccatgcctattttggtaataacttttaaaaaggcacgtggaaaaaaattattctgggccgggcgtggtggctcatgcctgtaatcccagcactttgggagcccgaggtgggtggatcacctgaggtcaggagtgagaccagcctgaccaacatggagaaacctcgtctctagtaaaaaaaaaaaacaaaagaattagctgggcatggtggtgcatgcctgtaatcccagctactcgggaggctgaggcaggagaatcgcttggacctgaaaggcagaggttacagtgagctgagattgtgccgttgcactccagcctgggcaacaagagtgaaactgtctcaaaaaa

SEQ ID NO: 273073 - DNA, 1039 bp, Homo sapiens
caaccgtaatgcctgaattcaatattatttctcttaggatttggcagctcaattttaaggcaaaaattggggaaagggctggtccgtagtcagtacacacacacaatttataattaaattagctattttctacaggtctggttcgtggggcaccaaaatgattacaatagtaacatcaaagattactgataacagatcatatcagatataacaagggtgggctcagtgtggtggtttacatctgtaatccaagcactctgggaagccaaggtgaggatctctttagcccaggaggtgaggctgccattacccatgatcatgccactgcactccagcctgggtgatagagtgagactcagtctcaaaaaacaaaacaaaaaaaattattattgactgtagtcaccctgttgtgctatcaaatacttgatgttattcaccaggtattcaagtctttctatttgtcgtaccctcatagtgcatttaaatggaacgacaaggcttttttttacccatctgattaaaacatgtttgataggcctgtgcatttttaaaatttctgctcaatttaaggtaattttgaaagttaagaggagaattctgttttaatttgttgcccctccatttgttctcattccaaattaaaaagaggtatgtatttgataagacttaccaaataaaaatacaaaaaatcaccatgcctattttggtaataacttttaaaaaggcacgtggaaaaaaattattctgggccgggcgtggtggctcatgcctgtaatcccagcactttgggagcccgaggtgggtggatcacctgaggtcaggagtgagaccagcctgaccaacatggagaaacctcgtctctagtaaaaaaaaaaaacaaaagaattagctgggcatggtggtgcatgcctgtaatcccagctactcgggaggctgaggcaggagaatcgcttggacctgaaaggcagaggttacagtgagctgagattgtgccgttgcactccagcctgggcaacaagagtgaaactgtctcaaaaaa

SEQ ID NO: 273074 - DNA, 306 bp, Homo sapiens
gacttcctgggctcaaaccatcctcccacctcagtctctggagtagctgggactacaggcatgtgccaccacaccaggttaatttttaaatctttctcgtaaagatggggtcttggtaatgttgcctaagctggtctcaaacccctatgctcaaatgattctcctgccttggtccccaaaatgctgggattataggcatgagccacttcctctgccttgactgtttttgatggaatattctcaagtagattacatgctgtggcatcttaaacagagcactgtgaaccaaatgtacccttgggtgct

SEQ ID NO: 273075 - DNA, 363 bp, Homo sapiens
actgccccacaaatctgtgggagtcatcatttacttctagaaaagagaagtaaaatggactattattctgatgcagatatttcatgaatcccatgatcacccgtgccatgtcgtctgccctttggtatttttccatgctgtaggctattcctacatcacaagaagagtccaaggttaatcatgataccggagccccatctggacccagcatacaggctgctggcaggcctcctatacagtgcttgatgtaacgccagctcctctcattcttcctgcacctccagttatcatttaccagccctgaataagagataaccaacagggcattcttaaagttgggagtttcaccatagaaaacaaaaa

SEQ ID NO: 273076 - DNA, 296 bp, Homo sapiens
aatgttttatgcatctcccccaactaccactccccgctgccgccgccaccaccacaccaaaagtctggtttcttttatagccttctcactagacgaaagaaaataaaaaatctggttctcagataaaaccaaatgaaatattattttcccagcatcactaagggactaggtaattgcttttgagtttgaagcacatgagctgaccccaagaaggttgaagattgaaacctttccccctctcctctaagaccagctcaaaggaaacagggagcttgggcccaggagtttgagaccag

SEQ ID NO: 273077 - DNA, 565 bp, Homo sapiens
tgcactacgtgaacatgcttcatacagagggtcagcacctcactgtgtgaacatgtgtcatacagagagtcagcactgcaccgtgtgaacatgcttcatacagagggtcgggtcagcaccgcactgtgtgaacatgcttcatgcagagagtctgtcctgcaccaggtgaacacgcttcatacagagagtcagcaccgcaccgtgtgaacacgcttcatacagagggtcagcaccgcactgtgtgaacacacttcacacagagggtctgtaccacattccgtcaacatgtgtcagcaccataccatgtgaacacgcttggtacagtgatatacatgcatgtggcagagctgtgaaattatgacctgctgcagacagactttgtacactgtgctatcagccaactgggcaaatgtggacaagagtccctgcatgtctctattcaccaggtgtctgtcaaatgaaatgggctgaactggataatggcaggtctgacccatgattactgcctgtaagagctgagttatcccagagtgtaggcgtgggatattaaaatatatatatatgc

SEQ ID NO: 273078 - DNA, 444 bp, Homo sapiens
aattcatacaaatgttagagatttgttagtttttacattatacttctattaactgtagaattactattagtatagagacctcaagtgtttcttatttctgaagtcttcttagtagtgaaatgatgaggggtatagtaatgtccatttgtaataaaaatgattaatgaaaaatagaattttttattttttaacttttaggattcatcatatgctgaacatctttttaaagttctgactgtattgtgcaatgtcttttaattcatgtgtgttcttccttatctaaaaatcatttacatttacaaataagaatatttttacctgcaccaatcaagatacaattagtagctataaatgtaacattctatatgtaacagaataagaaaacaagagaaaaaaattgtaacttagcataattgaaacatgtgcctagccatctggagcact

SEQ ID NO: 273079 - DNA, 1634 bp, Homo sapiens
tccaatttgaaacatctcaggctttagtcagtggcaaaattgaagttaattgtttgctctctcttcttgttaatgtattttgtactcaggagagggtctggggacatagaaatgtttcaaaagatgtcaggtgtggtcaaacttgcttttcaacctcattgagagacaatatagcaaaaggctgagagcacaaactggagccagactgcttgggggtgtggggatctggctgtgctctgtgatcgctgtgtgaccttgggcaggtcacttaacctttctggtactgcgtttcttcatctgcaaaatgggagtaatatcatagggatgctgtgaggatctaaatgagttaatactgatgaactaactgcttagaacaaggtttgccccgtactaaatactgtgcacggtggtaataagtaataataattgatttctcctacttttcttcctctagtctatatcactacccttcagacacactggactcttttctctccttcatacaagtcaagcctttttctgtctccaagtctctgctcttgctgttttctttacctgtgttctctctcacatatcactttatgctcttcagatcctttgtcgcaatgtcacccttatgttttatggtatggtcctgctgtgtttttgtcttccctgactgcatgctcactcgtgctctctctcaatcgtgcgctctctctctctctccctccctccctctgtctcccgtcccacgccggcacaagccgcacgacaaggcaacacgaccccccgcgcagcagaaagcaagaccaccaccggaagacagaacgcaggagcacccagagaacgcgagcgcagcacaaaaaaagcaaaagaccgagcacgacagaacgagccagccaccacaagaacgagagacaaaaacacacgacacacaagcagacgaaaaagacacacacacagcccagaggaaaccacacaaccacaccgaccgaccacagaaaacgcggggggacaggcagcaggagagagcgagcgcgggcacagcccaacgccagcgcgggacggcagcaaccgacaagcacgagcacgcagggcaaagcaacgctcacacgcacccgcacggacgcagcaccagctcaccacgcgcgagcagcccaacacacagaacaccagaaggccacacgcacgcccacaaccgacacgcagaaaacgcagcccagcgcgcgcgcccaggcgcagcgcaagggccccaacgagcacgcgcaacacgcacgacaaggcgacggcgccaccgccgaccccgcaaggacagcagcgaaggccgagcacccgcgccgcaggccgggggcgggcaacacgccagcggacaccgaccggacgcaagaggagatgagaacaaaaacagaaggaagccaagagaaaaaacaacacaagcagcgaacaaaaagcacaaagacaaaaaacagaaacgaccaacgcggaaaaccgaccgcagaagagagacaggacccgagaagggaacaacaacagtaagagaacaaacacagacacaaaaagaaagccgagaaagaggggaagggagaagacaaaagaaagaagcaaaggcaacacaagagaacaacaaaaatagtcacagagataagggacgc

SEQ ID NO: 273080 - DNA, 379 bp, Homo sapiens
cctagaggcagccagtgttccacgttttgtgtatccttccagatatctgttaacacatcacacacacttttaagtttttcttttttaaaagacaaaagaggctgggtgtagtggctcacgcctgtaatcccagcactttgggaggccgaggcaggtggattacttgaggttaggagttcaagactagcctggctaacatggtgaaaccctgtctctactaaaaatacaaaaattagccgggcatggtagtaggtgcctgtaatcccagcaactcaggaggctgaggcaggagaatctcttgaacccaggagttggaggttgcagtgagctgagattgcgccactgcactccggcctggatgacagagtgagactctatc

SEQ ID NO: 273081 - DNA, 288 bp, Homo sapiens
aaagaaacgagggaggcatgtgaaattctgtactcttcgataaccccaagggaaactggccacgatgtagacgtcactctagtgatgaagttgttgagaaatgaagatgagaattccttgggccagtttctgtgcccatggatttgatgtctatctgaattttggagttagtaaacacatcagtgttacatagtttgaagggctcttgttgaaagccttgtgatacctgtagtagctgatgtgttattactaattctacacatctcctggatatatacagctcctgga

SEQ ID NO: 273082 - DNA, 2052 bp, Homo sapiens
taactgctaccaagtcagggaggagtcagacatcatcagcctcagccaggagccggacgaacatccaggcgacatatttttcaagcagactcccacgaaagacattctaactgagctgtacaaactcacaacagagagggagagactgctaaccaatctcctgagctcagaccacatcctggggatcacgatggggaaccaggaggggaagctgcaagagctgtccgtgagcctggcccccgaggatgactgtttccagagtgctggtgactggcagggagagctccccgtgggccctctcaataagaggagcacccacgggaacaaaaagcctcggaggtctagtggaaggagagagagctttggggcccttccacagaagaggaccaaaagaaaagggcgtggaggccgagaatcagctcctctgatgggcaaggacaagatctgttccagccactcccttcctctttctagaacaaggcctaacctttgggtactagaggagaaaggaaatctgctcccgaatggggcacttgcctgctccctgcagaggagagagagctgccccccagatattcccaagacgccagacacagaccttggctttgggagctttgagacggctttcaaggacactgggcttggaagagaagtgctgccccctgactgcagctccacagaggcaggaggggatggcattcggaggcgcgagcggctggagcatcagcaaacaggtttgtctgaaagtcaccaggaccctgagaagcatccagaggcagaaaaggatgagatggagaagccggctaagcggacttgcaagcagaaacctgtctccaaagtggtggccaaagttcaggacctgtcctcccaggtacaaagagtagttaaaacgcattctaagggtaaggagacgattgccattcgcccagcagcccacgctgagtttgtacccaaagccgacttgctcaccctcccgggagctgaggctggggctcatggctccaggcggcagggcaaggagcggcaaggggataggtcatcgcagtcgccagccggggaaacagcctccatttctagtgtgtcggccagtgccgagggggccgtgaacaaggtccccctgaaggtgatagagagtgagaagttagatgaagcccctgaggggaaaagactgggcttccctgtccacacgagtgtccctcacactcgcccagaaacgagaaacaagaggagagccgggttgccccttggtggccacaagtccttgtttctggatctgccccacaaagtaggtcctgactcctcacaacccagaggtgataagaagaagccatccccaccagcaccggcagctcttggcaaggtgtttaataattcagcctcgcagtccagcacacacaaacagacgtcacctgttccctcgcctctgtctccaaggctccccagccctcagcagcatcacaggatcctccggctccctgcattgcctggtgagagggaagctgctcttaatgactctccttgtagaaagagccgtgtcttctctgggtgcgtctctgctgacaccttggagccaccatcctctgcaaaggtcacggagaccaaaggagccagcccggccttcctcagagcaggccaacctcggttggtgcctggggaaactttggaaaagagcttggggccagggaagaccacagctgagccccagcaccagtcacctccaggtatctcctctgagggctttccctgggacggcttcaatgagcagacacctaaagaccttcccaacagagatggaggcgcgtgggttctgggctacagagcgggaccagcctgtccatttttgcttcatgaggaaagggagaagtcaaacaggagcgaattgtacttggatctccatcctgaccacagcctgactgagcaggatgacaggactcctggcagacttcaagctgtctggccacccccaaagacaaaagacacagaagaaaaagtgggactgaagtacactgaagcagaataccaagctgctattttacacttgaagagggagca

SEQ ID NO: 273083 - DNA, 347 bp, Homo sapiens
attaaggggttggcccagtaggccatagaaggcaacttaaaaggcttctcattaggttaggatgggaaaggatttacaaaagaatttaataaatttaaatcaaatatatgaaaatctatgaattaaaaattatactcagaaaaactcatgtatcataattagaaattgctaggatatcagcttcttgctctgaaaattgataacaaagtaaaagaaaaataaagcacttacctgcctttcccgtacaaattatatttctgagttgtcaaaagagttgagagaaaattcttttttataaaagaattgtagctaatgcacaagtaatatacacattttcaacaaacatt

SEQ ID NO: 273084 - DNA, 1887 bp, Homo sapiens
tcagttttcacttatgcatattattgaacagttgatttcttatgaatagactgaagaaaaaaccatcactattatagataagtaaattttcagtctttttcatcttggatggcaagcaaaatcaaatatatggaggcaagaactattgggcaaagcattttctacctctgtgcacaattgaaatgacattattcaaggtgactgcatctgaacacatcctcaatcatgcattatccaagaagtaaaatggtcttaggcgggcaggggcaggaataatgggaagttataagagtgctggacacagagaaggtaaccacatggtggatattggggatattatatttactttgaatgagctacaggaacagtatgaggatgtttcaattacagaaggatcacctttgaatgaaattacttcagacagaaagttatcaagtgtagcaggatgctatctaaaatataagaagaaaaatagtttgtcttccaaactccctgaaccttcaatatccaaaaagttaaataaaaaaagcaaccaatattatagcaaaattatggagaatgatgaccttgaatctaaaagaccaaaaaatacttggcaaataagaaaatttctgggtggggttggcagcagtaatgtaggagtccaagaaccatattcaaagaatggcataaactttaaaaaacattcagagaagggtgaaattcatgactcaaagtctaaaccacaaagcttgaagagtagtacaagcctcagtaagtctctggataaaagtgatatttctagtatcccaaaacttcagaagccagctgtaagaaagcattccagtctccaaaaacaggtttcgtctacggaaaaaactgcaattagtactctggaaaacttctgtgaagctatcagtaaacttcaagaaaattacattgcagcagaagaacttcagtctattttgccttcaacaggaattaatttattagatgaagaattccagaagattgtgacagacactagtagaaatgagaatggaatggtggagttagatgactttgtaaatgctctcgccaaggagcgaagttttcctgaatgcaatgcgttgcctggtgtcattaaagccattgataaaattaaagataaaaatgtggattatgaggatctaaatacttgtcttcaaaattttggtatttacctttctaagccagaatttaagaagatcacagaactgactgaagctggtgaaacaaaaaaagtgaattttaaagaattcattgatactatgatgagcaacacggaatgcttctctgaaaaattagtattgcctgatgctattgaaaccctcgacgatctcagaaaggagacgatgagtgtttctgacctgtggaatactctgtctagtttgaatagtaatttaaaaaaggatgaatttctagctgcattggaactagtgacagttgatggtgagtgttacaaatactaaaattaaaaagtataccaagatattactttattttctgtcaactcttgtcattgtatcttgtacttggcgagacggagtgttcgaatatgattgaaatgccaacatatgcatttaggaaatattgtataaagaaagttcagattgtttggctattcaatataaaaatattattatgtaatttattattgctctaaattgatcaaatatgcattgagtaccttcaagttgtgtggtatgttactggaaaatggcatatcccaatgaacacagagggcatgattaggaaatgttaagagatctattcaaattttataataacagtacttggaatattcatactgttttgttgaaataggcttttatttaatttggtagaaaaacacacctgctgatagctaccacctctatttagcaagtt

SEQ ID NO: 273085 - DNA, 1585 bp, Homo sapiens
tcagttttcacttatgcatattattgaacagttgatttcttatgaatagactgaagaaaaaaccatcactattatagataagtaaattttcagtctttttcatcttggatggcaagcaaaatcaaatatatggaggcaagaactattgggcaaagcattttctacctctgtgcacaattgaaatgacattattcaaggtgactgcatctgaacacatcctcaatcatgcattatccaagaagtaaaatggtcttaggcgggcaggggcaggaataatgggaagttataagagtgctggacacagagaaggtaaccacatggtggatattggggatattatatttactttgaatgagctacaggaacagtatgaggatgtttcaattacagaaggatcacctttgaatgaaattacttcagacagaaagttatcaagtgtagcaggatgctatctaaaatataagaagaaaaatagtttgtcttccaaactccctgaaccttcaatatccaaaaagttaaataaaaaaagcaaccaatattatagcaaaattatggagaatgatgaccttgaatctaaaagaccaaaaaatacttggcaaataagaaaatttctgggtggggttggcagcagtaatgtaggagtccaagaaccatattcaaagaatggcataaactttaaaaaacattcagagaagggtgaaattcatgactcaaagtctaaaccacaaagcttgaagagtagtacaagcctcagtaagtctctggataaaagtgatatttctagtatcccaaaacttcagaagccagctgtaagaaagcattccagtctccaaaaacaggtttcgtctacggaaaaaactgcaattagtactctggaaaacttctgtgaagctatcagtaaacttcaagaaaattacattgcagcagaagaacttcagtctattttgccttcaacaggaattaatttattagatgaagaattccagaagattgtgacagacactagtagaaatgagaatggaatggtggagttagatgactttgtaaatgctctcgccaaggagcgaagttttcctgaatgcaatgcgttgcctggtgtcattaaagccattgataaaattaaagataaaaatgtggattatgaggatctaaatacttgtcttcaaaattttggtatttacctttctaagccagaatttaagaagatcacagaactgactgaagctggtgaaacaaaaaaagtgaattttaaagaattcattgatactatgatgagcaacacggaatgcttctctgaaaaattagtattgcctgatgctattgaaaccctcgacgatctcagaaaggagacgatgagtgtttctgacctgtggaatactctgtctagtttgaatagtaatttaaaaaaggatgaatttctagctgcattggaactagtgacagttgatgataatatggaggtggatttaaaagatttcttaatgaaaatgaaagaaagtccacatttccaaaagtccaagggtaagtgaatacttcttgttcaagagaatggctagaaaataaatatttaaaaatgaaataaaaa

SEQ ID NO: 273086 - DNA, 428 bp, Homo sapiens
ttttcatttctctagatcagatgtgagaaattttcttttcacccagtggctatttactgcctgttttgcattagcaaaactcaatttattatattttgaaaggaaatagaaaatgtttcactcatctaatttcaaataacaaggtgaaactctactcaggaattacatgagattaaaatttatagctcagttattgtcaataagaaaaaagaaagggaagaggcatctttaaaacttgccaaaactctagatggcaaaaatcagaatcaagtaccaatgctgtttatctttaatgatcaaaaccaaagactttttcattcttaaggtggttaaatattatcagaattgattattaacagtatttacaactaagaagtttgaaaggacattctaattacttttgtattttttataaaatgctcattgta

SEQ ID NO: 273087 - DNA, 350 bp, Homo sapiens
gcagtatttattgagcgttatttataaaagggaaaaactggtggcacctgaatattcctcaagaaaggaatgggggaatcaattatggtgtgtccagagtgtgcagttatcacagaggaatgaagtcttcatgtacagacttgggtgaccctcaaaggcacattacagagaaatatgtattgcatgatcttatttttactaaaaatcaccccctcaagatccaggcatacgtgttttatgtaagaagaatgtacggagggaaatatttcatatcatacacagcatatagatgtcatctgaattgttatagcaagcattcgatacttttataaatcaaataactgaaatgg

SEQ ID NO: 273088 - DNA, 413 bp, Homo sapiens
ttctgatgcccttggatcacatctggatttatgttatgagatgattcaggatggggctgctcaccacaaagaccaaccatgggatcaggggctggggcttggagcccacgtcaactctggggaggggaggttggctggagattgagttctaacacatgaccaacgatttgatcaatcttgcctgcataaataaaccccaataaaaatgctgggtgtggaagttcagtggcacttcccggttggtgaacacatgggtgtgccgggagggtgacgtgccctgctttcatagggaggaggcacagaagctctgcattcaggaccctcctgggcccacttctatcttatggctggtcctgatctgcatcctttataaaactgtcattgttaagtactacactttaccgagttttatg

SEQ ID NO: 273089 - DNA, 328 bp, Homo sapiens
atcctttaatatacctaattttgtttataatgaattgaatagtagtgatcattcacttgaaaaataatttgagtgcccattttgaataacccataatgtctaatgcagtatttgcatagagatgaataaaatactgttcctgtcctcccatagtttataatctcatagaaagacagtgatatgaagtaactgtattacccagacaatcagtgatttcttatgaacattagtgggtgcaataaataggagaggtttcttttcatctttaattttcaatgactgagaaacttcagctattcttttgcttacatgacaccaataaacacct

SEQ ID NO: 273090 - DNA, 355 bp, Homo sapiens
gtcccaggggcaccgcaggattgcagaaccctagaaagcttgggcttctctgacctgagagcagcactttgacctcaccctcaacactccacctctctgtcacccaagaggagtagcttctcccagcaggctccgctcctcccatcgtttcgtgctcaacggcaaggcctttgctgacactatgcaatcagatcaaattcagaagaggatgagtggatgcagctactacactccttggtttcaaattttgtgctaattgaaactgcctcattgctctcattgattttctttgtaacagataaatgctattaaattgaattgcaaaatatataataaaataccaccattacttgca

SEQ ID NO: 273091 - DNA, 437 bp, Homo sapiens
gttatctgttatattctcaggttctgtcctcacttggggagggaatcgtacaatggggacctggatcttagtttccatcttaaaattctgctttgccacaaagtacaaagtaaagatgagagaaaaatgttgcaaaggctgattgaggagtgacctttgccttgatttatgacagacgtttgggtatggagagatggagactactattaagcagatccctctaaaagatctgaatgggaacacttgatcctatgtcctttagctggctcatggcaggattttacaaatagaattgttcaatctctctgttcagattactctccactctaccatgctgcttgctccttttggtctccctttcgtttggcctgtaatgtggatgtgttctttgtttaatgagatgagcattataataaagtcctagggcatttgaagat

SEQ ID NO: 273092 - DNA, 597 bp, Homo sapiens
ggattttattgccattgaaagtggctctcagcgggagggagagagctggaaaatggggatggagtgggaacgtattcttcccctgaagtactgccatcaagcagtcccgctaaagtcaagctgctgctctccgactcagactgcagtctccgacgtgcagctgcttctcctcttctctgctctgtgccagtggagcctgggatttttatgggtacaggatacggggtggggtaggccaggggtggttttggaaaaggcaatatttgagcaggaccctgccctttttctgtgtacaatttctgtgcctcctgtccctctcagtctctacagaatgtctcagaaatctccatagtagaggatcatcattactctgcccctggcttctgttttattctgctatagtttaagcatctttatgaattttatttgacccagtttttgaattgtctgtcttacacttctgtaacctctctttcaatatcattttcttccagttccatttacaaaacagtccactattcttttaggattaataattttatctgcctgacctcatcttcatgttttctgattcttctggtgtataaaaaaaaaaaa

SEQ ID NO: 273093 - DNA, 651 bp, Homo sapiens
ggattttattgccattgaaagtggctctcagcgggagggagagagctggaaaatggggatggagtgggaacgtattcttcccctgaagtactgccatcaagcagtcccgctaaagtcaagctgctgctctccgactcagactgcagtctccgacgtgcagctgcttctcctcttctctgctctgtgccagtggagcctgggatttttatgggtacaggatacggggtggggtaggccaggggtggttttggaaaaggcaatatttgagcaggaaaacaggaatgtaaagttctcactttgggcttgagagtgggtcttggccagggaccctgccctttttctgtgtacaatttctgtgcctcctgtccctctcagtctctacagaatgtctcagaaatctccatagtagaggatcatcattactctgcccctggcttctgttttattctgctatagtttaagcatctttatgaattttatttgacccagtttttgaattgtctgtcttacacttctgtaacctctctttcaatatcattttcttccagttccatttacaaaacagtccactattcttttaggattaataattttatctgcctgacctcatcttcatgttttctgattcttctggtgtataaaaaaaaaaaa

SEQ ID NO: 273094 - DNA, 244 bp, Homo sapiens
cttatttccttcccatctctgggcctcttgccctttctctgaagtgaatgatgtgaaaaatgaccttacatttccgatcatattctgttgtgtgattttaaatattgatttatttgaacatttttgagtgccaattatataccaggcatggtactagttgttaaggaaatactccttgtccttaatctcatggatcttgtaaaaaccacacagcaatcaaacctcgataaatatataaataaaa

SEQ ID NO: 273095 - DNA, 448 bp, Homo sapiens
gaatgccatctatctaattctgtcagtgtaatgcccatagagcaaggtcccacataagcttttctgttttaatttagccggtaaatcataagtagaaatttttctgatacggtaattgtctacaattcaaacctaactttccccaaataaaatttagtttgttccgatgtgatctcacagcttgccacaccaaaaacaaatagtaggggttaggaggcattaaataaacagtttccttaactcctgattgtccaaaatagctgaatttttccaattctatttataatatcctatgctaattagaagtattgagataacgttttataatcaagcctccagtgactggggatcacagctgccattattcacaagaattttcacaggtgaatgattatatttctccaagttgcaaactccagtaattcatggacctttttttaaaaaaaaa

SEQ ID NO: 273096 - DNA, 476 bp, Homo sapiens
attcctattgagaacatttcatgtagttataaaaacatcttaaatctgaaacaaggcatagaactgtacatatataatatatacatattaataaaaatgtttttcatacctaatgagaacgtcttatacaaaaaccaaaatgctcagtgaaaaataaggttgagtcacaatgcagaatagtttttataaatgttaataaagagggtaattgtactggttgctgcaacagatctgttgatcgatttccagattttagaaactattaacttttcaaatttttgctaggattagtcctctttttaatttttttaaaatcaactatatactctagataactacaactttaaatgttggaaaacctttttagagttttctctgtagaacagcaagccttttggagtggaagatgtccagcttaaatttgttaaaaccatctttggtgatgaagatttcaaataaatcaaggcactttgatt

SEQ ID NO: 273097 - DNA, 325 bp, Homo sapiens
gtatgtatcctccaccccttccatccatccctcctttcatcccatgtaaaatgctggcctgcagtgactgactgactgagactgataccgggtttaaaagccagctccagccgggcgcggtggctcatgcctgtaatcccagcactttgggaggctgaggtgggcggatcacaaggtcaagagattgagaccaccttggccaacatagtgaaaccctgtctctactaaaaatacaaaaattagctgggcgtggtggtgcatgcctgtagttccacctactcgggaggctgaggcaggagaattgcttgaacctgggaagcagagg

SEQ ID NO: 273098 - DNA, 298 bp, Homo sapiens
ccagaaaagaatgtgagaagacacccaaagttaatagccatccctttcctaatgttccctatgtgcggctccctgatgagaaactggaggaagagattcccatcatcttgcgtcttctattctcaacatcggagaactcctgttcttgaaattcaacctgatatcattattgctctgtggattaaactggctcttgtttgctaggctcagagtccaaatacaagatataacattgtttttatggaaaaatgtgcccaaataccaaataattgatctacaaagaaagttttgaaatgta

SEQ ID NO: 273099 - DNA, 440 bp, Homo sapiens
ctaaccttttctttaaattttctgggataaatatttaaagaaatagtatgtgtgaagaaaatcttgtaaatctatccaaaatctatccaaaagcagaggataggcctggctactaggtgttactttgataaagtgtctctgtaaatcatggtcaatatgtgagagatctttaaaaaagatgttaactaataaaatcactgggactacctctttctttcatttcaatggaattgtaaggactctgtcaggcaggattgatttcagcaaaaggtagaatggggtacaaaatatcccttgtttcactgaagtatatacagaaatagtaagactcgttggattcagtcagttttatagttaaagcagttttgtgggctgaacactgacacagtaactttcacaaagtaggcaaagttaccaggcaggtattgttctcttaatta

SEQ ID NO: 273100 - DNA, 307 bp, Homo sapiens
tccaagccgggagagcagcaggcctgcccgggctgagctccagctgccgacctgggggaagggcgactctaaagcccccttttccaccttccaggccggctcaaatgtcgtcttctccactaagcctcctcccgctttcctttcctttcttagagctcccataatacgttcgaatctccaccgtttgttaagtctttcttgccctttcttcctacctctatcccaaaaatgtgagcagggacttgatcattttcagtctcgcatcgcctggcgttcaagaggcgcccaataaatgattactggaaaa

SEQ ID NO: 273101 - DNA, 154 bp, Homo sapiens
gggatcttggaatgggggaaggctggggctggggcggtgggtaacttatttcctcagaaatggcacacgcagacaggtccacaattcctgggctcacattcttgtttgcgaaatcaaatctagggcaccgccagcctgaatgaagatttggaag

SEQ ID NO: 273102 - DNA, 350 bp, Homo sapiens
ctcagaaaaagggatgtagaaaaaggttgctgaatggagtaatttcagtgttttgcacaggaatggctctttttctttttctggtccgtatgacttttgctttaagactattgctcaagctattttgtaagtttggggttctcccacacaagtacattgactaagcattggttaaaaggctaggcacctgagtaccacttacatgttttactttccaagttccaacctaactacttataaacttgaaagtagttatgaattgtgggttacctatagtcaaatagtagggtttttttttttttcagtcaattggaaatgaaagggcaggtattggcaaggcttcgggacta

SEQ ID NO: 273103 - DNA, 245 bp, Homo sapiens
cttagtgaggcgggtctatagtcaggggcaattgttcctcgtcagcctggctggagaccttccacccattgggattttgtaaaacatctactttaaaatgtggccgtgagaaaagcccccattcctccccaccatctgttcgcctctccccgattttctaggattaaagtataggcctgcaatcccctacctccaattctaaagcccacaaagctctgaaaacaggaagatgttccccccaagtt

SEQ ID NO: 273104 - DNA, 456 bp, Homo sapiens
cttcataaaagtgagacgtgtgactggggaggactcctatcatgggtactgaggccatagaaaaaaagcagaacaaactctagagctaaaaacatgaacttgaaaggacgtgcagaaaggaaacacaaaagttaaaatcaagcacactcctccttaaagtccttgctatatggcagttatcaaggtctaaattttggctgtttccactcacacgcataatcttttgtgagacaactgactgtcaatagatcccaccaacttatatagaactctgttttcttatagagccaaccctgactcagttcatagaactatctaacttcaaaggaagcctatatcagttactggtattaatcaagataaccattcattcataaacatcatatggcatttgacaaaaaacaagtaacccgaaacataaggaccaaaattctttgatacacacaaaaaagagaa

SEQ ID NO: 273105 - DNA, 528 bp, Homo sapiens
gcgagactgaataccagaacacagagtatgcacaactgcaggacatcaagacacgcctggaggtggagatcgagacctaccaccacctgctcggtggagagggaggttctgaggccagagaagctgaatctaaaggatgattctctgtggactccaaaggaataaccaacacagctcaatcgaggggaagagtcgctttttaaaattcacataaaagcagaggaaccaggctggtgacggataatgaccaactaatttcatctcaacactgtttctgatgtaaaattcaagagtaagatgcaggcagctgagtcctgtccccaggatgtaaatgatgacacctaacaaaggcgtgctgaagcactgcaacaaacctgcggccacagagctgcagctactcctgtaatcctttctcagattcttttgtcttattggttcggttttgtctttaaattgcaaaatgtgttttccttcttaatcattctgtgtcgataaactttttgcctgttgcaaatcaacaacatcaat

SEQ ID NO: 273106 - DNA, 398 bp, Homo sapiens
agtgcatccttgcagacacagatctccacggatgctgaagcagttagctcggccaagagtgagataatggagctgaaacaagtcctccagtccctccagcatgaactgcagtctgtcttggccatgcaaagctccccagaaggaaccctggctgacacagaagctggctacgtggctcagctgtcagaaattaagatgtaaatgatgacacctaacaaaggcgtgctgaagcactgcaacaaacctgcggccacagagctgcagctactcctgtaatcctttctcagattcttttgtcttattggttcggttttgtctttaaattgcaaaatgtgttttccttcttaatcattctgtgtcgataaactttttgcctgttgcaaatcaacaacatcaat

SEQ ID NO: 273107 - DNA, 457 bp, Homo sapiens
ttttttttttttaaagacagagtctcactctgtcacccacactggaatgcagtggcgtgatctcagctcactgcaacctctgcctcccgagttcaagcaattctctggactcagcctcctgggtagctgagattacaggtgcccaccatcatgcccggctaaagacatcaacttctgaaagactaaaagttggtgtctcttgggattcaacatgaaatttaggatggaattttctatttctacaaaaaaaaagaaatgctgttgggattttgatgggaattgtgttgaacctgtagatcactttgggtagtactgacatcttaaccatattaagtcttccactccatgaatataggaagccttaccatttattggtgtctaatttctttccacaacattttgtagttttcagtatacaaatctttcacctccttggttaggtttatgcctgagtatt

SEQ ID NO: 273108 - DNA, 221 bp, Homo sapiens
aactaacctttagagttgctaaataacgtgcccaaggtcacccagctggtaacggtcagggtcaggatccaaacctgagtgtgcctgattgcaaagcccacacgccgaggaatggtgccttcctccctttatgaatgtatggctttattaagagctaaccagcacacagcagctgcgcaaatgacaaatttgtgcgctaacatccaacagactgtagcctc

SEQ ID NO: 273109 - DNA, 490 bp, Homo sapiens
ggtcctaccagaggttgccatggatctacctctggaaactcatgaagcacatgacttagtgtggctctgacaactgttctcctgaggggaatgataccctgcaagagaaggtgaagtcagaagcctactttcataggtgcttgttctctgatgtctgagatgcagcgttctctgatgtctgagatcccattttattatatggccaaccagactgtgagctcaaactttgggatgctaaagggaatgaatgtggcagtttaaaaaaaaatacctttatattttagacctccatatttggctgcttagatcccagttgtttccttcctgagtttcaaatgtaagaatgctatagtcacaacacactcagacacaaaatcactgggtttcgatttttcttctggaattgggacatacatgagtgaataaaatatccctgggaaaaactctaaatatccaacaaactagtaaatcaagatataacaacacatta

SEQ ID NO: 273110 - DNA, 561 bp, Homo sapiens
gacaagggtgtttgctttccatggaccaaattgacatcacagagggccatcagaccagaaccatcttcagaggaccctgctcaagaggatgccggcagggacgaggagaccccagggaattgcctctctcccactgtgtgatgtcattgtgggatggtcaatacacatgcctatcctctctccagatgcagatgctaagaggactccattctgatgactgtctatatcaaggcctcctaccctcagggaattgggtgagctgttcctgttgatgaagctatggggctctcctatgggagataccagtatttgcatatgggacttggtgcctagattggagctggctttggggctaagctccagatatggttgccagaatatgaccttgaggaaatggagtattatatacaaatgtgaatgaaaaccaaaaggcagaagaatacacacagtatgctacgtttcacacaaaattaaacaccattccataatttgacaatatatttaccttattgaatatgtagacaagttacagtgaaaagtaaaggaattacaattacaaaa

SEQ ID NO: 273111 - DNA, 445 bp, Homo sapiens
gtttgcagagaggagagaatgaaacaggactgtagagagaagcagagacaagaaatggatcttcccatctcgtcatgagcttccacttccaggtcctcatctctctgatcctgtttcccatcgtctctttacccttgatgaagataaaattcctggctagacaccttgcttaaagaaattaaataaagggacaaaatcaaagagttggagtaagaagtgcacatttggttttgcagctaagctccagatatggttgccagaatatgaccttgaggaaatggagtattatatacaaatgtgaatgaaaaccaaaaggcagaagaatacacacagtatgctacgtttcacacaaaattaaacaccattccataatttgacaatatatttaccttattgaatatgtagacaagttacagtgaaaagtaaaggaattacaattacaaaa

SEQ ID NO: 273112 - DNA, 312 bp, Homo sapiens
tgtgagtttcagctctagatcaactgcaagaacaaaccagcaatctggagaggaaccacagatcctcggaaggaagtgaactgctcctgcgggattcgggagacaccccaaatactactgaaattattaactggcagcaaaccagccttcagcatacacatgatgacaatgcctgggaggattctgttggagaaacaagaaggaaggaaacttggatcttgagtgacttcatagagcaaactggtctggcataatggaacatctctatggactgctgcatgaatgttcgataacactttattttgtttgagc

SEQ ID NO: 273113 - DNA, 324 bp, Homo sapiens
gactttaatttttttttaaatgttgttactaggggaaggttctcttcttggaattaaacatacttgcagaagcactagatactatcctcattaggatttcaaagcatgaatgggtcccagagtcatgtgctgtttctgtgtctgttgctatagattacaaattttaagttaaagtttccattttacctagatcactgtgacaccaaagaactacaaattacaattgtggtttgtatagcaatttttctctgtagttcgataaaaatgaaacttcgtcaaataccaactggtattttaaggagtcagtagccgttgagaagtatt

SEQ ID NO: 273114 - DNA, 445 bp, Homo sapiens
agtttactagttctcgtaaccgaaaaaataatagcattgtcaaaatttaatatgcatctttagtttctggaactaactcatgttaaactattaagaagttagtttcttagcatctgctgttgttggactatgtccatccaaaatttaggtggtgaaacttcatggccagtgtgatggtattaagaggtggggcctacaggaatgggatttaaggcccttatgaaagaggctttatgcagccactagctctcttgcccttcagccttcaccatgtgaggacatagcattcttcccctctggaggatgcagcaacaaggtgccatcttggaagtggagagcagccctcactagacaattgaacccgctggtgctttgaatcttggactacccagcctctagaactgtgagaaaataaatttgtttttttataaattatccagtcctt

SEQ ID NO: 273115 - DNA, 484 bp, Homo sapiens
actcatgggcaatcttgttttatctattaccactcccccctgccccccgctccctgacagctccctcagaaataccatttccacctaccagattgacaaagatttaaaaaattgacagactttgttaaagaaaaagttaaaaaaacaggaagtctcatacattgctagaaggaatgtaaattaattacaatccctatagagagcaatttgttcttacccatcaaaactctaaacacttctatccagaaattctgcttcaatgattttattatgcagctgtacttgcacgtgtgcaaacagcacatccacagttattaattataatagccaattattggaaatacctaaaatgtgaaaactttgcagctctgaacaaaaataaggaaactatattgatatggagtgttctccaaggtgtattggggtgaaatgcaaggtgcagaacagtgcagcaatgtaagttcccatttgtataaaaaaagaa

SEQ ID NO: 273116 - DNA, 451 bp, Homo sapiens
tgaatactgtttagtgtaacactttattaagttacataggatgccaacatctctagggtaagcgtggaaaaaagagaatggtgtgtacaactgttaaattagtagaagaaaaaccatggaactatatttaaaaaaaaaaacaaaagcaaaatccaaatgaaggcaataaagaaaaaataaggctcaggaaaagcaggacaaatagcaaaaaataatatggtcaaaatgaatataaatgcattagtgcaatcaataattagtgtaatctgctaaacaacatacatcaactgaatattttacttaaaagacaatgactgattgaattaaaaaatagacaacatatgtccacacagacttgcatgtgaatgttcatagcaactttatccacaatagttgaaaaaactggaaatgacccaaatatccatcaacttgtgaatagctaaaaaacaaa

SEQ ID NO: 273117 - DNA, 270 bp, Homo sapiens
gggggcaagcagggtcctcaggagggacaagacaagaggagatgagacagcagggaaatcactccagagttgctgatctcttttgattaaagagaaaagattttgcagaggaaggaagatgtcaggagctgttgcagggcaggagagagccccaggcaaggagtttattaggacacagaacggccagggatagggaatctacatggggagggagccttggggagggagccttggagagggaacgactgtctcaggaagcagacaggtgtg

SEQ ID NO: 273118 - DNA, 375 bp, Homo sapiens
atatcaactacaaaattatattaaagttacataattaataaattattaaaggggagaacggttaactggccggcacagcacacagtggctgttccacatgtcagccctggacccactgtcttgggagaagatgatccaaggaccccagggacgctggggcggagacgggtagaggcgacaaagcctcctggggcgaggcatcacagctctctcagcctggcctccttgagtaccttgaagagagccagatttagaagaaatatgacttcagctctcaagatgggaaaacatctagccaagaggcagggattctggaaaattgctaataaattgttacttcctgctattaaaaggatcgataagataaggccagaa

SEQ ID NO: 273119 - DNA, 995 bp, Homo sapiens
aaatagccggccgaatgctctttttccagttctggctaagctgttagctgcagccgggcggcgacgcctgccaggtacctggctccgtgagcaccgcccaaactggtcaggccagtccgtcctgtggctgtttctgccaggactcgcccgagtgtgtgtgtgcgcgtgtatgtcagagacccaccctgctcccctgcaaccgaggtaggtggaaggcagttgcaggcaccagcctggcagtcaggccagatgggtggggctgaattaatctaacctggaatttcaacttggcctgcacaacaggtgagggaaaaaagcagcagagagaacgggcagtttggcaacttggaaatattcctgagccctgccccttaccccctgcctggaacgtagcccagggtgactcttcaaagtgtctgcgccgggttttagggcttagtcgccccacggccccctcgaggctgtccgaggccctcctgaacgctgtcctcctcagttaccctccgcgacgcgcccgttccccctcctctgggaggcagggcgggggtatcggattagtctttgttttcgacgcgaaagaatcgagcgcggcgcgggggaggctggtgatggcagggccgtggggtccacctggacagggcattcggccgtgacccctgcgagggtgcccttagcctctgcccccgagcaaccccttcttgccggccaggctgactcggtacgcaaacgcgcgatgtcccccattgtcctgcctcggaatgagccagcggcagctgggacaggggggtcagtcgggcccggcgctcaggcctcccgggggcgccggggctgtcccggacagatctggcccgcagggagtggcaggaagtggggacaccgagcgaggctcggccgagggcctaggctggaaggtccgcgtgccccaccccgcctcgccggccccggctgcagccccgccggagggcgagggtggccaacccgaagggggcggccgc

SEQ ID NO: 273120 - DNA, 747 bp, Homo sapiens
aaatagccggccgaatgctctttttccagttctggctaagctgttagctgcagccgggcggcgacgcctgccaggtacctggctccgtgagcaccgcccaaactggtcaggccagtccgtcctgtggctgtttctgccaggactcgcccgagtgtgtgtgtgcgcgtgtatgtcagagacccaccctgctcccctgcaaccgaggtaggtggaaggcagttgcaggcaccagcctggcagtcaggccagatgggtggggctgaattaatctaacctggaatttcaacttggcctgcacaacaggtgagggaaaaaagcagcagagagaacgggcagtttggcaacttggaaatattcctgagccctgccccttaccccctgcctggaacgtagcccagggtgactcttcaaagtgtctgcgccgggttttagggcttagtcgccccacggccccctcgaggctgtccgaggccctcctgaacgctgtcctcctcagttaccctccgcgacgcgcccgttccccctcctctgggaggcagggcgggggtatcggattagtctttgttttcgacgcgaaagaatcgagcgcggcgcgggggaggctggtgatggcagggaagtggggacaccgagcgaggctcggccgagggcctaggctggaaggtccgcgtgccccaccccgcctcgccggccccggctgcagccccgccggagggcgagggtggccaacccgaagggggcggccgc

SEQ ID NO: 273121 - DNA, 864 bp, Homo sapiens
tccattagatattcctctcctggcatttaggttcatcttttaattttgagatttctcactagggatcacaactgtgactttaacttaaaacaatctattcagagttaatgttctacctactaaatgtcaagaacccaacttgtgtgccacacatacatgtactacacatgccaccactgcatgcatagtatttaaaaactgccaagaatttggacagatcttatatgcgaatttttttggactcactttctttgtagctgcctctcttccaggatttacccactaagtttcttgctgttctgttagcccagaactctgtatccttacatttcatgcaaataaggttgtggtattcttcaccaagtagcaggaggattacagagcaccctcagacaaaaacccaccaactcatgaatttcacaagatagttatgttttaagaataggctctcctccagtttgtctgcttttgatcactctccagtacctttaaagaaaaattaatgtattttgtccagatattatcattgttatctataggaaggtaactctacagtattgcaccattactagaagccagaatgccacgttacttttactacataaactccattctgaaaatgacttaactaggtaatttatgctactattaggtgtatttttcctttttattttagtagcagctttattcagatataatgcccacgccataaaatttatcctaaaaggataagttccgtggtttctagtacagagttgtataaccatcaccactacctaattttagaacattctcatcaccacaaaaagaaatcacataccctttagcatttgttccccatgctccttcccacaacccctggca

SEQ ID NO: 273122 - DNA, 378 bp, Homo sapiens
aaaatacagtactccctgtctgcttcatctcaacaaatgactttctggcctagagccaggtggtggttagaataacctggaagtcatagagtagaccctgtaattttgactcaccttcagtgtacgctgtgttatatctgtcagttctcattagtatagtggtgagtacccccacctgtcactgtatcatgcctgactgtgagattatgcttttgtgtctgctttaatatcacatgaaccctttattttgttttccagagtgaaaacttgatcctttgtatgaaaaatgcttttatttatttatttatttatttatttatttatttatttagagacagagtctccctctgttgcccaagctggagtgtagtggcacgg

SEQ ID NO: 273123 - DNA, 315 bp, Homo sapiens
acgcattgccaaaaagggagacttacgcatcattcactaaagctttccaaaaactaaatcagatccaagaacagataaactcctgcagaatgacaatggtggagaaattgacctcccagcattgcagacttacatcagttgttctgatgttcttagttatatcagattccttccagaatcttctaaatatatcagacggtcagacacaaccccaggccctaataaaaaaccctgatgctggcctacagatgtgcaatttaataaactttctccatgattctggtacacatccaacatagaagaaccacttagtac

SEQ ID NO: 273124 - DNA, 220 bp, Homo sapiens
gtttgcagaaatacaccaaacgtgtgaccacccttcgtgaccggactacagcaataactaagccagtggggtaggaaggagaatcggatcaaaagttcacattttgatcaacgtcacatatgcttgagataaaacgctgctaacgtcaacactggactcaccccagtcatattaacattgacacgactcaccccagtcatattaacattgacaccaaaca

SEQ ID NO: 273125 - DNA, 296 bp, Homo sapiens
ggagaaagttttgtctatagcagaaaggctttatgtgtaatgcttgtcaggtttacgaacctgtaaccagcaccatgcctggcatgtagagagtgagtaggaagtctttataaacctataataatagaaggcatctcattgtcccatcaaaaacgtaggaaacccaaaagaatatgaagttgttatgttgttatttccttcttaagcttttaatttgaaaggtagcaaaggttctgctgtttgacatttctaccccctgcaattctgtcaggagaaataggtcacatcatggtggg

SEQ ID NO: 273126 - DNA, 294 bp, Homo sapiens
cccaccagcatattcaaaaggcacaggtcccctggcaggtgcaaaagaaaatgtgccatggagatgaaactgggggagggagttacgagtcaattactacttatgttgaactaaaagaagcccaaggcatcagcttcggctcagtcttctccatacaccccaagctgctttccattctcactcagcccctgactattcctcccattcccctgcccagtacaataaaaacagcatgcagttagcttcctccaccccggaggctgaccaggaccagaatcagcacttggatagtac

SEQ ID NO: 273127 - DNA, 481 bp, Homo sapiens
atgaacaactttgtaaatctttggtggtatctgtgtgatgatttcctgaagatagggctctaggagcagaattattgggttccagaattattaaggttgataacattgccaaattgctttgcagagcaattctgaatttatgtttctgtcagcactgtatgacaatgcctgcttggccctggctgtcactgtgttttcacattaaaaataatgataagtaattctgcatgcctcatggcatacctactctgttgacacactgacatggaacctttaaaagcagtggagctgggactaagggtggactgactatttgctttttctttttaacagccacctctttcctcagagggaagttagtaccagctgtcagtgtgccagcctgagtttacatagaaggtgtctaaatgtttacaaatgaagtatttgtcaattaaaatgtattttaatgaattatactgaaaatcttttgtaaaatgaa

SEQ ID NO: 273128 - DNA, 455 bp, Homo sapiens
tgagagagagagtcttgagaaattggcatattcactaatttagtgacttttttgtaatatcgtgtatagtcaatattagaagtgaggaggaagattttaactacttaaagcactggaaaataacaaagttatctttaatggaaaggtgatgttaatataaatcaaatttctgcctcattttctccatttgaaatcttaattgaatcctctgattgcggaagatattgaaggacataacccatatgggaatccacccgtagtagttgggtactttggaaacctttaggtacctgtagagcataaacaaattttcttagcatagtaattttctttaatcatatacattttatttagcaactacttgctgtgtgataatccctgctaaataaaatattggttttttttgtttttcattggaagtggagaactgtctaatgtagcataggttagtacta

SEQ ID NO: 273129 - DNA, 429 bp, Homo sapiens
gagtgcagtggcatgatcttggctccctgcaaccctgcctcccaggctcccatcctccctgcaacccatcgtcccacctgtgaagggaaaataaatcttgggcccccaaactcaagccaaagggaaaagtcaagctgggaactgggtcatgcaaacctgcctccccttttggtccctaaataagatgctgcaagatgaaaaactgcacacctcccctatattttgtccacaaggaaattcctagtgagctccgcaatctttactgtaaggtgtttctgttaagatttcaccacagcaatgcaaatcgatagctcatctttacaggtgcagtcaacccctgcccgccagacacaaatgcaaacctgattgttcccctgccccctttgtctaagtcatcttgtgtaaaaataatgcagattcaatgagcca

SEQ ID NO: 273130 - DNA, 503 bp, Homo sapiens
aaatgtgaaataaatctatgctatctttcatagtgttaccacacaaacatctaaaaggactacttttggttttgcaatgacagggtcgaaaaaagccccagatgggctggatttttttttttttctgatattttcttcctcaaagtccagttgctctccaagttcctacccctcccctgcccttgcctcagacctttaagaccaaagactgcaaaaccacagtgctgtacctgccacctccaaggactggcgtcgaggcccaacccaggaatgttggcttatttacctcctgggggaagcagtttaggcctcatcagagctggggagcacatcccttcagagcccatgggtttcccattccctcctgtcagccctggccatgaaatcctggggatctggagggagggaggatagttagagagtgagaggggcgagggctagccttttcctaatacccctgggtttgagtttaatttgcaataaaatggaatcccagcacatca

SEQ ID NO: 273131 - DNA, 1175 bp, Homo sapiens
agctacatttttttaaaaaggacacagtaagaactttccccgtgttttcacctgagttcttttgtaacagtggtgacaaaagttcttttcaacctggtatagaaaattcatctaatgccatttgagtctacatttgctctgttctatgatttgcttcttatagaagtatcttgtagccaaagtcacgaagtagatgagaattaccccgaaatttcagacctttgacatcagtgtggttgtgctgattgccaggttcataattgtgatttcattttcctaagaaaaatctaatgatacatcttcctattaatgattgatcagtcttccataaagtcaccaagatatttttttaaccgtgaaaatgtaaaatgtacagaaaataatgacactcatgtgcctaccacccagacttaccaaagcctttatcattagctgatagagtcacacgttcacattccctgtaatcatagttgtcctttccttccttaggtttagacaattgatttaatggacttaataatcatttaaataatttacataaagattgagtctttattttttagttaatggcttagtttgaactatgaaaagtcaaataattttggtcttttaagtttccagacttgatagtagtccataattttaaatgttttgaaatactttgtcttaatttttataagagttgagaacagctcactgatttgagcattcccttcttcccttgcctattttgtgaaatacttacagatggtcacgtgatgtgctagcagaaagtcaaaagaaggagcaaaaaccaccaattggtttaatcctttttctatatttactaaatatttattgagtacctactgtatctgaagtattgcaccatttttgttaatcaagaattaggccaggtgaggtagttcatgcttgaaatcccaacactttgggagaccgaggcaggaggaccgcttcagctcagcagtttgagaccagcctgggcaacatagtgagaccttgtctctacaaaaaatcaaaaaattaggcgtggtggcacacacctgtagttctagctactcagaggctgatatgggaggatcacttgcgcctgggaggtcaaggctgcagtgagctctcagtgcacctctacactccaccttgagtgacagagtgagaccctgtctcaaaaaaaa

SEQ ID NO: 273132 - DNA, 688 bp, Homo sapiens
ttgaggcatcagctcaacctctgggggctggagactgaggtcagtaggccatgtctgtatcaaaaggccccctgaagactctgggcatccaggcccaggaagctcacagttgccgtgctccatgcaccttgtcacaaatcattgctgggaggtgtgatatggtttggctgcgtccccacccaaatctcatcttgaattcccatgtactgtgggagggacccagtgggaggtaattgaatcatgggggcaaatcttttccatgctgttctcatgatagtgaataagtctcacgagatctgatgcttttataagggggagtttccctgcacaatctctctcttcacctgctgtcatccatgtaagatgtgacttgcttctccttgtcttctgccatgattgtgaggcctccccagccacatggaactgtgagtccattaagcctttttcctgtataagttacccagtctcaggtctttattagcagcatgaaaacagactaatacaaggtgttaccatggtgagtccacagggcaagaacaattagaaggtcggtacttggaaccttctggatgctacctcacacatctcttccctcggctgatgttttggggtttgtttgttttttttttttttgagacagggtttcactctgtcactgaggctggagtgacagagcgagactccatct

SEQ ID NO: 273133 - DNA, 697 bp, Homo sapiens
gcaaagggattcagatacctaggctttgtctttgtattaagcatgtctttattctgatgtttgacatcttggggctttgctgaccctagagaaactgcccctcccatggctagagatggtaagggactcacttgtgagcatgccttttgtataccaaccaaccaatccagagtctattttccaacttttttttttacagggcccttccagggttctcacgctccaggccactattccccagcccttacaccccactgacaagcccactgaaattattcacagtagccaattctaggcctgcttcctaccctgcctcgaccattccttccctcagaaacacagcaaatgctcctgcctacattttcccctccctgactctgccttctgaccaccctgaggcctccactcctggccctgcctggtatgacccgccctctctacttgggaactgtgagtaacaattattctttcgatagcaatcagatcctgatctcctggcctcaccatatgtgaatataaataagatctacatttgaaagccggctacatgctccctaggcttcaaacttgcaaactctaggcccagcgcaggagctcatgcctgtaatcccggcagtttgggaggcccaggtggggggagaacttgagcctaggagtttgagaccagcctcggcaacccaaggagaccccatctcta

SEQ ID NO: 273134 - DNA, 267 bp, Homo sapiens
ctcacctccccttgctacaagtcagtagttcagttgagatgatttaacccagattacacactctaaaggaaatttactttactgtcttagtttccaaatgttttacggtcagtttaattcatatggcccatatgtcttctgtcccacacagaggcagctgcatacttagtgccttttctcccttcccaaagaacattagaataaacagagcgttgcagaaagtgatgcctgtgtgtatgtgtgtgtgtgtaagagtgcacacatgca

SEQ ID NO: 273135 - DNA, 383 bp, Homo sapiens
tactccgtccgcggcctctcagctctagggccctctgcacactggcccccccagtgtcacgggcatccagacgggatccagtgcatcctcttttagaagaaaggcctgtctccagatccccgagtccctctagcatctcccagaaggtgtcagacgcagcagtgtccagggagcggcagcaggtccttatcatggtccaagggtccctcccagcctccaagtctcaccccatacatgaaaaaaggtggccccggtttcccgccacctcctccacagcaccatctctttgaaggtttcctcctgtttttgttttttttgttgttgctgttgagacagcgtctcactctgctgcccaggctgctggagtgcagtggtgtgatcca

SEQ ID NO: 273136 - DNA, 470 bp, Homo sapiens
tgtatatcagatgtataattcctatctctccctccaaatgcaattgtttccagcaagacttcctctagtctctagagtcggcaaagctaatacagtccttcaaggcctcatagcaccctataaattctagtgccatgtgatttaccatcttctactgaaataatatgcttatattctccccaacctaaattgcaaaagaggtagggtgttgtatttatcttaaaacaagtgcctgatgacagagagggctcaataaagatttattgttagaaaaattattagacatgtgaaaacagccaccctagtcgattgtcaatcattttaaggagaaaaagctggtccaagatataattcttggttgaagccacattgttcaactttgtagaagaattgcattgttatctgaaggtgactgtgttttggagccttgatgtaaatatccaaaataaaaactgcatgtttataaagta

SEQ ID NO: 273137 - DNA, 461 bp, Homo sapiens
agcaaatgttcctcccttgatgacagacctcttcatttcctcatggagaaaggtcatagggaatctacagacaaagtcagggtttctcttagaataagcttttgattaattctagctttgaattcacgttttgaccagctaaaacccttggagggatttctgttgctgactcttggaaaaaagtttgtcaaggtggcacctcttactttcatctaccaaactgaagggaatgaggctgaaagaatatgctgaaaaatctacttgagcccaggctgcatttttttttcctatcaactttatacatttcatgccttgtttcttaaaagaaaaaaatactgtaggtgaactttacaatgaatgctctgaacaagtcctttaaatgactctataatgagaaaactcttttgtatgaatttgtgaagttcacagtcaatgctgatcaataaattctgcacaagtta

SEQ ID NO: 273138 - DNA, 284 bp, Homo sapiens
cggaggaacaggatgatgagatttttctttaggggaagatgacggcagcaataagagtgttggaaaagtcaccctgaacaacttttgtaggtaacttaagggcagaaaaaaggaactctttatttttcaagtggcatcatggctatcacagctcatcagtgcctggaacaacacctttaataatgtcaataggaacgcttcgaactgctgcagaaattctgcttcctgaatgtttgaacttaccctcccatttaatctttaaaccatcccttcaagagagggag

SEQ ID NO: 273139 - DNA, 169 bp, Homo sapiens
gacggagagaagatgcccccattctagagagctgcagaggagcctgtgtcctcccaggacagtaggatggtgaaaggatggtccagagaagagagatggatatgagggcttaggatatgaggaaggtgggagatggaaccattaggacttgacactggggataaggcat

SEQ ID NO: 273140 - DNA, 845 bp, Homo sapiens
gcctatagtcccagctactcgggaggctaaggcaggagaatcacttgaacccaggaggctggggttgcagtgagccgagactgcaccactgcactccagcctggccaatagagggagactccgtctcaaaaaaaaaaaaaaaaagaaaagaaaacatagttacccagcaattccacttctaggcatatacccaaagaactcaaagcagggactcaaacagatacttggacatgaatcttcatagcaacactattcataatagacaaaaagcagaagcaactcaagagtccatcgatagatgaatggataaacaaaatgtggtatatccataaaatagaatatcattcagccataaaaggaattaagttctgatacatactacagcatagatgaaccttgaaaacattgtactaagtgaaagaggccaggcagctaaacttccaaagactaatatacaattccactgaataggcaaattcatagacagaggatagaataaaggctaatgaggggtgggggagaagagaatgggcagttattgctaatggatacaaagtttctgttggggatgatgaaaaaattgtggaactggacagtggtgatggttgtaaaacacggtgaatgtacttaatgccactgaattgtacacttaagaataaacttgtaaattttatattatatatactttgccacaataaaaatttttttaaaaatgtctaagtgtgacaaccgaacttctgtgttaggataggaagaatacttatgaagtattcttgcccctgaaatgaaccaaaatctaatcaagtctctagaataaacaaccagttcacaggaaatccacagat

SEQ ID NO: 273141 - DNA, 927 bp, Homo sapiens
gtcaatattttggtatgtgtccttctagtcttcccctctatagtgaatgataaatttaaaacgaatcatcacttctatccctatttctgtactaagatatcaaaatgtcgacaaaaggtttcagatagctcttcttggaaacatattttttgaacgtaaaaaataaaaacaaaaaaacagaagaggaattccacctccaaatgttttatatgccatctctattactgatatcaaggaccacctgaatctggtgaaatcctttcgacctcaatgtccacgtatagttagtactgtttccacactatatgtggcaatggtaacatactgaaaagcatgagaacttgagcaacagacaactgtatattaaatgaccacccatgatttcttttaaaggctgaaaaatctagttttgtcatcaaccatgggcctaaataaagtttgacccagaattcataacgaataaaagaaaaaaagaaagcactccaaataggtacaaaatggctctaactaaaatatctactaacaggataattccccagattttctttggtagaaatatttgcttaaaagtgtatttctaaagtacttctgtagctttctataaactagtgtcaatattgaagtgtggatataggccgatttttctttgtacaccttcactaacctataataaatccttagaagctatcaaaaagagattactcttttaaaggtcccatctggagtaaaattccatgactacaatagtcattctcgctacgctttcttataatttctaaagtaaatctagtagttactcaaataacatttttcctctttgagttttttttttttttttttttttttggacagggtggcgctttgttgccccaggcgggtgtgcgggggtgtgagtgatggccccccgcattggagggggttcccgac

SEQ ID NO: 273142 - DNA, 445 bp, Homo sapiens
gacagggtggcgctttgttgccccaggcgggtgtgcgggggtgtgagtgatggctcactgtagcctccaatcctgggctcaagcaatccttctgactcagcctctcgagtagctgagactacaggcatacaccaccacatccagctgatttttttatttcttatagagatgggggtctcactatgctgcctaggctggtcttgaacttgtgggatcaagggatcctccccctttggcttcccaaagtgttgcaactacagtcacgagacagtcactgtgcctagctgaaatatttttttaaagggagtaggggtaaggaccctgaccatcaagactttgctgaaatcctacccctaatgcataaaacaaaaatattatagaaaaatatctaggcctttgcgccactgcactccagcctgggcgacagagcaagactccatctcaa

SEQ ID NO: 273143 - DNA, 313 bp, Homo sapiens
ataatataaaacctatgatcttagtcaacatacacacctcccagaagacagatcccctctctttgctattaaattgtgttctgggcatgcaaagctaaagggtagcctctgtgacactatggtttgagttttcccatgacttaacccaagtgacacctacatcatcattgctactgtcaatattgtcagtaggcttttagcctatttggaatttataaaagtaaaaaatgtactaagctttgtagagtaccagggtcaaaaatatatttttaaatgattgttttaataaaagcgctatgaaaaattcaactca

SEQ ID NO: 273144 - DNA, 367 bp, Homo sapiens
ctgtatatggaacactaagataattaaatgaacctcataccaagaaaattccatgtcacatctgtccttttaaaaacctccatgaggctgggcacagtggctcacccctgtaatcccagcacttcaggaggccgaggagggcagatcacgaggtcaggagaccgagaccatcctggctaacacggtgaaaccccgtttctactaaaaatacaacaaattagtcgggcatagtggcaggcccctgtagtcccagttactcgggaagttgaggcaggagaatggcatgaacccgggaggtggagctttcagtgagctgagatcgcgtcactgcgctccaacctgggcgacaaagtgagactccgactca

SEQ ID NO: 273145 - DNA, 217 bp, Homo sapiens
ggctgttctaagcttgtttctgtgagtcacctggggcaggaggcagctgacaaggatcttgaatgtctgctcttgttctctctggtggttttgggttgaatagtttctgctctaactatgacctccagtgcaggtgctctggaagttaaatccagaaaagttaaagcccaaaagccccagacctcacttggaaagtaagaaaaacacatgggcatta

SEQ ID NO: 273146 - DNA, 288 bp, Homo sapiens
cccaaaatgactgtcagagaccagaacataccatccaaaaatgactgtcagagaccagaacatagcaccccaaaatgactgtcagagaccagaacacaccatcctaataaatgtatgcctttttggcataaggattattttgagaaactgaagatataggagaagctctgaaaacaagttgattctcttctataagagagatctatgtttataaaggagtcctccatttgtaagggtggctcctctctgcacctggaagaggacggctctcgtcactggaaaccccat

SEQ ID NO: 273147 - DNA, 463 bp, Homo sapiens
ataatctaccccagaggtcagccaaactactgcctgtgggccagatgtgatgtactgcctgtttttgtaaataaagttttactggaacacagctacacccatttgtttacatgtggtctctggctgctttcatgatacaatggcagaggagagtagctgcaacagaaacgatacggcccacacagcaaaaatacttactgtctgaccctataagaaagtttgccaacccttgatctacaccttctaattactttttggtcatacattttctttatgctgtgtttatctctaatcagaaatttaaaaaatttattttctcttagtactttgtatatttaagtgatattaacatatttgttataaagatgtctgataaaattcctcacacccatttaagataaaaatgtgatctgtatatattttctcagagatttcgcaaaattttaagtgcactatacaattg

SEQ ID NO: 273148 - DNA, 367 bp, Homo sapiens
ttaaagtttgtggaatttagacataggcttccttgggatctataaattgatattcatattggataatgttcttcattgagaaagagacaccatagacccacgtccaatgaagtttcggggttgattttcaaaaaatggtaataaatatgcaaaaatctatctatcctctttcaccccaaacttcctggaggcttgtgggttctgggtcctcagaagggtgtcagttttattgtctacaataaggttaaaactgggcacagtggctcaggcctacaattccagcactttgggaggctgaagtgggaggattgtttgagaccaggagttcaagactagcctgggcaacctagcaagactctgtctttac

SEQ ID NO: 273149 - DNA, 287 bp, Homo sapiens
cccaaatgttatcactcagagaagtccccctccgcaaacttccccacttaagtgtgctctgtgcccaggccctgggctaagcacgagatgtggaaaactgaccaagacaaaaaacagtcccaggccaacctgacctcacagtgtcaggcattaagcaagtaaccaagctgcccgcatcagcaataccttctggcccctgatttttctgtctctgcgatttaccttgccctgatctagcagacttaaagggatcagtttttggggctggcacggcctgagaggtcaaa

SEQ ID NO: 273150 - DNA, 456 bp, Homo sapiens
cagagggatttagagcaggcgttaagcttgaagctctgaagtctgctgtgagaatgaaatgagatagcaaagctgtgcctgaagtcatgtctaccctttggactttctcttcaatttaagtcattttgagtagtgtttctgcctcttggaatctaaaggatccacatgaatgtaatgaagttatgtgccaggtgctatgaggcgatgagaaggaagaagagtatgtaccactgtcttcctggaggaagtgacacaggacctgagtcttgaaagcccagtaggacttagccagctcaagggattctgagcagagtgagccacataagaaattacgtaggagcatgacagtttgtgccgtgttttggagatcaatgcagttcattgttattggagtgaggttggcagtagtggaacattaggtggatgaataaatgtcactatctccgtccccaaaat

SEQ ID NO: 273151 - DNA, 534 bp, Homo sapiens
agtgtcgaggcgagcccagcgcacgtgacctgactcactgccttgactcagttgccgtcagggaactcccactaacagggtcaggctgttcaactgaagaaccggatgggaacgcggctcggcccccagcgcctgtgacccatgcccgccgggtgggcacggcggcgggcggcgtgggctctgacaccctcctgctcgccgcgctaaggaactccactggccagcgcgtcctgccgcggcgcagggccgcccaagtcaaggaaccctctcgggtctctgagatccaggccaacagtaaacagagcgtccgagacgggtggccggggcgggcaacccggccagaggtcacgcccgacgacctccgacctctccaagccgggtggggtcttggcctgctccgggggcctgagcgatgccgggtgtgcccgcgtggccagggctgggactggagcctgcccaggaggacagggaggacgcgaggccctggcgaccgaggggctgaggggggggatggggccaggccgccggccgggc

SEQ ID NO: 273152 - DNA, 332 bp, Homo sapiens
ggggaggttggaatcatctgactcccgtcttgactgagtctggcagccaacatggatgttggctgggacctcggtgaggactgctggcaagaacacctacacacggccttttcctttgactgctggccttgctcacagaatggtgaccgggttcccagtgtgaacccaggtacaggaagagacaggaaacggaaactgccagtttccttaaaatctgggcccactaactagcatggcatcatttccaccatcttctattagtcaagcatcacgaagcccatattcaagaggagacaacctagacccagcctctcaataaacagtgtcaaagg

SEQ ID NO: 273153 - DNA, 585 bp, Homo sapiens
agcttggctaaggtgaaaagggacttgctggagaggtacagcagaatgggatgggattagaaaacaacaatctattaggaaagatgaaaggaaggaattccccagtgttcacgctgagaagtcttcatattggaccagtgtgagggggtcttttatactgaggttttaaaaacctgacttcattttgtcctgaatgtagaagtgaagaaggacactagtttcaggcacctgggatggtggaaaagtttattcaactgaggctttccatgcattgggttgaatagctgagggaagctgaagactcttatctgaaaatatgatctgaaaatatttattgtataggaagacagaatgcctgatttctgaagttttcttgatggcccaactaaagaagaaaggcaccaaatcctcactttaacaggtaaatggagatcctgagggctggatacccaagagccaccattttacggattcctcagatttaaaaatgtctcagatagatatttccaaattctatttctattagcctctgtggataaagagttcctgaaactctggttttactttttttggaaaaaaaaaaaa

SEQ ID NO: 273154 - DNA, 377 bp, Homo sapiens
aactacattggtcctagcaaaacttttaaatagaaaagaaattgtataaaaaaatcagtaatcctttaatctagttccagatcttaagtgtactttcttcatgaccttagataaatcatttaatagcatggttttggggcatctgaggttaatctgcaaaggttaacatcactgttaacttctatctctatgcccttgcatacagcaaagtggcttgtaactcctgtaagattcagttcctcatatacaaaatggggataaaaataaatgcccacctaatagtgtcactgtgaacataaaatcagatagtacatgtgaagcacttaaaggggtatatactaattgctcaataaatgtcagtcttgaataatcttggg

SEQ ID NO: 273155 - DNA, 1354 bp, Homo sapiens
ttgtttacaaaaacaggcggcaggctggggttggtggggcttgtgtttaattaacgcagcacacaaagtcttatgacgtcgttttactcttttctctcaggaaacaattctggtgaaatgtgatcgtcctggccaccctctgattgataagacatatcattttgaaagatatactggccttcccagctgacatggacctcaggtcagcttcagcgtgagaagcaggccaggcctgggtctggagccgtcctggccttcccagatgacatggacctcaggtcagcttcagcgtgagaagcaggccaggcctgggtctggagccgtcctggccttcccagatgacatggacctcagggtttatggtccagcagagtctcagagcgcggtctttggagatgtgtgccccctactcacttctctcttggatgggtacaatgtttgtgttatggcgtatggacagacgggcagcggaaagagctataccatgctgggacgccattcggacgacggccctgttctgccgcttgacccacagagtgacttaggaattatccctagagtggctgaggagctcttcaggctcattttggaaaatacctcaagaagcccaaaggttgaagtctccatagtggaagtttacaataatgacatttttgaccttctggccaaagacagcattgcagcagtgtcgggggtcaagcgtgaggtggtgacagccaaggatggacggacagaggttgcgctgctggcctctgaggctgtcggcagcgcctcgaaactgatggagctcgttcatggaggtctgcagctcagggcgaagcaccccaccctggtgcacgcggattcctccaggtctcacctgataattacggtgactctaaccacagcctcctgctctgacagcactgcagaccaagcctgcagtgccaccctccccagggagcaaacagaggcaggaagggcaggaaggagccgcagagcttctcaaggggccttggctccacagctggttcctgggaaccccgcagggcatgcggagcaggtgcaggctcgactacagctcgtggactcggccggcagcgagtgcgttggaggcgatgcgaagttactggtgattctctgcatttctcccagccagaggcacctggcacagacgttgcagggcctgggtttcgggatccgagctcggcaagtccagcgaggccctgcccgaaagaagccgcccagctcccaaacggaggggaagaggaggccggattgaatgcattaacaagtttttctcctaaaactgtgtttcttgtccttgctttataatgcatatgtgcttagaaataaacaggtttcacgtggactc

SEQ ID NO: 273156 - DNA, 1510 bp, Homo sapiens
ttgtttacaaaaacaggcggcaggctggggttggtggggcttgtgtttaattaacgcagcacacaaagtcttatgacgtcgttttactcttttctctcaggaaacaattctggtgaaatgtgatcgtcctggccaccctctgattgataagacatatcattttgaaagatatactggccttcccagctgacatggacctcaggtcagcttcagcgtgagaagcaggccaggcctgggtctggagccgtcctggccttcccagatgacatggacctcaggtcagcttcagcgtgagaagcaggccaggcctgggtctggagccgtcctggccttcccagatgacatggacctcagggtttatggtccagcagagtctcagagcgcggtctttggagatgtgtgccccctactcacttctctcttggatgggtacaatgtttgtgttatggcgtatggacagacgggcagcggaaagagctataccatgctgggacgccattcggacgacggccctgttctgccgcttgacccacagagtgacttaggaattatccctagagtggctgaggagctcttcaggctcattttggaaaatacctcaagaagcccaaaggttgaagtctccatagtggaagtttacaataatgacatttttgaccttctggccaaagacagcattgcagcagtgtcgggggtcaagcgtgaggtggtgacagccaaggatggacggacagaggttgcgctgctggcctctgaggctgtcggcagcgcctcgaaactgatggagctcgttcatggaggtctgcagctcagggcgaagcaccccaccctggtgcacgcggattcctccaggtctcacctgataattacggtgactctaaccacagcctcctgctctgacagcactgcagaccaagcctgcagtgccaccctccccagggagcaaacagaggcaggaagggcaggaaggagccgcagagcttctcaaggggccttggctccacagctggttcctgggaaccccgcagggcatgcggagcaggtgcaggctcgactacagctcgtggactcggccggcagcgagtgcgttggtgtgtctggagtgaccgggttggccctgagggagatggcgtgcatcagccgcagccttgcggccctggcaggcgtcctgggggctttgttggagcaccgtggccatgccccgtaccggaacagcaggctcacccacctccttcaggactgcctcggaggcgatgcgaagttactggtgattctctgcatttctcccagccagaggcacctggcacagacgttgcagggcctgggtttcgggatccgagctcggcaagtccagcgaggccctgcccgaaagaagccgcccagctcccaaacggaggggaagaggaggccggattgaatgcattaacaagtttttctcctaaaactgtgtttcttgtccttgctttataatgcatatgtgcttagaaataaacaggtttcacgtggactc

SEQ ID NO: 273157 - DNA, 835 bp, Homo sapiens
ccgtctagatgggagtgataaggaccaagtatccctgggagaagaaaacagctctggtagcagatcactcaagcccgggaggtgtaggctgcagtgagctatgatggtgccactgtacttcagcctgggcaacagagaccccatctcttaaaaacaaacaaaaaaaagctctaagatctagtgccacctcctacaggtaggcacccggcgttctaggtaccctgctagaccagcccttccctgactccaccctgctgtagaatgatggcctctttctttctcttccaccaggctctagggcttggcagaggaaggggcaaggtatctctgcatcccttggacccagccacaccccaacacagagtgaatgtttcctaatgccattccctttccacaactccactccacgagagagaagtgacttaagcctgctaaggagcggagggaaaagttcaggaaggtttcagcgtgctatcattagcgctatcattagctcttgaggactgaataggaatttactaggggtgggtgggggagaatattccaggcaaatggaagagaggtagatacaaaggcacagaggtatgtagggaacaataagggaaattgtgtatttgctgggggagggctaaagatgaggattcaaggccaggagcagtaatcccaggactttgggaggtcgaggtgggaggattgcttgagcccaggagttggaggctgtattgatctatgatggcgccactgtgcttggccaatctagtaattatttaaagtacttcctgctattctaaaaaaagtttattcccatctccatgataaatggcgggtcatttca

SEQ ID NO: 273158 - DNA, 501 bp, Homo sapiens
ccgtctagatgggagtgataaggaccaagtatccctgggagaagaaaacagctctggtagcagatcactcaagcccgggaggtgtaggctgcagtgagctatgatggtgccactgtacttcagcctgggcaacagagaccccatctcttaaaaacaaacaaaaaaaagctctaagatctagtgccacctcctacaggtaggcacccggcgttctaggtaccctgctagaccagcccttccctgactccaccctgctgtagaatgatggcctctttctttctcttccaccaggctctagggcttggcagaggaaggggcaaggtatctctgcatcccttggacccagccacaccccaacacagagtgaatgtttcctaatgccattccctttccacaactccactccacgagagagaagtgacttaagcctgctaaggagcggagggaaaagttcagggccattcacgcctccgggccatcacgcctcctagccattcgacg

SEQ ID NO: 273159 - DNA, 400 bp, Homo sapiens
ccaggagttcaaggccagcccgggcaacacagtgagacccccatcgctacaagaaatttaaaaattagctgagtgtggtggtgcgcacccgcagtcccaggtgcttgggaggccgaggtgagaggattgcttgagcctaggagttcgaggctgcagtgagctatgatggtgccactgtacttcagcctgggcaacagagaccccatctcttaaaaacaaacaaaaaaaagctctaagatctagtgccacctcctacaggtaggcacccggcgttctaggtaccctgctagaccagcccttccctgactccaccctgctgtagaatgatggcctctttctttctcttccaccaggctctagggcttggcagaggaaggggcaaggtatctctgcatccctt

SEQ ID NO: 273160 - DNA, 468 bp, Homo sapiens
aagagaactaaaggtttataagagaaccagaagttggttctctgtgataatgtagttctgacccatgccactggcctatttttggaggtcaagcggggaggagctaaatactatttttctctccttgttcaaaaaccttgtcatgaagcctccgagatgagacatcagccagggaggactagtcctccatttcccccaacacccaggcgggtatttttatttaatatctgcataagcaggcggttgcttggtgcctgcacgtgtcgcccagtggtggggaaagcagaagtgtgtggctcaacggctccaggcgccttctgggatacttggttgcctgttgttctgggtcacagcaatggcattgcggccagggccgtgctccggcagctggcttagagggacagatgggtggggctgggtgagggtgttctgctggccagcacagacactttcaaccagggtcccaag

SEQ ID NO: 273161 - DNA, 403 bp, Homo sapiens
aggtgaaagtaattctatgttttagtttattaaatagaatggagttcttaggtgaaatgaaagtgatattccaaaaagaagcccagaaaatcaaaacaatctaagtaatgagatcaataacaataaaaaaaatgtggaccctacctccattaattatttattacatctttggttttgctccagtcagtctttctaaaactcatgctcatttttgagtggtgataatacaagtatttacctggtagagatgtgagtgttaacatgaaactcacgtgacagttaacatgcataaagaacttaagtttagcacagagctcgttacatagtaagagtttaatgatgccccatgcatagggagaaactgctgaacttcacaatgatagcactgatgaaatgttatatt

SEQ ID NO: 273162 - DNA, 275 bp, Homo sapiens
agcaagcattcttttttttcaaaataaattaatccttactctggtggtttgagattatgcactgtattatacaacagcgccttatcaagcctcatcagtgaagatggaattcatgtctgtaaaatgctgcaggcaatcacagtttcatattttatcatgttgataaggatatcgcacattctctgaagcatttcaaaacacttaaatgaaaaaggagaaatgcaactaaaaggctttttatatggtttgttgtgggttattatgagttatttata

SEQ ID NO: 273163 - DNA, 449 bp, Homo sapiens
acactgagcacccttatgccaaatgcattaaacattagataaaatggatgaacacctagaaaactaaaggaaaccagaactgggtcaggcaggaaaagaggctggatgtgatgctgcatgcttgtagtcctagctactgggaaggctgaggcgggaggatctattgagatcggaagttagaggctgtagtgagccaggatcaggcctgtgaacaacgttgcatctcagcctggacaacagggcaatacagagagacttcctctcaaaaacaaaacaaaacaaaacaaaacaaaaagcatgagtagccctatcaaccaataatgaaactgaattggtatttttcatccttccaatacaggtaacaccaaagccagattattttacagagttctcccattattcaagaaacagttaattacagtcttacacatactctcccagaaaatgga

SEQ ID NO: 273164 - DNA, 685 bp, Homo sapiens
tttaggccaaaacaaggtctggttgtctttattatgctgtgattccccacctgttaatgaaatggacctgcagttagagggaaactccagctgggtgaataatcaccaacaggagctaaaacatatggtttggcttcttacatcaggggccatgctcaaagccatggggcagacggggtgcctctccctgaagaggtaatcattacatgtactcggatttggggatgagaggggagagaatacatttttaatatattaaaacaaaattggataatggtgctttggagactgatccagagatttcaaagaaggctgcttcagcttatggggtgggggagtaaaggttctgctgcctttaggagcaattctggcaagtcagagattcactaggtcaagttttttgtattcggccagttaatcctattttttttttttaggacggtaagtgttttcaagttacttattcaaaggtcaagtacttttacccatactatggtcttatatcatgctgtccaaggatggtgaactcagtatgaaagttagaggctgttcatttcctttgttctttatcttagaaatcggttaactttctaatttttgtttacatagtaatagactttgttgatcttactccactgtaacaacatttattttaaataaacttatcagagacttttcttacctc

SEQ ID NO: 273165 - DNA, 480 bp, Homo sapiens
ccttatctttgtcacctgattttcataccactttcttcaaaagacagtggctagtttatctttggtatttgtcttgcaaaaggactttgtgtgtgtgtgttttacttttaattaccaaaaatttcaaacttaaaaattgagaggatagtagtactctgaacccccatattctacctagtcattcatcaactcgtggccactgttgtttcatatgtattctatccataactcccatcctgggtgataagagtgagactgtgtctcaaaaaaaaaaaaaattatttactgtaaaatagaaataatgatatattctttgtagggttgttgtaaagataaagatgtttataaagtctctggcacaaaataggtcctcataaaacaagagctcttttttcccctggaatctattgatacagtttaattcagcaagtatttattagcatttaatctgtcctagactctgctgaggatgctgaagag

SEQ ID NO: 273166 - DNA, 295 bp, Homo sapiens
agcacactttccaggctgagcatttccttttgtgcatcctctccaagccctgaacttactccagttggcctcttcagaccaagctctccctcccagtggcctctacaggccaaaattgtcctcaggtcagcctctccagggccaactcctagctaccggtggcttctgcaggccaaaatcgacctcaagtcagcctcttcacacccagctcttgcctctgagtggcctctccaggagcaaaactttctcaagtcggcctctccaggcccagcctcctgcttcccgagggcatgta

SEQ ID NO: 273167 - DNA, 491 bp, Homo sapiens
cggaagccaaggaacacccaccacacccctccccatgctccgtgcaggatgtcctgtgttcacgccagggcaggcacaaggaaagtcagcacggccccatgttcccagcagctcagtctcacctgtgagtggcaggagtgcgaggtgtgagttggatgagggctttggaccccagcgctaaggtgggctacgtggagctcccaggatgctggggtcacaggccccagtgagcctgctgaaattgtagcagagactgtaatattttatctagactacaagacataaatttgctgtgtgttcttgcactaccaactttaataataatgtctttgcatgccatctattctctcatgggcaataacacagatacaaacggtcctgagtgctcagcgctgctgggttttggggtctgctttaggggaaacatttccaaaacctgccgtccggtgcgtttgctcttctgaaaaacgtccccagaaccagcggccgcc

SEQ ID NO: 273168 - DNA, 222 bp, Homo sapiens
aaaataaactaatcattctttgttccctagacacacactttactatttttacatttcatttggtattgaccctaagcttcaggacttgtatgtagggaatctatttgacatttctatttcaaaagctttcacacgagagaatgaatcattcacacttaattcctgaagataagattccatttgctttaactcttaatttggttgcattatattctactacta

SEQ ID NO: 273169 - DNA, 995 bp, Homo sapiens
ttaattattagatgtcagtgctagtttaacttattttaaacgtttcagatatttatttaattatactttaagtgtctcatgtaaaaaagttatttataaaataatttatagggttagagtcattgcccttttaatgcaacaaataaacagttttttaaaaacctgcatgggggccaggcgcggtggttcatacctgcaatcccagcactttgggaggtcgaggctggcggatcacgaggtcaggagatcgagaccaccctgattaatgcggtgaaatcccgtctctactaaaaatacaaaaaattagccagacgtggtggtgggcacctatagtcccagctactcgggaggctgaggcaggagaatggcatgaacccggaaggcggagcttgcagtgaaccaagatcgcgccactgcactccagcctgggcgacagagtgagactccatcgcaaaaaaaaaaaaaaaaaacctgcatggaagcctagtatatttattaataacaaataaattatactttagtgtactattaacctataccaattttaagttgtgattagggaatggggatgtttttaagctgaattgtcttgctgcggaactttccttttttaataagaccatattatgactctgaatgctcaagggtaagtctaaggcctcattgctgttaccaggagatttttctagttacagtaataaagatgttaattcacatgcatgcagacaactgaaactcaagtggagaatttgtttgtgaacaagtcatactacttctgttatttgcatgaatggaatctgcaatatctttttccatgggagaccctaaaagaaaaccctggatcagaatgatctgcagtttcagataataaaggcttttaagagacatttttagaattaaaaatatgctaattttattaaatgaaaatatttgtaactgttaactttctcactgacaaagcaagtttctcaataaaatacctattttaacttgca

SEQ ID NO: 273170 - DNA, 2566 bp, Homo sapiens
ttaattattagatgtcagtgctagtttaacttattttaaacgtttcagatatttatttaattatactttaagtgtctcatgtaaaaaagttatttataaaataatttatagggttagagtcattgcccttttaatgcaacaaataaacagttttttaaaaacctgcatgggggccaggcgcggtggttcatacctgcaatcccagcactttgggaggtcgaggctggcggatcacgaggtcaggagatcgagaccaccctgattaatgcggtgaaatcccgtctctactaaaaatacaaaaaattagccagacgtggtggtgggcacctatagtcccagctactcgggaggctgaggcaggagaatggcatgaacccggaaggcggagcttgcagtgaaccaagatcgcgccactgcactccagcctgggcgacagagtgagactccatcgcaaaaaaaaaaaaaaaaaacctgcatggaagcctagtatatttattaataacaaataaattatactttagtgtactattaacctataccaattttaagttgtgattagggaatggggatgtttttaagctgaattgtcttgctgcggaactttccttttttaataagaccatattatgactctgaatgctcaagggtaagtctaaggcctcattgctgttaccaggagatttttctagttacagtaataaagatgttaattcacatgcatgcagacaactgaaactcaagtggagaatttgtttgtgaacaagtcatactacttctgttatttgcatgaatggaatctgcaatatctttttccatgggagaccctaaaagaaaaccctggatcagaatgatctgcagtttcagataataaaggcttttaagagacatttttagaattaaaaatatgctaattttattaaatgaaaatatttgtaactgttaactttctcactgacaaagcaagtttctcaataaaatacctattttaacttgcattactgacatcttttctttgagtaatctgaataatgcagaagccatcatagaggtcttttctatacattctcaatgttttcttaaatgggtttcctgagttctgttcttcatgactctgggctctgcaaacagggtttcccaattacgcattctataaacacttttatgaatgagtcaatatgacattgagtccttttcatacatttcatcatttccaatatgtagagtgacagctagaaaaatgataaaattttgattaaaacctatctctttttcttcagcatagtcaattgttttcttaactctcaatgagtaactccatgcctagcttgtgcttagctttcaatatttttagactaagacaaagtgtatttggcattttgagaacaacaattaatggtcagtaaatttctaaagcaagaaaaatgtgaaactagtgttttatatgtttgttacgcagcagaatgcggctcttagtgtttgccccttcatatctcatcatgtaaaatattaaattactttaggccactgcacataggtagtcctgtcatgagtgatggctggagaaaagttcaggatcataaatgttatcatcattcttcaagaaaagatgagattataaatttctgcaattggtatgataaaaggttgaaataattaatgaaaaagaaaacattagctctgtagacctgttttgggcacactttacaagaagaaactaactctccaaaattctaggctatgtagttatttctaaagcaaaacttttgattcatgattaacatatataagctggtgttttcatcaaagatcaaacaaaatagccttgtctagaatactcgtattattcccctggcttattaagtaatggtaaataataccagtatctaagaggtgacaggttgacctgagacttatcaaaggataccaagttgtgcagatagattgtctagctagtttcttcaactttacatttctacaggtagagaagagggctgtgtaaattcttcccatcagtacttgaatattcatttaacaaatatgtatcgagcatctagcatgtgccagacacaatctgaacactgagcacacaacagtgggaataaatatgattcctatctgcatggagcttctattctgtgaaaaacagatgttaaacatgattgacctgtgaccaggatcacctgtgcctccaagagtattagagagaccttctggtgtgaggaaaactcccctgaggaagtcatattttagcaaaactctaaagggtgtcaagtattacttatataaaagggagcacatggaatgaatagtgcaagcagacaaatacggccatgaggaaggcacattcaaggacatgaaaaagcagcatagtagaaacctaaaaaacaacggttgaaggtgtaataagatataaatgaggcagatcagtgggatccctttggtatttaaagaggtttaggctgggcacagtggctcacgcctataatcccagcactttgggagggcaaggcaggtggatcacctgaggtcaggagttctagatcagcctggccaacctggtaaaacc

SEQ ID NO: 273171 - DNA, 1282 bp, Homo sapiens
acacggtctcgctctgtcacccaggctgaagtggcagtggtgcaatcacaactcactgcaggcctccaacctctagggcttatgtgatcctcccacctcagcctcccgagcagctgagactaccggtccattgccaccacacccgataatgttttatatgtttgttacgcagcagaatgcggctcttagtgtttgccccttcatatctcatcatgtaaaatattaaattactttaggccactgcacataggtagtcctgtcatgagtgatggctggagaaaagttcaggatcataaatgttatcatcattcttcaagaaaagatgagattataaatttctgcaattggtatgataaaaggttgaaataattaatgaaaaagaaaacattagctctgtagacctgttttgggcacactttacaagaagaaactaactctccaaaattctaggctatgtagttatttctaaagcaaaacttttgattcatgattaacatatataagctggtgttttcatcaaagatcaaacaaaatagccttgtctagaatactcgtattattcccctggcttattaagtaatggtaaataataccagtatctaagaggtgacaggttgacctgagacttatcaaaggataccaagttgtgcagatagattgtctagctagtttcttcaactttacatttctacaggtagagaagagggctgtgtaaattcttcccatcagtacttgaatattcatttaacaaatatgtatcgagcatctagcatgtgccagacacaatctgaacactgagcacacaacagtgggaataaatatgattcctatctgcatggagcttctattctgtgaaaaacagatgttaaacatgattgacctgtgaccaggatcacctgtgcctccaagagtattagagagaccttctggtgtgaggaaaactcccctgaggaagtcatattttagcaaaactctaaagggtgtcaagtattacttatataaaagggagcacatggaatgaatagtgcaagcagacaaatacggccatgaggaaggcacattcaaggacatgaaaaagcagcatagtagaaacctaaaaaacaacggttgaaggtgtaataagatataaatgaggcagatcagtgggatccctttggtatttaaagaggtttaggctgggcacagtggctcacgcctataatcccagcactttgggagggcaaggcaggtggatcacctgaggtcaggagttctagatcagcctggccaacctggtaaaacc

SEQ ID NO: 273172 - DNA, 774 bp, Homo sapiens
gcaggaagtatctgagcggtggttccggtacaaccctcgtctcacctgcatctattgcgccaaatctttcaaccagaagggaagcctggaccgccacatgcgcctacacatggggatcacaccattcgtctgccgcatgtgggcaagaagtatacccggaaagatcagctggagtatcatatccgcaagcacacaggcaacaagccctttcactgtcatgtctgtggcaaaagtttccccttccagactgaaacatccagggggagggggctgaccctcttcccctatgagccataagcagccagcatcagagccatgggctgatacttagattcacaaaatgccacatcactaggccagaagatgctcccaagatgttgccaaactggaggatcagcaacttacacaaaagcactaaaggctcctcccttcttattgcccgcctcacactttggaaaataatcaagcaaatcaactttctaattcagggatcaacagccttggtttgttaactttataagaaaaaaggttttttaacaaaacgatgatgataaatggtcatttatctatcagtcatgtttgaacactgtactttggtccatatcatcttggtggctataattgcccggatctaaaaaatgcagcaggagcctcaaccatccgaagcagccaaccgcaagagaggaggtagtcatgatggtgatgaggaggagaaatttctcctcttccttccctggcataacatgcatttttgtgtttcaagaaaaaaatgaa

SEQ ID NO: 273173 - DNA, 450 bp, Homo sapiens
aacaccacctctagcatgaccatatacacagttgccagaaggggccccttggtctgccctctcccctggcattgtggtgaatgcctgcagggagggaggcaaccaatagcatgctactacagctcctgctacccctgctgacatgtgacaataagaacagatcctgctgccaccaaaatacgaaacgttttggctgacataacccatcagagtgtactgcccaggagatcaggagcaccttcaatccccagcgcagtggattcctaacaatcaggagacagagaacaaagccagggccaaatacaagtcctacagaattacagcaggcagtccaggagctgggaactgagcattggccccataaaatcttgtagaattgaagccagtcagctgctaccttcatgttataccaaaatgaaaccctcaaagtcatcaaatagtataaaagat

SEQ ID NO: 273174 - DNA, 1084 bp, Homo sapiens
caaacaggagatgttggcggatgctgtccattgacagggtggttggagaaatgaggatggtgtgctcagagaccccaccacccctgctagaaggaaagttaagtttggatggaaggggaatagagagaagtcttaagacaggagctgtcaaactatgaccagcagtagttgggacccagctacacttgctcacagatgccttgtctgtgggggactgtgtggccagcaaaacccagaacattttgacccttgacagacattgccaactctgccttagagcactgtgctgcactgaccacaggagtgaaaaggccacacttggagcccacatagcaggtcccccatggcctggtggtatggacgagtggggaggctttctgctgcccccactctccccactcagatccttcttttttttagttacttaagaatcatcatttagcatgagtgtgttaaatgagtttatttcagcacatttcagtgcatctgtgactcaccctagacattcagtgctctacgtgtgcccaggctggatgcctgtgcaagaagaccatgttgtttgtgacatgggtggtcactagttttatgttttagtgtctgactttagctctgtcttcctttcctttttttcccgctgctattgcattattcatttttccttttcccccagtttgctgctcattctgtagatacataccttggtgagcctcactggagagctgtggcacctttcagagtggagactggtgggggcagagcttaggaatgggtcaggcacaaagaagtagtgcagacttcttaatatggttggctttttccctcagtgctcagtgtttcaaaggaaagatgcaggccaggcacggtggcttatgcctgtcatcccagcactttgggaggctgaggcaggtggatcacgaggtcaggagatcgagaccatcctggccaacatagtgaaaccccatttctactaaaaataaaaaaattagccgagtgtggtggtgtgtgcctgtagtcccagctacttgggaggctgaggcaggagaatcacttgaacgtgggaggcggaggttgtggtgagctgaga

SEQ ID NO: 273175 - DNA, 408 bp, Homo sapiens
aactgagaaaggctacgtgactaagtgacttctttgtttcaatgctgactaaagctgtgatgtcctttttaatcactttgaaagattcaaattgctttaggaagacaattcatgcatggagctcaccctcccagaactccacacttaatgcccactgaggaaggagagaaatgcatgcaaatatatatcccaatatagaaggaatattctagttcagtaacttccactcctgagcttttatcaaatttttctctatagaattatttttgttttattgtatccaaaatgtcagatatctttttcaaggaaggtcaagggactttgccattttctaagccagaagtattctcacctagtccagtactagtcaaagtttttagtaaatcacttagaatttccttttttaaa

SEQ ID NO: 273176 - DNA, 956 bp, Homo sapiens
ccggcatcccagaatactggcattacaggtgtgagccaccgcgcccagccagttttgcatgttctgagtgggaaggtaatctggagaacgggcagccaggcttccttgttgaatgcgtgagagggagcaggctggtaactaccgcctttgtcaaagaaaggagggtttccttctatattcttcagtccaaccccttccccgctttttaaaaccatccttgagtttcagagttagctcctgatctggtctgcttctctttcaggtccattcacctttgcaagccattctaaggctatcacccattttctttggggtattctttggttctatggagcaaccaaaagccacccttcccggctttgtctgtgagagaggggacacatgtaactagtgccaccgttcactttcattcttgaacgaattgccctaacagttaccccctcagcttctcctgccctttctatttcttgattcagcttggagtttcttcaaggtgctcttgggaaaaccacatttacctttggtaacttgtactgccctttccttctggtttctctgttaattcaaacttgtttctgtcttcttggaattcctccaaatatttgctccattgatgtcatgcatcccttcttgttttccaatgttattgatgcattctttaaaaaattttaaagaggccaggcgcggtggctcacgcctgtaatcccagcactttgggaggccaaggcgggcagattgggagttccagaccaacctggccagcatagtgaaaccctgtctctactaaaaatacaaaaattagccatgcgtggtggcgggtgcctgtaatcccatcagcgactcagaaagctgagggaggagaattgcttgaacctgggaggcagaggtttcagtgagccgagatggcgccattgcactccagactaggcaacagagcgagactccgtctcaaaaaa

SEQ ID NO: 273177 - DNA, 1068 bp, Homo sapiens
tccaacttatacctttattaaaatttggtgtgtgtatccatccaatctctgtttttagagattgttttattatgtgctttaagtccacataaatgatctcatactgaatgtgtcactgtaggattttttcttcaaaattgtatttttgaactttctgtatatatatatttctttaattttaaccattttatgaattctaaagtttatgtatttccccatcttaatatattatttccaattttttgattacaagcaatgtaatctaaaatgtacacttttgtatggttttcttctgtgtatgtgcaatattttgtctaggatatatacctagaagtggaattgctgttatagagtgtgtgatttttcagctttaccagatactgctaaattgctgtctgaagcaaatgtggcagttcacactgctgtctagaattttctcatatccttattagattttgaattgtcagaccctgtgatttttactcttatgatggctgtgatatgcttttttgttttaatttgtacttcccttattatttatggggataaatatatttccacgtttaataagtatttggattttttcttctatcaacaacatatataaatctttgtcaccaaatcagcttttttgaggtatgacttacatgtaataaaatgtgccaattttgagtgtaccattctctgagttttgacaaatatatgaagctatatatccatcaccacaattgagttacaaaacattttcagaaatgctccattgtggtaactgtcttttcccccattgaattaattgtctccgtacattcattgaaaattgattgatcacattaaatatgaatctgtttctggactctattattctcttgatctataattatgtcaataccacactgtcttgattactgtaactttacaataaatcttgaaagtaggtagttctccaactttgtttttcctttttaaaattgcatttctatctaaatgttagggtcagcttattaatttctcaaaaaaatcctgggattttggttgggattatgttggatttgtacatgtatttgggaa

SEQ ID NO: 273178 - DNA, 225 bp, Homo sapiens
ctgtgtgcagtggttttagggtctaatgaggagtaaaacaagatttgttgataacagagaagagttgagagtccagtgggtaacactgacatatcaaggagtagccgatgatgcctggatgctgtttcatgtttagaaagcatcaaaggccaggtgtggtggctcacgccggtaatcccaacattttgggaggctgaggtgggaggatcgcttgagcccaggagt

SEQ ID NO: 273179 - DNA, 767 bp, Homo sapiens
  misc_feature (613)..(613): n is a, c, g, or t
aacaaagagtatgtacatatatgtacatttacatgcaaacataaatagggtttctttgggaaaggaaactggtttacagtggttatctctagggaagggcgcaaggggtcagtagaggtaattttcagactgcttaattttaacatgaacagttttgtttttgttcttgtttttgtttttgtttgagacagagtctcattatgttggccaggctggtctcgaactcctgcgcttaagcgatcctcccgccttctcctcccaaattgctgggattacacgcgcgagccaccacacgtggccatgaacagtttttaaatctttataagttaaagcaaataggccaggtgggtggctcatgcctgtaaatcccagcactttgggaggtggaggtggggagatcgcttgagctcaggagtttgagcttagcctaagcaacatagccaaaccccgtctctacaaaaattaaccagggcatggtggtgcatacctgtggtcctagctaccggacaggctgagatgggaggattgcttgagcccaggaggtaaaggctctagtgagccaagttccactgcactccagcctaggtaacaaagagatatcttgtctttaaanaaagaacaaggtaaatacattatcgtacatcgatctcgaaggtggctaactttacctctctcctcttctggaaacgcgcttccaccgccccccccgcctgggcgcaacaagacagccaacctctgtctccaaacaccacacctctcccctcctg

SEQ ID NO: 273180 - DNA, 185 bp, Homo sapiens
cctccctctttggctttccaaagtgctgggattacaggcgtgagccactgcacccagctggcaatttcttataaagttcagcacacattgaccacccagcctcagctatcctgctcctgggtattcatccacgagaagtgaaaacaggtgcccgcacaaagacttagatgcgaatacatattgcc

SEQ ID NO: 273181 - DNA, 537 bp, Homo sapiens
acggggtttcaccatgttggccaggctggtcttgaactcctaacctcagatgatccgcccaccgtggccacccaaagtgctgggattataggtgtgagccaccacacccggccaaatcactgcgttttttaaaaagataaggtcaacgatcctagcccttgtctcctcctgcacataagataacgtctgacaggatcagtggctgtaatctatgacgagatggactcttgcaccgaaactttgacgatcggatttggctctaaggtaccccctgagcaggtgcagagcctccgccacccgttgataagctgaggcccgaaacattgctttggagcagtcgaactgaaactctgaaacaccctcccggattgcaatgctcaataggaatctgaataaaactaactttacttcttcgaaagcaaaattttcctttagttgactccttgaatctgggtgggcacttgtggtcacagtggaggctggatcccaaacagtgatgcagcttcctcttggttccccaggacacctgtgccgtgg

SEQ ID NO: 273182 - DNA, 489 bp, Homo sapiens
gatgacttacttaatgtctctaagtctgtatttcctcatctgtaaaatcgtcttttatagagagtattaaaatgagaaagtatatggagtgtatttattacagcgcctggtgtagactcagtagctcaaaaactggaggttgttatcaatgtgtgaatatattctgagcagtttctaagtctcttgggaaacttgaccttgaaagatgggtaccattaagaatttctgagacctgtataggtgaaatgtgaaatgggtcttcataatctttcagttttcttttctgctcctaatttcttgctgggcagtacagaaggaaaaacaaagatgtcataatatttgagggcaaacatccattgttgagtgtacttatatatcataattaaaaaaaagaacctaatggaaaaatagacaatttagaagaaaaattgtaaatgttcaataaataattaaaatagttccacctcactagtaatgaaagaaatgcaa

SEQ ID NO: 273183 - DNA, 400 bp, Homo sapiens
ggcccccatactaaacagtttcctctggtgtgatgagtcctgttcttaaaaaattcatgggggtccctattaaaaatcacctgataagaaggcgtgagaagaggagatgtctctatccaagggtacctgctacccggtctcccagagcaggttggggcagctgatggggccagatgatgggaggccttaacactaggcttggaagatgtaactgttgctgttgggaatgatttagtaaagcactgttttggagtagattatctagataagtaagacaaattgccagggagctagaaaggaaaatcaattagtgtgttccaaatgtccgcctggactcattttgtgttaaaactaataatgcttaaatatatatattcatattttttattgtcatttacaa

SEQ ID NO: 273184 - DNA, 256 bp, Homo sapiens
cccgatcagatcttagcctttaagcccaatgccacttctgccaccatgttggggtgcacctactgggcatagcacccactgtgtgccagtcaggggtggaacccatgcagggtggggatggcagtgcccgcacaggtgggtgagcggggcttctcgtgaagcaagcatgacggtgccaccttctcaggaccatgcacccacagcccacactcctttctggtttgaggctaagtccagggccatgggtggggcgcgc

SEQ ID NO: 273185 - DNA, 1007 bp, Homo sapiens
gtctgccaggaaaagttttctgtagtgacgcacgtgttgtgtgtgtatgtgtgcgtttgaggctatattactcattgctacggcagttcaaaatgacttggaaaaaaacaatgaacgctggtcattgatatgtatactgacatgtttaagggaagttactgtggtctgtaacttatgaaatacataaaaaatatgatgggtggagtgacggacacatggacagatatgaagcaagcactgtaaaatattagtggtagtttttgtatgcccatactcacggcaccattattcacagtagctaagagatggaagcaatatgtgcccatcagtgggtgaatgatcaacaaaatgtggtatattcatacagtggaatattattcagcctctaaaaggaagatacgctgacatgtgctgcaacatggatgaatcttgaggacatgatgctaagtgaagtaagccagtcactggaagacaaatactctatgcttccatttatgtgaagtatctagagcagtcaaatgcatagaaacaagtagaatggtagttgccaaggactgggggaggaggaaatgaggagttgtttaatgggtatagtgtttcagttttgcaagataaaaagtcctgtggattggttgcacagttaagttatgtgaatgctgtatgccaactcaactgtacactctaaaatggttaagatggtaaatcttatctttattttaccacagttttttttaaagcatggtaaacaccatttcccaggatgtaaatcggtactaaaaaaaaagtgctccaaagtaagatatatttgggaaacacagggataactaaggttagataggtgttctttattgcaggaattctaagagcatttaacaaattaatttacactgggaattttcagtgtggagggtctggctcatagcatttcacaaacattatacttcagagtcccaaagcctttaaataaaatgttaatggtagaaactccttaaggggtgttcactgta

SEQ ID NO: 273186 - DNA, 606 bp, Homo sapiens
gtctgccaggaaaagttttctgtagtgacgcacgtgttgtgtgtgtatgtgtgcgtttgaggctatattactcattgctacggcagttcaaaatgacttggaaaaaaacaatgaacgctggtcattgatatgtatactgacatgtttaagggaagttactgtggtctgtaacttatgaaatacataaaaaatatgatgggtggagtgacggacacatggacagatatgaagcaagcactgtaaaatattagtggtagtttttgtatgcccatactcacggcaccattattcacagtagctaagagatggaagcaatatgtgcccatcagtgggtgaatgatcaacaaaatgtggtatattcatacagtggaatattattcagcctctaaaaggaagatacgctgacatgtgctgcaacatggatgaatcttgaggacatgatgctaagtgaagtaagccagtcactggaagacaaatactctatgcttccatttatgtgaagtatctagagcagtcaaatgcatagaaacaagtagaatggtagttgccaaggactgggcccattgttggtgatgtcattttaattaagtcgacgcggccgcgaat

SEQ ID NO: 273187 - DNA, 379 bp, Homo sapiens
gctaatttacttagctagtgcatagacttaattggttttcagatgctcatgtggtaaattatcactgaaattctaaaaatctaattttatttgctagtttgccttatttgggtacctgtctttagctgttaaaatccttccttcatatttgtgcctgtttcatacttaatttttcattctctggttctctttttcaaaagaacctgtaggatctctgttcctatttccctcctatatgtgtgtaacaccgtgagtcagtatattgacaagagcaatggctttattataattctgatgttccccacttgggggtgaatgagccctcaaaaactcatagtgttgaacacctctgcatgctggggcctttggaaaaaaaaaa

SEQ ID NO: 273188 - DNA, 324 bp, Homo sapiens
gacatggatggagctggaagccattatccttagcaaactaatgcaggaacagaaaaccaaatactatatgttcttacttataaataggagcttagtgatgagaactcgtgaagaccaggaggggaacaacaacactggggtctaattgagagtggagtgtgggaggagggagaatcacagaaaaaaatcatggatactaccaggcttcatacctgggtgatgaaataatctttacaacaaactcctgagtttatttatataacagacttcaaatgtaccccaaacctaacataaaagtttttaaaaaaaattaaaaattaaaaa

SEQ ID NO: 273189 - DNA, 513 bp, Homo sapiens
gcctcacagtgacagagccttaaagtgtgcactgctctgattagtgttcatgacgctagtccatcttcctggaaaaggtgaggaaaccaagattaagaggctgcgttttctttagactttgtgctgtcaggagatgtatctagtgagaagagaagagtggctcacatctgtcaccacccacagtcaccagtcagaggcgacggaagcccttggaaaaagcccactctggctgggtgcggtggctcatgcctgtaatcccagcactttgggaggccaaggcgggtggatcacgaggtcaggagttcaagaccagcctggccaacatggtgaaaccccatctctactaaaaatacaaaaaatttagccggacttgttggcaggtgcctgtaatacccagctactcaggagactgaggcaggagaatcacttgaacccaggaggcggagtttgcagtgagctgagattgtaccactgcactccagcctgggcgacagagcaagactctgtctcgag

SEQ ID NO: 273190 - DNA, 523 bp, Homo sapiens
ctctccctaaccctgtgcaggcaaggcttagctgctcactccttcacactgttgccttctttgtcctctctgagtcagagttctgagcctgtcgcagatccagtataaaactccaccttctccacatcagttcacgttgagcccttcttctccagacctcctgcctccttccttcattcattaatggagaagctgctgcaggtcaaacctgtaggtgccgggtgctacaggggatatgagactgatagggtaactgggaaggtaaaacagccacagaaaactcaatacacagaactcagataaagagtggcaggggataggaggggagggatttccctgtgactggagtattcagggccgactttcagaggtgacttttgggaaagccttgactgatttgtagcatttggcttctagatagcatatatgaaaggcttagattctgatcaaagactgagattaaaatatactttgaaaagggagggaagaatttgtttctcaacttttgcaatctcaaaaattg

SEQ ID NO: 273191 - DNA, 1484 bp, Homo sapiens
ccttctgctgtgtgtgtgaggacacaagatgttgtctatggagtagggaaagccttcaccagacactgagtctgctggcacctcgatcgtagacttcccagcctccagaattgaaactggattagcttaaaagtagagcaacatctctcacacttcatagctcttgacagttttgacaacaaggatgggtgctgatggagacatggctttctggaagaccccttggatctggctaaatgacactcttaccatcatgaccacagttgataatcaccatgccaatggctagaacaaaccacgaaaggacaaaaaggaaggtggcaactctggttcccagaagttctccgcccattcccagagaaggcatgaatattcctccccttgttttcaatgctcaacatctttattaaagatgccctgtatctgtgacttcccagcactcacaagctgagcagtgttgtgggaagtcaggaacccggaatggagggaccggctgaagccatggcagaagaacatggattgagaagatttcatggacatttattagttcccgaaattaatacttttataatttcttacgcctgtctttactgcaacctctgaacataaattgtgaagatttcatcgacacttatcacttccctaatcaatacccttgtgatttcctatgcctgtctttactttaatctcttaatcccatcatctttgtaaactgaggaggatgtatgtcgcctcaggaccctgtgatgattgcgttaactgcacgaattgttggtagagcatgtgtgtttaaacaatagaaaatctgggcaccttgaaaaaagaacaggatagcagcaatgttcagggaacaagagagataaccttaaactctgagcactggtgagccagatggaacagagccatatttctcttctttcaaaagcaaatgggagaaatatcgctgaattctttttctcagcaaggaacatccctgagaaagagaatgcgtccctgggggtaggcctctaaaatggccgcttcggggggcagccgtcttttatggtcgaagctgtagggatgaaataagcctcagtctcccgtagcgctcccaggcttattaggaagaggaaattcccgcctaataaattttggtcataccagttgtctgctctcaaaacctgtctcctgataagatgttatcaatgacaacatgtgcccgaaacttcattagcgattttaattttgccccggtcctgtggtcctgtgatcttgcctctgcctccatttgccttgtgatattctattaccttgtggagcacgtgatctctgtgactcacaccctattcatacactccctccctttttgaaaatcactaataaaaacttgctggttttgcggcttgtggggcatcatggaacctgctgacagttgattcgtgagccaagctcccacttctcaattccatggccattaaataaagcctgcactgcttgatgctcac

SEQ ID NO: 273192 - DNA, 209 bp, Homo sapiens
gctgagatctcaacgctggtctccgaatcctttctctaatagactatttgacatcttcatttggatgcctaacaggaacttgaactaacatgtccaaatcaaaatactgctcttcccccaattgtcagatttgtttcttctacagtctttccctcttctgctaatgaccacttcagactttcagatgcttagactaaaaaaaaatggag

SEQ ID NO: 273193 - DNA, 281 bp, Homo sapiens
tcaagaagtttttaatgcattagcttctcttcttgcgctgccttctttttagcgatatctaaatagaaactacatgacaagtagttatcatagcaaaagctagctttgtaatgcacatgacaaaaacatagtataaatgtgacccgtgaagcagtgaaaactttgggtgctgtcatttactgtggtaccatcttgtctcttactgtgtactgtgacctctagtggtttctgtttcttccatggatcatactcttctgaatagtgttgacaaaaacttactg

SEQ ID NO: 273194 - DNA, 262 bp, Homo sapiens
ccagcgtgactcagctgggttcagtgcaaggctgcaaccataatgtcagccagggctcagttctcatctggaggcttgactggtgatctgcttcccttctcatctggttgttggcagcattcagttccttgcaggctgctggtctcagggccccaggttcctgctgtcctcagcttcctgccacatgggcctctccatctggccactcatgacatggcagctcacatcttcaaagccagcaagatagcctcctagcaagaca

SEQ ID NO: 273195 - DNA, 351 bp, Homo sapiens
aaattgctgtaacataggtaacaaagggctgatattctataaagagttcttgcaaatgaataagacaaagatgaatccaagtgggcaaaagatatgctgtaggcaatctgcaaaagtgatgcataaaaacaggttcaacattactagcaattagtggaataaaacttaaaacaacaatgcaaaaccatcgttctatcatattaacaaagatgacaaaaaatggtgtgacagtgcagggtgtggagaaaagttggtgtcaaagctgtgccatctttctgtgtatctttcatatcaaacaaacgccttcaacaatgagcacacctttcgacacgagttcccagactttatcct

SEQ ID NO: 273196 - DNA, 352 bp, Homo sapiens
gggtgcccgggcgcgtcctgtggcctgggactggcagggggagtcagtcctgaataagtcactttttcttcttagctagaaaaacgactttcaaaaggctttcaaaatctcgtctttggtcgatttcccctactacagcattttacgctgagttctagtttctctctcgagaacagcctccgcactgtaatctgcatcaacccaaagggtcatgatgccatttctccacttcaacgagatatacctatttattgcaccctggaggtctctttcgtggcggtgttcgattttagataacttacttgcaacttgtgtttaggaaaaaatgtacactgatactttaaaccatgct

SEQ ID NO: 273197 - DNA, 469 bp, Homo sapiens
tttgagatacctccctttacggagaggggcctatgttttttcctcttgaatgtgggcaggctctttgactactttaactgataggatgcagcacaaatgatgtctcagttccaggtcttagccttaagagactggtagcttttacttcctgactctgagaagacttttattcttggagccccaagctgccatgtaggaaatctatctactcctctaaagatatcatgtgggaaggttatagatgacatggagaaggaaggggcccagcccagccattcagccaggcagccatctctggcaatgtgcctggcaactaaatcatgctaccttagacccaccaggctagctcagctgccagctaaataccaagtcaagaccacgtggagaagaagaattgcccagccaagccctacctaatctcctaacccagaaactcatgaaatataataaaatggttgttgttttaagc

SEQ ID NO: 273198 - DNA, 344 bp, Homo sapiens
  misc_feature (9)..(9): n is a, c, g, or t
  misc_feature (16)..(16): n is a, c, g, or t
  misc_feature (55)..(55): n is a, c, g, or t
aattttttnaaaattngggttttttaaagattttttttgttaaacttttattttnatatatgtgagtacactgtcccttcttcttcagacacaccaaaagaaggcatcagatctcattatggatggttgtgagctaccatgtagttgctgggaattgaactcaggacctctggaagaacagtcagtgggtaagggcacccgactgctcttccgaaggtctgaagttcagatcccagcaaccacatggtggctcacaaccacccgtaatgagatctggtgccctcttctggtgtatctgaagacagctacagtgtacttacatataataaataaataaatcttta

SEQ ID NO: 273199 - DNA, 566 bp, Homo sapiens
gaggaattaacaccaatttttcactgtcttccaaaaaaataggagggaacatttcccaacacattttatcaagccagcattgcccaaagatatcacaagaaaacaaaactacaggccaatatcccttacacccaagcccgcacagcacccgctccacctctggagggctggagactaaggctggccatgtggggccagctgtgtctctgtggccaacccccaatcaaatctctggatctcgaggctcaggtgagcttccctggatgtcaacactccatagagacagccacacatcctcgatggggaaacactcactgggctgtccacatgaccccaacgggagaggacagccggaagctcacaccagagtgggactccatctcaaaaaccaaaaaaccaaaaaaaaaaaaaacaaaaaacaaaacaaaaacccaaaaaaccaaaccaacccaaaccaacctaaagcaaatagaaggactcctggtccttccattggtggctcctgcgccctgccccacacgcctcttccccgggctgattttaacctgtattcttccactgtaata

SEQ ID NO: 273200 - DNA, 585 bp, Homo sapiens
acttaggttcattcaaaaacctgtgcatgaatattcatagcagctgtatttgtagtagcacaggttggaagcaacccagatgtctttaaatggacgaatgtttaacaggctggtgcatccatgccatgaagcacaactcggcaataaagaggaatgagtggctggcgcttggtgagtggctgacgcttggaaccacctgaatggatctcaagggaattatactgagtaaaaaagccaatcccaaaaggtcacatattacatgattctatttatgttacattctgaaaatgacaggataaagagatggataacagattaagttgccagggatttgggacagcacaagggaggtcttatgtggagagacagttttgtttcttgatggtagtggcaggggctacacaaacccaccaggttttgaaattgcctagaacctgaataaggattgtggatggcactgatgccagcttcctggtttggatattgccctgtagtatgtcagatgttacccttggtgaaggatacatggggccctctatcctatctttgtcaattcctgtgaatctatagtcgtttcaaaataaa

SEQ ID NO: 273201 - DNA, 861 bp, Homo sapiens
gtgatcctcccaccacagcctcccaagtagctgggactacagatgcatgccaccatgcctggctaattttttgtatttttggtagagacagggattcacgatgttgctcaggctggtcttgaactcctgagctcaaacaaaacacctgccttggcctcccaaaatgctaggattacaggcatgagccatcatgtctggcctggaatacttatttttattttgttttattactgccctcattttacaattgagaaaactgagaggttaagtaacttgcctgtggttggtggttgcatagctagtgattggtcgagccatggtttgaatccaggtctgatttctggcacaggaagccttaacatcatgttagctgttcattcaagaaagaactatgtaaaatgtactagtccacacttattttatacaattatgcctggtccctaacctgttctttgccagataagcagatacctatcacctgacggccctcccttttatttctttcccttcaaatgttggagttatttgacagcaacttttcctctggagaaaaaggaggcagcaaatgtggagcttccttgatctgtctctcttgattgcttgcctgcctttcccactttacttaaatagatcaaagtcaggaatgatgatgctgaagctttagcgtatgtaagggagaagtatgtaaatgatgtcttttatgtaaccatagaaacatcaccctgttgtattcccacgaatcagggtagatccctggagccccttcaggaagtggcaattacctatgtggttttggaaattgagaaagtagaattaatgaaattgtctatccttgttcagagaataaaatgacttccagtg

SEQ ID NO: 273202 - DNA, 415 bp, Homo sapiens
aggttatttagaaattctaagtgagaggtggagaagacctgaatatcctctgtatttttgtatagtccacatatctagacattgccttccatataaaggtgcttaataaatattggttggattaacatatatgctaataaacatttcatcgttttgtggacattttcatacagtctttgggtcctagttcattgtttcctaagcacaggtaaaggaggggaattcagtgacagccccaagtagagactgatatcagagattttatttaaatgcttttccatgttttacctgatacagattgatgcattattaagttgtttctaattctatgctaattttgtacaacattactctcaaagtcaataatatgaaatgtgtgaatattaataaaattagtcactttatattaatgctt

SEQ ID NO: 273203 - DNA, 639 bp, Homo sapiens
cctggtctctgtaacttaggagggagtttgggttatcttttacttgaggctgaggctatgtcaaattggtcttgggctcatagagaggaatggatttgttgccctgaaaaggagcgataactctagtttttaaacatttgttttagttcagataattactgcccttattcattgtgtccacctgagttcagagcaagcattgctgctgttgcctggtctaagggaggaggacccaggcatgtaacggactgcatgctggccagttgtggtggtcagagcaagctggaggccagcgaggcccttcaggggtcttttcaagggtctgccttggggagcagaggaagatgaagtgaggcagtcgttatagcaagggcacacccacgtttctcattttgaacagtgaagaaagcagatggaaagccacatgtagggcatttgctgaagacaggtgtgttgggggcgtgtgtgtgtcctctgaggcattttgggtggggcgatattttgaccgaatgataccttgttcttcagtgcttcaatggttgatggggtggctttttttcgagatggagtctctctctgtcatcgcgccactgcactccagcctgggtgacagagcaagactctgtctcaaagagaaaa

SEQ ID NO: 273204 - DNA, 453 bp, Homo sapiens
tcctgaaggatatttcttgtgatcctgcttcataattatctcaaagaatagaaaatcctacaggtagaaacaggtcattaaacagtggctgtcacatttgttactggagtttcttatgccctaaaaacctgtctcagtttcctaagttgagttctttaaactttacattcctgtctatcaaaggataataatggatagtaacaaagataataataccttagtgtttattttgtatggtgttgtgagatgtcttctattattattccctttatatagatgagaaaactgagacttagataggtgaagtgacttacctaaagtcacacagcaagtcacactttaggtacaactcaggtgttccaaatctatagcctgggctttgaaatgctgtgccagagaaaggttgggggagtgagggggagacagaaacagagagagagagagagagagaga

SEQ ID NO: 273205 - DNA, 583 bp, Homo sapiens
tcacgtgccggcttcagcgcaggctgtttaagtgtagtcttgtgaagagagttttaacatatagatgctgcatctgggggctccctcctcagctaccaacacttttctgtccctctcttaggctgtgattggtgtggtgccgtcagagggtctctttggaatgtaactataccacttatgctggggtggtggggagtgaaaatatttttaagaccacaagctgagatgggggcaccctcatgttttatgtcagttaagccattgccaaacaactggagatcctaaagagctggcatctgtctttgaaagtcacccaacctattatggggacagtcctctcactaaaatcctgaggccaatggggtcccattcattcattttctcctgccccacctccatctccatgtcgtgtaagtgagaacattatcatcagttcaggagttattgaccgtcagcatacaggacttcagctttcagcaaattcttggctacctcttcctgttttcaagctgacatatatacaaagaatataaatgaatattgaggctaacttaattcagaaaaaaaataaaacgtggttagc

SEQ ID NO: 273206 - DNA, 501 bp, Homo sapiens
caggagttcaagaccagctggagcaacatagcaagacctcatctctattttaaaaaagaaagccaaaagaagaaggaacaaagggggaaaatgttttcttctcagataaaaataaggttaaagaacaaaacaaaaaccaacttgaataaataagcattcaggaaaacgtatctgaggccagatagagtggcagagtaaagacatgcatgttttatcccggtattcagaagttatatttggaaacttcttataccctgttcccacattatctgataaaaagccaaaaatagttttcgtcattcccttaccagaggaaggagaaaatatctctgatatcttttatggattgaaattaaagatctgaaggtaaatcttcctgatgttttgctatttagtataacaaacattgtagaagacgtttaaaaactatcactaggttgtgattaagtccagattactgtttgaagagaaacaatatattttaaagataaatcattcaaa

SEQ ID NO: 273207 - DNA, 154 bp, Homo sapiens
ccactatgggcttcctacccctataccaccaatcctggtgtgggaaaaacatatacctggtggtccttgcaggtgatggggttatccctgactctgcacatccccttctgggctcagggcaaatggtttcatggccttcgggtctggccctttt

SEQ ID NO: 273208 - DNA, 384 bp, Homo sapiens
gtctccggagggatcgtctctggtcccgcagcccctctcgacccctcaccctgtcgctgggctgcagttggcgattccgcgcggtgaaagcagccagtgcccagggtcttttcctgagtgcacctgggcctgccgcccggcgatgccatggggtcgtgcgctgcttttctacttgccgcgctctcactgctcggtgtactgggagggtaccctgggaggcgtgcctttattcttccgaaccgccgctcactgagacagtggctagaagtgtctcttggacctgtgagttagccttaacctgttatgcccccagagccctcagtggagcgcccgtactttgccggcatgacgtttgatttcccggtgataatccgacgagtttga

SEQ ID NO: 273209 - DNA, 344 bp, Homo sapiens
ttaaagtaaagctgtcttgttagatttgtagtaaatttccaatgaaaggtcatcactagagtccaggtgctgtgactcacatctgtaatgcctgcactttgggaggccgaggcagatggatcacttgaagccaggagttcaacaccagtctgggcaacatggcgaaaccctgtctctataaaaaacacaaaaattagtcaggcatggtggcatgcacctgtagtcccagctgcttgggaggctggggtgggagatcactttagctgaggaggcagaagttgcagcgagctatgatcacgctacccaactctagcccgggtgacagagcaaaaccttgtcttaac

SEQ ID NO: 273210 - DNA, 333 bp, Homo sapiens
cattgaatgcaaccagtattgttcaactacacagaatttcaggaatgaatggagaccttcagagctgcttgaaagcccctctaaatcgctaccatccaacaaaactttagcttctagagcttgcacctctgacatgctttgggtgcttagattgcaagtggaaaagtcttatccttacacacattggtgcacctcctcaccccaccccctaataacctttgtggaaaatttttaattcataacccatttaaaatcattttaggattttgaaaagctggttattattagataaaattcaaccatctgaaggacaaatagaagtatgaacataaa

SEQ ID NO: 273211 - DNA, 378 bp, Homo sapiens
actaaagtcaaaccaaaagagctacatttaggggggctaatagggtagtctatggcagtgcaatgtagagaaatagagactgtctggggaaataatcatgattacagtgtgggaagaaaaggaagatttaggtaaagagactgataatcagtcctagtttattttcctagttagtttagcacaagaagaggtcagctaaacccaggagtgaaataggttgcacagtgcactgcagaacagtgttttcagagcatccctttaaaaactgaagaccacaaaactaagatgctcatgttaagttagagagtaatgtcaaatgaggacatatgtaatggtggcattcctatatgaggccaaaatctgtgtccagaggtcata

SEQ ID NO: 273212 - DNA, 419 bp, Homo sapiens
acagaagaagaacccaagaatgctttaactctgatcatcctaatctcaatgtataggttatagttccattatttgagttcttttatttcagacaccaccagttagatgatgttttatgcaatgtttgcttgagtttatttcctcttcatttattttctttctgaaaataaatctgagaagtttctttagtgaaggtctattggtggtaaactctgaatttttttaatctattttatccactttaaaactattcaaagatagttttactgggtatataattctgaaatgatagtttttttttctcttagcactttgaagatattactcattttttttcccttgctgtctggagatttcttcccagtctaattatcattctcttttgtaggtgatctgtcttttccaattttctgctttta

SEQ ID NO: 273213 - DNA, 471 bp, Homo sapiens
gctgtgaattcataatatttcatcttgcagtgattaaaagaagatgctatacatagtattattggaattataacaggtaatattatgttgcctgaataaaagattattaaggttattaatacccacagattaccaaggtttctgttcaggtttataactctcagacctgagtgactttgcctttatctttcactattggtacaatgagaatatctgcaattagataatttgcaattatgtaggacaggtatgtaacaccacaggagagcagaagctgcagccggcatggcacatgaggaggaagactcagagacgcctgacatatgtaacactagaatgtataatacaaaaacatacataggctggaagttgataaataaaacaaaaattctaaatgtgttcgtgtattttaaaggacttaatctttttacggtaaaatgattagtgcgtattgacataaattttaaacag

SEQ ID NO: 273214 - DNA, 231 bp, Homo sapiens
tagttttagctcttacatttaggtctttcatccattttgagttaatttttgtatatggtgtgaggtccaagcttttacacgtgcatatccagttgtcccaatgccgtttggtgagattcttcttttttttttttgagacaaaatctcattctgccacccaggtggaggttacagtgagctgtgatggcaccactgcactccggactgggcaacagagcaagaccttatctt

SEQ ID NO: 273215 - DNA, 448 bp, Homo sapiens
caaatatcttgaagtaacccaaatgccacaaacaggtaaatgttcatacaatgaagtactactcaacaacaaaatggaatgaccactgatagaggcaaattctaaatgttatcctgagtgatagcaggcagacacaaaagtttcattcacaagaaacacttaaattttaggcaaaacaggccaggcgcagtggctcatgcctgtaatcccagccctttgggaggccgaagcagggggatcacaggagtttgagaccagtctggccaacatgttgaaaccccatctctactaaaactacaaaaattagcttgatatgatggcacacacctgtaatcccagctactagggaggctgagggaggagaattgcttgaacccgggaggtggaggttgcagtgagttgagattgggccactgcactccagcctgggtgacacagcaagactctg

SEQ ID NO: 273216 - DNA, 292 bp, Homo sapiens
aaaactacagctagaatatagggtctcatgtcccagccaggcttcaggaccaccccaggtaactgcctgaaccaggaactctttgcaaagtgtcagcatctgaaacggggagagcccattgtaatgggggtttttggcaggcctgggccactctgggcatggaaaccaggcctcccagactacagagtcctgcaagagaagaccctgcctgcatcattcagaccctaatgcccctggaagcccacactccacatcatcagcactgatcctcagcaggggcacctgtgttgct

SEQ ID NO: 273217 - DNA, 420 bp, Homo sapiens
ctcagcctcctgagtgactaggactacaggcatggtccaccatgcttgcctaattttatttatttatatatttggaaagatggagtcttgctatgttgccctggttggtatccaacgcctggcctcaagtggttctcctgcctgtaatcccagactttgggaggctgaggcaggaggggttgcttgagcccaagagtttgagaccagcctgggcaacatggaaagaccctgtctatacaaatttaaaaatttgctgggcgtggtggtgcacacctgtggtcccagctttgtgggcatggtggtgcacacctgtgagaggctgaggtggaagattccctgagcccaggaggtcgaggctgcagtgagccgtgatcacaccactgcactccagcctgggtcacagagtgagatcttgtctca

SEQ ID NO: 273218 - DNA, 1025 bp, Homo sapiens
atggggcaggtttgattgccatctcaattttgcaagaaggcaacaggggttcataaagattcaaaaccacctctgcctgcctcaaaaacatttgctctcagccattggaccgataataaagcaggaggggttgcaggggcacagttgtctaagcacagctgctcccttccctctaggagccgttcaacagcccggtgatcaatatacttcctagtcatcagcgaagggtaggcgcttaatgaatgcttctccgcaaagtggatcacaatcacgaagaaaccaaagcttacacttccgttccccatatctcccacagatccaaaagaccacggggcccaggacccggtctccatagcccagccatacccgggggttttcaggaaagcctcactcgcgtcctgccgggcgatccggggtggttgagttgggaggggggctaccccagtttggaagcccaccacgtccaaatatcccatccaggaggcgcagagagcaacctcagcatgcataacaaagcagcccgcggccgcgttcacagcaggcttggcgggggttcgggaatttccacagggtctcggcctcccccactgtgggctcgcgcctggcgcccctcaccgggcttccaagcgctcttgtcggtgtcgctagaaaactcgcagagattggagctgagaaaaggcgggcaaagttccttttgataagttatgaatggggaaaaagtgtttgtagaactcattgttaaaaccacggagcccgagactcggccggcgccgggccaatcggaacccggaggctattttgaaatctctcccgtctcagccaacaggcatgcaggaggcgaatccccgcgccagcgccggccaatgagcgcagcgctatgctaaggagtcgggggcccggcccctccgactgtcagcgggttaaagatggagccggcaggcgaggggccgccacgaggtgcagggtcgtctggacggggacccgggggcagacgatggccgggatcctcttccgtctaaccctcc

SEQ ID NO: 273219 - DNA, 992 bp, Homo sapiens
actgctccaaggtctgcccgggccctggcttggtcttgagagaggaaagagaccatctggtcagcaccctcctcccagacagcagttatcagcagcccccctcctctgcgggaagaagagctgggacttataattgcccacacatgtggggcaggcagtggaaagcaccgtggatccagagtcaggagacccagtgcttgccctggcttgatttaaatccaccgtgtggccaacctcagaccccccacatcccatctctgggctccttccgcagctgggaggcagtgagcgctgtgggtaaccagcaccaggcttgggcatcagatgactatgcattgaccccgagtcagtttctggctgactgtgtgaccccggggcagcaccttgcctctctgggcctcaatctccttctctgtgagcagcaggaccgtgtgtgggctccatgagacaacagcattggcaaggtgcttaccacagttcctgcacttcacagctggacctctggccactggctgagagaaccactgctctcctggcctcctgcattggaacacttggctgtgaaattaatctgcaacctgcaaaaggctctgcccacagaagggacctggacaccatgtatgttccaaagatccgtgtccatcctccaggcacaggccacagtctgactctgagaccagctgccttctaggctaaaggagggtgctctgggcattggctcagaacaggctgctgctgaatgcagtgggaagggagaaagggatgaaaaggtcttctgaaatgcccacccatttcttgcatttgattcagaacccagtgggcagtgggttcttggaatgggaatctttttggtgccccctgtcttctgacccagagcgttaggagggaagggaaggggtgttgggccccttcccagggtcagggcttgtagcacctcagctgggaagcagtgtgagcatgatgatataacaggaaccaactcgttcttagca

SEQ ID NO: 273220 - DNA, 383 bp, Homo sapiens
cagttattaatatttaaaaacaaacattttgggtgactacttgactgttgtgtgtggattgttgagatggtattgtaatcaatgatctgttttatctctgatggtgatgatgatggtgataatgattattttattgctgcagtttactttgtgtactttgtgagcatttttttttttttttgccctctacaggatggcagtcagatggctcttagtagctatagcaagttgcttttagacacttatctttcaatccaccaactgtgacatttagagttttacatatggttgagatccactcttacgtgtcatatatttgtactttaggatgtttgcaataaatgtgtgtctacctcccccaaataaaataaaataaaataata

SEQ ID NO: 273221 - DNA, 380 bp, Homo sapiens
aacagtttctagaatacacttgagtgctcaatagacatagctattatagttaattgaaatggaattggcaatgtgggaaataagaaatcacatttttggccaggcacagtggctcacacctgtaatcccagcactttgggaggccgaggcaggaggatcacttgaggtcaggagttcgggaccatcctggccaacatggtgaaaccccatttctactaaaaatacaaaaagtagctaggtgtggtggcgtgtgcctgtgatcccagctacacgggaggcagaggtgggagaatcgcttgaacatggtagacagaggttgcagtgagccaaaatcataacactgcactccaggctgggcaacacagcaagactccatctca

SEQ ID NO: 273222 - DNA, 465 bp, Homo sapiens
tctggactggcgataacattcctgagcagttttcgtacggggaaacgggccccaaagccctccggctcaccccaggtgccctaaaccaccactcattttgctactgacatttcctcccgcaagtcccagcacctgcctccactcccacccattgcagatccaggcacagctcacctgtatcccagcccctaatctctatgtgcaagtgcaccctgatcactgattactgtgttctacatgcattccaaagagttacttcctacttgcccaggactgcagaccagctctgactagaacagaccagcaagcgtctttgctatccagtgtgctgaactacaccttctccaataagatctgaactcttattgtccttccttatgtacctgcccccccaggtctagaataccatagtttccttgtagttgttcttttatcgaagtttaataaatctttgtattaaattta

SEQ ID NO: 273223 - DNA, 385 bp, Homo sapiens
cggaataggagaaaatttttgcaatctacccatctgacaaagggctaatatccagaatctacaaggaacttaaacaaatttataatagaaaaacaaccccatctaaaggtgggcaaaggatatgaacagacacttgccttcacatttctaagggcaaacaattttgtacctagacttctataccaaataaaaacattttcagtatacaagaaatgagatttcttgtatatctttctgatttaaaaagtgggggccctgtagtaccagctacttgggaggctgaggcaggagaatggcgtgaacccgggaggcggagcttgcagtgagtggagatcgttccactgcactccagcctgggagacagagcgagactccgtctcaaaaa

SEQ ID NO: 273224 - DNA, 336 bp, Homo sapiens
aagttggccaggctgctcttgaactcctgacctcaggtgatccacctgccttggcctcccaaagtgctgggattataggcatgagccaccgcaccctgccaactgtctgacttatcttaaaaggctaaggacctggtttgtttgtcaaattttgaaaatagatgcctcagttcataagatttccatattgtgtggcaggcgcctgtaatcccagctactcaggaggctgaggcaagagaatcacttgaacccgggagacagaggttgcagtgagctgagatcacgccactgcactccagcctgggcgacatagtgagactctgacaaaaaaaaaaa

SEQ ID NO: 273225 - DNA, 374 bp, Homo sapiens
cttgaattgtagctcccataattcaaaagagggacccagtgggagggacccggtgggagataactgaatcatgggggcagtttcccccatactgttcttgtggtaatgaataagtctcacaagatctgatggttttacgaggggaaaccccattgcttggttctcattctctcttgcctgctgccatgtgagacatgcctctcaccttccaccgtgatggtgaggcctccagagccacgtagaactgtgagtccattaaacctttttctttataaattaccccgtctcaggtatgtctttataagcagcatgaaaacagactaatacgtaatccatgagagttccatcctccaaaaactgaaatacaactatga

SEQ ID NO: 273226 - DNA, 236 bp, Homo sapiens
tttttttttccttttggcatactgaattggggtcctgagtttttattttcctttcacaagttcaacatccagtcgcattattaatcaaaggttagggtcaaacaaaaacattgtcagataaggaggggctcaaaaaatgggtctcctgtgcaccctttcttaggaagctactggagaacaggttttagcaaaagaagataataagaaagagaaaaatgcatgttaaaagataattt

SEQ ID NO: 273227 - DNA, 329 bp, Homo sapiens
gtagggctgggcttccttggggtctgaggacgtgagagggcagagttaatggtcacctgtgtgagaggtgcggctgcaaacctgagggatgagactgtcttgggaggcagagcaagatggcctgtgagtagaactcttctgagaccactgacgtttcagttccttcacaccaagcgtgagtaataaacatttaaacaaacaaatccatggctgggcatggtggctcacacctgtaatcccagcactttggcaggctgaggccagtggattgctttgaactcaggagttccagaccatcctgggcaacatggcaaaaccccgtctctata

SEQ ID NO: 273228 - DNA, 456 bp, Homo sapiens
tgagctagcagatggtgggtataaactctgaagtcctacacagaaatcccccaactacattccaaattcaggtgacactggagtttacaaaggcacaaaatctcactgaaaattagtgctctggtgcctggtatggttggaaggtgggcacagaattgattcaatcaccaccatgataagatagttatcttcttagggtaggaggaaaggttagagataaaaatctaagataatagtgttccaggaacatttttaatatgaagatagtaaaacttcctgtgaatcacgttcaatgtttttatgatagtcataatgccataaaaagcctttttaaatattatgtcacacaatgaatttttataataatcctgctatcatcatttttaaaatgaagatactgaaatacagcagttcaatgtaattaaagtaatggtaataaaataataaaaacaatgg

SEQ ID NO: 273229 - DNA, 332 bp, Homo sapiens
cactaaaataacaaaatccaaagagttatagctaataatgtaacaaaggagataaaatgaaatcataaaataatccaaaagagggcatatagagaggaaaaagtgaagacagcgacaatagggacaaagggataacaaatagtaagatggtagatttaagcttaaccatatcaaaagttgtattaaatataaatggtctaaagatttcaattaaaaggcagtgacatcagatagactttcaacaaagcaagaggccaggtgcgctggctcatgcctgtaatcccagctctgtgggaggtcaaggcaggtgaatcacttgaggctcagagttc

SEQ ID NO: 273230 - DNA, 400 bp, Homo sapiens
cccagttgcacccggaaggagcggtgtgagcggtccaaggagccccgcaggtttgcctcggagatgaagcagtgtgtccggctgacggtccatcccaacaatatctccgtctctcagtacaacgtgctgctggtcctggagacgtacaatgtcccggagctgtcagctggcgtcaactgcacctttgaggacctgtcagagatggatgggctggtcgtgggcaatcagatccagtgctactcccctgcagccaaggaggtgccccggatcatcacagagaatggggaccaccatgtcgtacagcttcagctcaaatcaaaggagaccggcatgaccttcgccagcaccagctttgtcttctacaattgcagcgtccacaattcgtaagtggccccagcct

SEQ ID NO: 273231 - DNA, 480 bp, Homo sapiens
tacctgaatgttcataggagtattattcataattgctacaaagtggaaacaacccaaatacctattaaccgatgaataaattaaaaatggtatatacagtggaatattagccagtaatgaaaagaaatgcagtattaatacatgctacaacactgctgaatctgaaaacacagcccaaaagaagccagtcaccaaaaatcacattttatgtgagtccatttatacgaaatgtccagaataggcaaatccatagagaaagaaggcagattaatagatgtctagcacagagggacttgagggtaagtggggaatggctgtggaatttctcgttggggtgatgaacatattctaaaattgattgttgtgatgggctcacaattccgtgaatatattaaaagccatcaaactgtacactttatatgggtgaattgtatggtatatgaattgtatctcaataaacctgttatttgataacaacaa

SEQ ID NO: 273232 - DNA, 464 bp, Homo sapiens
taaaccatgtaggattatcttttttgcctttagtgaatgtaacttttaaacatatattgttgtatttttcttatacctgttggaacagattagtttgggacgtactacatatactatattctgtaagcttcatagtcttataaaatatggtttttccatcattctcagcaaactatcgcaaggacaaaaaaccaaacaccgcatgttctcactcataggtgggaattgaacaatgagaacacatggacacaggaagggaaacatcacacaccagggcctgttgtggggtggggggaggagggagggatagcattaggagatatacctaatgttaaatgatgagttaatgggtgcagcacaccaacatatgtatgttggtacaatatatgtatacgtatgtaacagacctgcacgttgtgcacatgtaccctagaacttaaagtacaataaaaaataaataaaat

SEQ ID NO: 273233 - DNA, 458 bp, Homo sapiens
ggcctaacttatgtgtcatgcaaaggatggctcttggaaaaatgcaaagaagcaggggccgctaagggagagatgtgaaggtcaaggaagctctgagctcctgacagccgcccttccagccttctcctgccttccatagagagatgctatggactcttggtccagagactcaaattcaaggaaaagaagaggcaacatgtgcagtgttgatccttgagttgaacaaagagtggtcaggagaagaaaccaacaagaaatgtaacctacctccagaactcaggaactcagcaaattctcccagattgtgatacctcatttctgaggacttcatctttaccaaatctttcaatccaaagcaaacgaatactgaaaattcatgtatccaaagcaaatgaatactgaacattcacgttgagatgatctttaaatgtaattaaatagagataatgtaactaaaa

SEQ ID NO: 273234 - DNA, 443 bp, Homo sapiens
ggcctaacttatgtgtcatgcaaaggatggctcttggaaaaatgcaaagaagcaggggccgctaagggagagatgtgaaggtcaaggaagctctgagctcctgacagccgcccttccagccttctcctgccttccatagagagatgctatggactcttggtccagagactcaaattcaaggaaaagaagaggcaacatgtgcagtgttgatccttgagttgaacaaagagtggtcaggagaagaaaccaacaagaaatgtaacctacctccagaactcaggaactcaggtacccttaaggatatcagaaacaatgaaatatggattggcagaagcatcttcaccaccatcttcagatgtaattaatgcagctgttgaatttggttgactatccacctataattaccacattgcccattacagatttttgctgccttttcttgc

SEQ ID NO: 273235 - DNA, 496 bp, Homo sapiens
cggccggtgcgacacgacagaagggttcagatctggattctagactgagtgctgattgctaagtcataggaaagctctctgagcactaggtgtctcatttaaaatcagtgaattgagctagattaattctttattcttaatgttaggttgtaatacttggcactgttaagacattgtagatgatcagaaaaaaagaaaagcaagacctggaagggatgaatgtagagtcagcttatttccaacagtgagagccaatactgagccaaagcatgggcagataggctgaagatagcagccgccagcgccacagcagcagctgatgtctgctgaatgctttctatatgtcaggctttgtcctaagtgcttttatatgagttaaatccctttaaccttacaactctgaggtgggtgtttttgccacagttctatagatgaggaaactaagctttagagaagttaacacatttgaccatggtcacacagtgtaagtggcaga

SEQ ID NO: 273236 - DNA, 627 bp, Homo sapiens
gcagcttaattagtaaattttctcagtaaccttggtggtaacatgaccaggcctgagttgtgctctcatagagggcagttaggtgttctcttacagtcttgcccctcattgcaccttacacttctcttttcctcttttataaaactcattttattcaacagatctggattctagactgagtgctgattgctaagtcataggaaagctctctgagcactaggtgtctcatttaaaatcagtgaattgagctagattaattctttattcttaatgttaggttgtaatacttggcactgttaagacattgtagatgatcagaaaaaaagaaaagcaagacctggaagggatgaatgtagagtcagcttatttccaacagtgagagccaatactgagccaaagcatgggcagataggctgaagatagcagccgccagcgccacagcagcagctgatgtctgctgaatgctttctatatgtcaggctttgtcctaagtgcttttatatgagttaaatccctttaaccttacaactctgaggtgggtgtttttgccacagttctatagatgaggaaactaagctttagagaagttaacacatttgaccatggtcacacagtgtaagtggcaga

SEQ ID NO: 273237 - DNA, 467 bp, Homo sapiens
cccacaagggcagggctcttggttttgttctctgatgtgtctcaatatctagcacataataggcactcaataaatacttgttgatttcaaaaaaataaataaataaatatctgttgaagtctctactttcagttatttttgtttatatactcagaagtcggactgctagatcatatgataattctgtttaattttttatggaaccaccatacttcaacatgaatatttttacaggattaatgcagcaaagcttaaatgcaagtaatcattatcctcactgctggttttagtaaaataattaaaacaattcacacacactgtttaataacttattcgcagccaggcatggtggctcacgcctataaaatcctagcactttgagaggctgaggtgggtggattgcctgagctcaggagttcaagaccaccctaggcaacatggtgaaaccccgtctctactaaaataca

SEQ ID NO: 273238 - DNA, 342 bp, Homo sapiens
gaaatcaagttactgtttcatttacctctttgaataaatagaaagatgttcaggtaaaaccaagtgattatgatacagatctcaccccctccctccccaacctccacccaagcaaaagtttccaatggttccccatacacttttggaaacagagctttgtggcatatggaaggaatttctaccccctgcgtatgagcaaacccatctggtttagttggtttggccaggtcttagaaatacattgacaaacacgtgtatgtcaggggtaacttgtagtcttgctgcttatattgctcctggggggaataagaaattcatgtaatatgaacagtctagttttta

SEQ ID NO: 273239 - DNA, 438 bp, Homo sapiens
gataaggatgtgtggaagccggagccctgccggatctgtgtctgtgacactgggactgtcctctgcgacgacataatctgtgaagacgtgaaagactgcctcagccctgagatccccttcggagagtgctgccccatctgcccaactgacctcgccactgccagtggttgtaatttatttatttcctgttcaacataaataaattacttgcaagcactgcaaacacgctcccatagatgctggtcgtctctgcaaagcagaggggctagttatccatgggacctggtagctggggtagaaaggaaaggccacttctcacttgcaggttgaaactgagtgaacgagcctgagacactagaggggtccttctttgcccaacatctccaaaaacatttgcttccaagacacatgaaggacagatgtgattctacaaaaaaa

SEQ ID NO: 273240 - DNA, 411 bp, Homo sapiens
ggaatactgacaaggctgtgggcaggcagtgagacagggaggcaggcctggccgtctgcttttcctctccctctctttgaccaaaattccatccatgtaaccctgttcctatagctgccttccttccaggaagagatctgcgcagttgctacttaacaaagcctagaagaacccaaccagaataattttgccaagggctagaattgaaatatctgccaccttctgtagctcatagaatcactgtatttctgagcaagaaatcttttatttttttagacagagtcttgctctatcacccaggctggagtgcagaggttgtagtgagctgagatcataccactgcactccagcctgaataacagggtgagaccctgtctcaataaaaaataaataaataaagtaaaaaaaaaa

SEQ ID NO: 273241 - DNA, 295 bp, Homo sapiens
agctggggggtcctggcaagatgacgagtagaggcagtgctcaagcagtgagcatcaaaggatggggctaacctgcaggagtgtggttggaatgatgggacctggatgaagtaaagaagaaataagacgggccagtttctggactcagcaactgggaaaggtgtacaggtccaaagcctgatagggtctgaaagcaagcttatgacacaagggtgttgagggagtgagatgatggtcatcagatgcggattctacaagactggattttggatgggatcaactctatctaactcta

SEQ ID NO: 273242 - DNA, 539 bp, Homo sapiens
tttttttttcaactaatgaaagatccattcatgaagccctatctcccaattaagcgggcactttccatcaggcaccgcagcagacgctctttaccggatcaagccaggcccccggatacagtgagccctgtgtgaggaccacagctggcatcccaaagtcagcagagtcctgcacagggtgggcccaggtcagagctggatggtgggaaatgcagtgtgttcacctccaccctcttctgcaagtgagcttacacagggaaatccagagtagaagtgaacagttcaaaacagcggttccaactgttaagaagaagggtgagtggatgaaaagaagtaaatattagttgaatacctattatgggccaagaactaggccagacactggcatgttatctagctcaattaacagcaacactctgcttggcacatattcacagtaaggctcaggcaggggaagcaacctagctagacacaaatgtccaggaagtggcaatgagatgtgtattgaggttgcaatgattccagagactgtatttgtt

SEQ ID NO: 273243 - DNA, 841 bp, Homo sapiens
agttaaggccttagtttagtggaacactcttagatcaggttccctggcccaataagaaacaggggtgttagggaagtggaattggaagtctaggcattttctgggtcaagcaaatgcagatgatagcagctaccccagaagagcatgtgttcagccctcccacaaatgctgtagacactggatctcataatggaagacttaattttaccttacctacaagtgttttgcatatgaaggcattctctgtcatagttggaatgagctcagaaagatgaaatttagtttctagacaaacagtattgctgcttgtttgggcaagcaaatgttgaatggttgctagagtgtgtcattcaacatgtagcatttctaggataatgtatgataagtgtttttccttcagttgttatgttcctcattttagcttgccataagtaaagcttaccatcttattccattacagatactttttgtcacaggttctataataaacatgaattgcaaataattacatatgatagatgtttggatggatatcttctaaaatattttaaaataatactttattgggctgggcatgatgactcaggcctatagtcccagcactttgggaggctgaggtgggaggatcacttgagcccatgagttccaacctgggcaatatagtgagaccccatctctacaaaaattaaaaaaagatagctgggcgtagtggcacatgcctgtagtctgatttactcaggatgctgaggcaggaagatcacttccaggagtttgaggctgcaatgtgctgtgatcacgccactgcatttcaatcttggcaacagagcaaaaccttctctca

SEQ ID NO: 273244 - DNA, 291 bp, Homo sapiens
gtggcagggtgctaagcgcttctcggcaacaggactgtgcacaaggcctctgcctcttgtcttagctgctgtccagccttccagctctgtggctgggactcaagtacctgaacagtgaatgggtgtgggggtgagccatgggcggaggcaggcgctgggagattgtgtcattagcaactgagtcaggaacagagggccagggagacagtgatagcatgggggtgcatctgaaatgctgacagaggcaaattccctcttctcttctacttaaaaggggtcggatccttcctc

SEQ ID NO: 273245 - DNA, 396 bp, Homo sapiens
atacccaacaacattctttgcaagtactcagtaacgaatcaccatgatttcctgggccgtaagacaaggatcaaagttatatggagtatgttatctaactctaatagaattaagttagaaattaatcagaaagataaaaatctcaaaaattttgaaacttaagcagcatgcttttaaataatccgcgattcaaagaagtcaaagggaaaagagatttttttttaaccgaatggattataaaaatgtaacctttgaatttgtgggttatagctaaagcagtgcttggggagctaaccatatacctgtaaaaatatatatatatatatatgaatgaaaagaagaaggacttaaaatcaggaattttagtttttaccttcagaagccagtaaaagaaga

SEQ ID NO: 273246 - DNA, 759 bp, Homo sapiens
tttcctagcatttttacctaatactgatgaacttcatttgagataggtagagtgtggtaggcaaaaagaatatctgagctttttctgcctccttctttgtgttgcccactttagtcctctaacaagccctgagcttctcctctctttgcacttttgccactctgtccccttatctgaaaggcccctgctgccatttctacaatttgaaatgctttacatcgtttcaaggctttgctcaaatgccttttctttcatgagacctgcttcgatggccctgataggaagtaatcatcgcatattttcttccccaatgatacttcgtttatttcttgctcaaaatatgaatttatttatgctttttattatagtttcatgtgtatctttgttttcccctcattaaatgtgcactcctgagaggcaggagcaatttttgctttatctttgtctcttctagtaggagtagcatcattccttttatatgatataattgtatatatttttatactgaattgaaccacaaaactcttcttctaaatcccgtgccaacatcatccaaatatactaaaaaaaaaaaaaaaaactggaaaagtataatactccttcttatttaaattgtctattggtattccttttttttcttaaaaaatcaaaacaaaacaaaacacttgtttcgttgacttttgtccaacaatggattaaagtgagctgctgtggtggttcactcctataatcccagtactttaggaggccgaggcaaga

SEQ ID NO: 273247 - DNA, 503 bp, Homo sapiens
atttccccttccagtggtacctgcttcagtcctccacattaccaaggctggaagaatctttctagatgaggagtcagcggtgtcataatcctgctgaacttccccctgctccagcaaaggctactaatttagttcagggtaaaatgcacgttgtgagtacagctcctcaagtctttcttgacctgctctaacctcctttataagcctcatctctctctagaccccaaacgtgcccttggctctggccccagagttctcaccaggagctgcaggtggtattggagtcacctgggcacttttccaaattaaccagccctggaagcttctctgtgtccgtgtcagtgggaggaggagtgaggaatgggtcagggagactggcagcagggggaggagggctgcctgtgtactgtttcaaatagaaccataggccaagccttctacctctctaagccttgactttctcatctgtaaaatggagagaataaaaccttcttgagcagatg

SEQ ID NO: 273248 - DNA, 408 bp, Homo sapiens
cgaactatgagaagtgaaaagctcgcaaatggaactgatctagaaggccccaagcttagctggatcctcaggttactgaattttaggatttgctcagtcttcaggttaatcatagttgtgctgtttgtttccagattaactatgaaacttgacatttaaaataattctaggccaggtgcggtggctcatgcctgtaatcccagcactttgggaggctgaggcaggaggatcacttgagcccaggagttcgagaccagcctgagtaacatggtgaaaccctatctctaccaaaaatagaaaaattagctgggtgtggtggtgcacacctgtagtcccacctacttgggagagaatcacctaagcctaggaagtcaaggctgcagtgagccatgacggtgccactgcact

SEQ ID NO: 273249 - DNA, 415 bp, Homo sapiens
ctatggattaagaagtatctcttctcttctgaattacaaattcatgcaaatgcccctcattggaagactaatttaaaactatacagaaatgagatgctggaaatatagttccaggtttcccccctataatgcgaaggtaactatagaagggaattgcaatgatgccaagtttactctagtataagcctactccagttcatttatcctcacagctacaatgaaatggtgttacttggaggaatatgtcccaatttatccactcttctgccaatggacatttagattactattactaaggccaggcgtggtggctcacgcctgtaaccccaacacttggggaggccaaggcaggaggtcacctgaggtcaggagttcaagaccagcctggccaaaaccgtgaaaccgtgtccctacc

SEQ ID NO: 273250 - DNA, 454 bp, Homo sapiens
atgctttccagctattgcctggtctaagagggagagttgcaggggtcagtcatcttgacctggtcctccaatgaattaccttgtcatttcaccatcgattctctctttttctttttccacctctgagcatgaaacacccttgatggaaatccagttgtaagaacaaactatttcttaccttcatgtgagatgtaggtaatatttcatgttcctgtctttaaaaaatcatattttctacctttctgaggacttaatgcagaagaatttagcctgtagcatgcactccacctgtcaacttgaaagagaagatattgctgattatgtcttttatgcaaaactgtaacctccacaatggtgtggatcaccacatctgtctttttcacagttgggtaattgctacctatggcaaaatctaaaacatgtcaagtgctcaataaatatgcattgaatgaaa

SEQ ID NO: 273251 - DNA, 259 bp, Homo sapiens
aacaaactaacaaaaaaatgaaattactggaaatttggagacagtagggtagttggtagtattaaagaatagtagtgtgcgatggttggtatgataatggtattgcaattttgctttttttttaaaagagttcttggctgggcacagtggctcatgcctgtaatcccagcattttgggatgctaaggcgggaggctcatttgaggccaggagttcatgaccagcttagccaacatggcaaaaccccatttctactaaaa

SEQ ID NO: 273252 - DNA, 385 bp, Homo sapiens
agaatcgagctcgtacacgtcagcactccttggggagggtgttatataatatatgtgtcagtaggaaggcagtaagaagattggagtaagacaggatggggttacatgtatataaatgaataaaataagtactgctaaaacttgagtctgataaacttttttgccccgaagataatcatcccactgaaaagaaaactctggggaaaatatgccagatactaggaccaagcacggagacaaaccagatacagtgctttcaaagaaaacatgcttgctgtcctttgttaccagtgtaattgtaattattgtttattctgtgttaagtgactgaatttcaatttttaccttttaaaaataaagagaacctctttttacttctgtattg

SEQ ID NO: 273253 - DNA, 917 bp, Homo sapiens
ggtaccctcatcgctacgccctcaccgatatatattttttgtgctaaggacagagcaattagtttttaccagataagcctcgggtattatgtttgtctaagaaacattctctgtgtatgtttaaattgtaattatttcccaaaagctgaggaaaatgtttcagcacagtgaggatttgacgtctgcactgagaacagctgagtttatttgtgccatttagaaattcgtaactgtaggctgggcgcagtggcttacgcctataatcccagcactttgagaggccaaggcgggtggatcacctgaggtcaggagtttgagaccagcctggccaacatggcgaaacactgtctctactaaaaatacaaaaattagctgggcatggtggcgggcgcctgtaattccagctactcgggaggctgagacaggagaatcacttgaaccagggagtcggaggttgcagtgagccgagactgcgccattgcacaccagcctgggtgacgagagtgaaactctgtctcaaaaaaagaaaaaaaaaaagaaatttttaaccgtaaatagaacttggggagggtgttatataatatatgtgtcagtaggaaggcagtaagaagattggagtaagacaggatggggttacatgtatataaatgaataaaataagtactgctaaaacttgagtctgataaacttttttgccccgaagataatcatcccactgaaaagaaaactctggggaaaatatgccagatactaggaccaagcacggagacaaaccagatacagtgctttcaaagaaaacatgcttgctgtcctttgttaccagtgtaattgtaattattgtttattctgtgttaagtgactgaatttcaatttttaccttttaaaaataaagagaacctctttttacttctgtattg

SEQ ID NO: 273254 - DNA, 391 bp, Homo sapiens
aaaatgtggtatatatacacaatggaatactatttggccataaaaaggaatgaaattatgtcttttgcagcaatgtggatggaactggagatcattattttaagtaaaacaatcgaggcacagaaaatcaaatattgcatgttctcactcataatgtgagtgctaaaagatgtgtacacatggatgtggagagtgaaatggtaaacagtgaaaacttggaaggaagagggaatgggagaggagtggatgatgagaaattagtcaatgggtacaatgcatgttatgcttgtggtggataccctaaaagccctggcttgaccaacatgcaacctattcatgtaacaaaactgcacatgtaccacatcaatctgtacaaataaatatttaaaaa

SEQ ID NO: 273255 - DNA, 295 bp, Homo sapiens
ctcaggtctctcacttggctcctctcacttggaagttgctgctgtttcatgggccctctcacagaggggagggggtctaatggtggaagtagttagtaggggcggtggccctggggctggtgacttggggagacttggagcagagtcagggaagatctggaattgctgattggatttctcaccaggtatccctgttccagccaagtagtcttgtatcctctccttgttgaagctgaccggctttctgtttcagtgtgaattcctgttcccctctcctctttactactacacacac

SEQ ID NO: 273256 - DNA, 302 bp, Homo sapiens
agcctatcccttaagagctggttaacatgatgctgtctttgagatcctctccttttataccagacagaatcatttgctttatcccgttgcccttggaacatacctctattatagcacatatcacattatctcattatcatttctttgtgtgcctgcctaactctagactctgctctctggatcaaggactctgttttatccatctttgtcttcccagtacccagtacagtgtataatacacaacaggtacacaatcagtattgaccacatgattgagtgaaatcaattcctaaatactttga

SEQ ID NO: 273257 - DNA, 680 bp, Homo sapiens
catggaagtcaactggggtcttctgggaaagatattcctcccttataagaaacaggtgcagggagatatgtacccattacctctccctggccccagctttcctgctttggacatccttgtgtgatgatgtgttgttactgcagctatcttgcaatcacaaggagatggctgccaacaaccaaggctggcagagcgagaagatggtcagagcctggacctacgatgacatcaccaagccactgaactacctggtcactgacctactgagcctaggaccacctacctctagagattttgttaagagagataaatcaaatgtccaaattgcttaagcaaattttagttggctattctgttatttgcagttgaaaacaccctgcctgataagactgtcattgtctaatgcaattttaaaattatgccaccacaaagaatttcatgagtagattatgatttctggaataagtcagcactcttctattagcctttcactttccatgttaagattttcattacatgcttttaaattttaatcttaataactgtcttatgtattttaaacctagacgcttctttgaaaactactttgataatgaaagtaaaatgtagatggacttttttgctttaattatcaacatgataaatattctcaaaataaatgctgtaatgaaagacatttt

SEQ ID NO: 273258 - DNA, 298 bp, Homo sapiens
gtgggtgggtagatgatggtaggaggtggcaaacgtttgggtggggatctaaagggacagttaattcagtctagacaggttgactttgaggtatctaagtattccaagacatcctgcatttgacagttgggagaaagagggtttggagatcaagagggattgtggccagagttactggttgtgggtgtttgagacaatgggaatggataagtttaaggaaggcacgtaggaagaggaaagtgggcaagagcagttagaggaaggagagctggaagaaatgtaggttaggagtgtttgg

SEQ ID NO: 273259 - DNA, 416 bp, Homo sapiens
gtagattacagaagagattgtggctttgttttgctagcatgttccctcttgcttgtgcactctgatgaagcccgctgccatgttgtgagatgctccatggagaggcccatgtagaaagaaatgatttctatagtaattatgtgaaatagaatttatcagattcccttgtttgtagtcacaaacctataggaaatcaacaaacaccaagtgcatcttttacagctaatatatgaaagaaacttgatgggggtttccagaattttcctcaaaaaatacagggggcaatatattatagaggcatgtcagaaaattaagcacaattgtgatgtttatggtatatgtgaactttctaaagtttgtaatttcttgttatttattttctcaacctaaataaatattcgttttcttacctaaaa

SEQ ID NO: 273260 - DNA, 421 bp, Homo sapiens
acccgttacctggcctttttaaaaaaaaaaaaaaagccttttcttgcagtggtatcttttctttgagttacagtgttgttcatcctttctttgccgaaagaatgaatcccactgcttcacgaagttaaggaaaactgatgtgctggtggtttttaatctttgttctgagctgttatgcattaatagctttctttttgtttttgaatttaattagtaaaatttcaccagtgaaccaaaagctctttttttttctattctaaaatgctagctttaagatttctgagaactttgtgtcaaagaaatcttcgaaaagttactgaagtatacagaagaagttcacaattttaaacgtgcaggtgatctgggcgtggtagatcacacctgtaattccagcatttcgggagccaagtgggcggatcac

SEQ ID NO: 273261 - DNA, 851 bp, Homo sapiens
ccacaggatttctggtaggttggactgtggtgttggtgtttgcagtccaaagagttgctgtgatttttctgtgcctgtctgtctttctttgagacttcttagattatctcatttggcgtcctttcacccaagagttaaccaagcgaggaatggtttcctcgctttcttcctaccttttgctggtggagctgctttcgaaagaagcactttaagaggccgacgcgggcggatcatgaggtcaggagattgagaccatcctggctaacactgtgaaaccccatctctactgaaaatacaaaaaattagccgggagtggtggcaggtgcctgtagtcccagctactcgggaggctgaggcaggagactcgcttgaacctgggaggcggaggttgcagtgagcggagatatcttgtcactgcactccagcctgggtgacagagcgagactccctctaaaaaaaaaaaaagccttttcttgcagtggtatcttttctttgagttacagtgttgttcatcctttctttgccgaaagaatgaatcccactgcttcacgaagttaaggaaaactgatgtgctggtggtttttaatctttgttctgagctgttatgcattaatagctttctttttgtttttgaatttaattagtaaaatttcaccagtgaaccaaaagctctttttttttctattctaaaatgctagctttaagatttctgagaactttgtgtcaaagaaatcttcgaaaagttactgaagtatacagaagaagttcacaattttaaacgtgcaggtgatctgggcgtggtagatcacacctgtaattccagcatttcgggagccaagtgggcggatcac

SEQ ID NO: 273262 - DNA, 382 bp, Homo sapiens
gattcttaaccatccttggggataagaaatgacagtcaggatgtgataattgctactctcctggtattgggtcagtaagtgtttgtggaatgaggaaggatgagagaactgggaagatggatgaggagatggcacctccagttttccgataacttaatgaggaagagaatagatttggctaagaagacactaagatgctttcagtcttttacttaattccttaggaagatagaaggtaatgaaaaaaattgtcaattttgtgacaggatgtgtctacatgagagactttcccacgaatagcataacttacctaatataataccttgtattatattctgatttacaaagtagtgatcatcttattaaatgttagagaaataca

SEQ ID NO: 273263 - DNA, 354 bp, Homo sapiens
tttgtaattttagtagagtcggggtttcaccatattggtcaggctggtctcgaactcctgacctcaggtgatccaccctccttggcctcccagagtgctgggattacaggcgtgagccaccaagcccggccaaaaaagagagctcttataggcccttccttgctttggagctttatctgctctgtgatgcttatctaaaatagccataaggtcactgatatttttaagcatttggaaattacttcagctgggtgccatggctcatgcctataatcccaaccctttgggaggctgaggtaggaggtcctttgagcccagcttgggcaacacagtgagacactgtctctgcaatta

SEQ ID NO: 273264 - DNA, 437 bp, Homo sapiens
cgtgctggggatgaggtattgtgctgcttctattttagaggaaaagtgactgaggcacagagaggtggagacacttgcccaagtttgtctcctcgtgagcagcaaggctgaaatgtgagctatgcctgcctgaatccacagcccatccacacacagtccccagtagacagtggtgccacagttgaactcagaactggctgattccaaagcccagtgtgccctgtggcttcccgctggatttcctgagcagtctggaaggtttacaaatgggcacagagggaggctcccagaagctgggacaatgctgggccccagaactccagaaccctctaagtcaggggtgtccaatcttttagcttccctgggccacactggaaaaggaactgtcttgggcgacacgtaaaatacaccaacactaacaacagcagatgagctaa

SEQ ID NO: 273265 - DNA, 674 bp, Homo sapiens
taaaacaatttcccatgagaaccagggagagtcagcaaggaaatatccatattagcagagacaccccatttcactgggagactggctcccagacatacaagaacatgagcccctgagcccccacactccatctgatccagctgaaggcagctccctccgccagctccctcggaaggaacgtgctgccgacccctgctggtgaaccgggctccaccgagaccgcattccctggcttcccaggccctcttcccgctgccagctcctccaaaggctaaggaaccagctccaggtcgcttcccaacgctcagctgggcgggcctgagaccaactccacgccagtggccggaaagccaagtgaaagctggtgactctgccggcagctgcgtgttacagaccagcagagtccagccctcaaagcgtagctggaggaaacaaaggctttcttctttcccctcttgctttccagctttcttttaatcaacacgtattttaataatgaaaaataatcacatactttaaaataattacttgaacctaaacaaaaggacagacaccactccctcacttgggcaggagttttaacctctgcccacagtcaccgtaagccgagctgtcttgggggtgctgccagtgaccagcggcctgtgtggggatctggctggaggagggttcac

SEQ ID NO: 273266 - DNA, 728 bp, Homo sapiens
taaaacaatttcccatgagaaccagggagagtcagcaaggaaatatccatattagcagagacaccccatttcactgggagactggctcccagacatacaagaacatgagcccctgagcccccacactccatctgaaaaccctcccagtagcccggaaactggccacaggggcatgcagtttgcagagaatccagctgaaggcagctccctccgccagctccctcggaaggaacgtgctgccgacccctgctggtgaaccgggctccaccgagaccgcattccctggcttcccaggccctcttcccgctgccagctcctccaaaggctaaggaaccagctccaggtcgcttcccaacgctcagctgggcgggcctgagaccaactccacgccagtggccggaaagccaagtgaaagctggtgactctgccggcagctgcgtgttacagaccagcagagtccagccctcaaagcgtagctggaggaaacaaaggctttcttctttcccctcttgctttccagctttcttttaatcaacacgtattttaataatgaaaaataatcacatactttaaaataattacttgaacctaaacaaaaggacagacaccactccctcacttgggcaggagttttaacctctgcccacagtcaccgtaagccgagctgtcttgggggtgctgccagtgaccagcggcctgtgtggggatctggctggaggagggttcac

SEQ ID NO: 273267 - DNA, 584 bp, Homo sapiens
cctaaggaagcaaagttttagccgatagttgataaatatgacctgcagtggttgacaagcttgactacatataagtagtattcaattataacttggcttcttatggtatagattcctatatgctgtgagtcaaataatatcctctggagcttaacaattacaagtaataacactgatagatttaatttgcaacacagatgttattcctgtctcttagttcctatgttaatcaaacatttttcgaatgtctacctagctgtgcaagccagtaagcccagtgatgtggaatattcaaaggagcatggccccatttttattatatagctggggagaaaagagtcacatggtaaattaactaatgaatcagcatgaggaaagagccaagccactgttttaaaagaagacatgttttctgaattcagaggatggttagggaaggaagaggtcataggcagatccagtttgaacggtgcccagaaggaagaaaggaagttagataaatgtagagaaaaaggaaaggaaagggaaggtgaatcagcttgagcagacatgaagggaaagtggaagctattcatgaaggactc

SEQ ID NO: 273268 - DNA, 429 bp, Homo sapiens
gaagctgatcatcctacctgtaccctgggacccgtttctctccagcagaatgtgcacatcagccctgtttataatggcttcaaaactgcctccatctacggcaggctggataatacattgtgtgtgttcacaacacagaaaccaccacagacagcaaggagaatggatgatccacagctcctcacaacaacatgaatgaatcgcacaaggtgagaaaatggaggtccacttggccatggtgaagaggtcacatcgatggcagatggagtttcactcttgtcgccaaggctgtagtgcaatggcgtgatctcggctcatggcaacctccacctcccaggttcaagtgattctcatgcctcaggctcccgagtagctgggattacagtgtttctgcccggccggtctttatcatgacctgagaagtagtta

SEQ ID NO: 273269 - DNA, 376 bp, Homo sapiens
gaagctgatcatcctacctgtaccctgggacccgtttctctccagcagaatgtgcacatcagccctgtttataatggcttcaaaactgcctccatctacggcaggctggataatacattgtgtgtgttcacaacacagaaaccaccacagacagcaaggagaatggatgatccacagctcctcacaacaacatgaatgaatcgcacaagatggagtttcactcttgtcgccaaggctgtagtgcaatggcgtgatctcggctcatggcaacctccacctcccaggttcaagtgattctcatgcctcaggctcccgagtagctgggattacagtgtttctgcccggccggtctttatcatgacctgagaagtagtta

SEQ ID NO: 273270 - DNA, 537 bp, Homo sapiens
ttcctgaagccattttcagggcagaagtgctttacccacttcattgagaaaccacctttgcatgcagtaccctgagctgtcttcagcacaccaagcatccacaacatgggaaataccgtgctttaaatgttgctttaatcacagtgctcatgagtaagggcatgtcctgtctcttatccatgaaaacactcccacaaaatgaagtcacacccagtatctgttaacggagatactgagtgggtgaagaagactcattccctaatgcaattcaggtcacacagggtaaaaaagaaaaaaaaatccttttctgttgaggatacagatggagagaaaatggaaaatgcctttcaggaagcacaagcctagttttctaattgtgtttcagtgaacacgcaggtgaacttacctgtgtggcttggtattgtggtgggttttcagcttcttctccaccaaatcctttgaaaagcagcagtggcagaaacaaataacccaattaaaaacaataatagcaacaataaaaaaagaaaagatgaagaa

SEQ ID NO: 273271 - DNA, 574 bp, Homo sapiens
accttgctcttatcaggaaatttcaagcatttgctgttattcacaactgaatgtaatgtctcacttcgtttttaactttgtatgagtatacctgactaaaaacactaatgcggtttcttggcaacaaatacttctgttcatgtattttagaaataagcttattaactgtttataacaactgcatactaacaattattattttttaatgaagaagctacattacaacctcccattaacatcatgtattagatcaagttgataatgttaccatgttatccggtggtcactgtgagtcagtgttgccatgtggatgtcaggcatatttttcctcatgtagattttacttttcatgcttatattcttagtttttatctggatcatgaattttcatctattctaaataccaaaggtgatctcatgttcttatgagtgacttctgaccaaagaccaccagtggcataagtgtcgtcaaagagggtgtaataatatactgtggtaatgaatatgaccaaaagccatagatgactgtgagatgtgtgagatattaaaagatagtcacatttcgtgagaagag

SEQ ID NO: 273272 - DNA, 422 bp, Homo sapiens
caagccctccagcggtcacccaagtacacatggaaacagtgagcatgggggacatctgtgcagggccatgcctgtgcctgctgcaagttctctctcttcaaacctgtctctcggctcttgattcacacatgatcagctgagcattcagttgggacaactgcaagacctcaaactgggcaaaagtaaccataatgccctagatcttgtctgagctgtggaaaaggaatgggagccgtcaatctgccttggagaacagtgaaaacagccttggagacagccagattgctccctcctctgtgtaactaacagataagactcctctttctgttgggtgtggtggctcacacttgtaatcccagcactttcagaggctgaggcgggtagatcacttgaggtcaggagtttgagaccagcctggccaa

SEQ ID NO: 273273 - DNA, 303 bp, Homo sapiens
cagaattttcaaatcaccgaaccccaaagttatgggaatttgttgccaagggagaaagacagtggaatttctgctttcctgatctgcagaaactataaaactgacccaatagatatggatatcgcctcatcagcaaagcagcactctcgcatattctttcctgaagggcttgatgcttcctgtctggtttctagctctgactgatgtagagggtaatgtaaacaccataaagaatccatagggaagttcatataaggccaaaaacggaatctgaaaataaagtatctaaatatacatgctaac

SEQ ID NO: 273274 - DNA, 562 bp, Homo sapiens
ggagcacagatggaggaaacttagcctgcccattatacttcattgtttggtagactaagaaagtaactggtattgctgttttctgagtaaccagttttctcaggctatagtattcttcctgggcatcaacagtgggcactaagactttcacatgctatggccgaaagtgctttaacatttttcttggggaaattttatattagagctctcaactttttaaattaggaagtgatttttccctaaaacagggaatagacctggcatgatagccatctttgaaacttgccacagtcttcctcagcatacttggttggaacgctgtaccaagatgctactggatactcaaaaaatcccttttcttttaaactctaaggaagggtattaaaaaaacatcccaacagtatttaaaaacaaattaaagcttgggatcagttttaaaaagtgtcatggctgggtgtgatggcttgcacttgtaattccagcacttcgggaggccaaggtggaaggactgcttgagctcagtctgggctaaacataacaagacactgtatcttaagaaaaa

SEQ ID NO: 273275 - DNA, 740 bp, Homo sapiens
gccattagcagtcattccccatttccttccatgccttcatccctaggcagccactaacctgttttccatttatatagacttaccaattctagacatttcagataaatgaaacagtaagatgtggccctttgtgactgactttcacgtagtgggttttttttttttttttcttttttgagacaaggtctcgctctgttgctcaggctggagcccagtggtgcaatcatagctcactgcagtcttgacctccctgggctcaagtgatcctcctacctcagtcttctgtgtacgtgggactacaggggtgcaccaccatgccctgctcattttttgtatttttttgtagacacaaggttgcaccatgttagccaggctggtttcaaactcctgggctccagtgatctgcccacctcagcctcccaaagtcctgggattacagacatgagcgaccacaaccagcctctcttagtatgtttcaaggttcatctgtgttgtagatcttactggcttttaaagttaacatttagtaagtttgattcttgataggatttataattaatttttaatcatagaaatattcttaaaaatattaattgaacataaagttgatacaataaaggtgtagactttgtggcttcaggaatcagtttttttcacaattgactctacatgaatataatattttgttgctttttcagaattttaagtaaaactaatatttccatattgtatttcgctca

SEQ ID NO: 273276 - DNA, 424 bp, Homo sapiens
ctaagacaagagagcacactttcactatgtctgttcagtattactttggaaattctaaccagtgcaataatgcaaaaaataaaggcatacagacagaaaagaatgaaataaaactgttcttatgcacagatgtcatgactgtccacatagagaatcccacagaattttaaaaagattcttggaactaataagtgagtttagcaaggccataggatacaaggttagcacacaaaacacccattgcatttccatattactagctattaacaattggaaactgaattatgaaaaataataatgctccaaataataaaatacttctatatttcacataaataaccaaaatatgcaggatttttataatgaaaattataaaatgctgatgtaagaaagcaaagaagatctaaataaatggagaaacata

SEQ ID NO: 273277 - DNA, 448 bp, Homo sapiens
tatccatgaatattttgagagtataattccaacagataagatcattataaaagtaggtagctagacaattaaatgctagaattgtcttttgtaattgatatttatcctgctctatataataaataatgcgtttataattcagttaattttttcagtgttactagtttaggaacatctgacatgcattgaccattataaatatatttaatcatgtttacttttgctgtgaaaatatacaatttgggggcactgggttttgagccttacagattttattttgagtcttatttgtatactaaatattaaatttaggtttccataagtgctttacatttaacataacacatgtacatgtacttgtttcactagaatataaaaatgttttatgtcttggtgtactttacattttctaacataattgtctatatagaatataagggcatatttt

SEQ ID NO: 273278 - DNA, 440 bp, Homo sapiens
ctattttatcagccaacaatggtgctggaaatacatcacaaatgttgattctgaccaccttaatacagtaacgtcaacaaaaaaagtacacagaatgggaaggatctaagcactgaaaataacaggcataaaggtaattgtctacaaagcagtactaggccaaacttggtggctcatgcctgtgatccctgcactttgggaggccgaggcgggaggatcatctgaggtcagaagtttgagaccagcctgaccaacatggcgaaatcccgtctctactaaaaatacaaaaattagctgggcgaggtggcaggtgcctgtaatcccagctgctcaggaggctgaggcaggagaatcacttgaacccgggaggcggaggttgcagggagccaatatcacgccactgcactccggcctgggtaacagagtgagactcagtctca

SEQ ID NO: 273279 - DNA, 347 bp, Homo sapiens
aagggggagagtactacatcaagggtacatcccgtgggacaaaagaatctgaacaacagccttcagtcctaggccttccttcagacagcctacccaaatgagaaggaaccggaaaaacaaccctagtaatatgacaaaacaaggctcttcaacaccccctcaaaatcatactagttcaccagcaatgggtccaaccaagaagaaattcctgatttacctaaaaaagaattcaggaggttagttattaagccaatcagggaaggactggagaaaggcaaagcccagtgcaagggaaaaaaatgattcaggaaatgaacggagaaatattcatgggaatagacagctta

SEQ ID NO: 273280 - DNA, 1130 bp, Homo sapiens
agacgtttgttttaaaattaaaaaagcagtcacttactagtcagaaagccttctgaggattcctgctgtcagtatttcagacaattgtgtgttccaggcccaaacttgaattccacactgactcaggtgtgtctggtatcctactgctatatattttgcaaagaatgctcccacaatcgttcatgtaatctgagagtgagttataattatgaagagcagagctggtcttatatacagaccaagcacacagcaccaacgtggtattttaagaggtgcccttggaaggtgtttttgtcttactgaaaagaaagaatcaggcagatgtggatttgaacatttgctctgcacttaccagcttgtggtctttgagaagatcacttaatcccttttagcctcaggtttttcatctgaaaaatgggaataataatatctcaataatatataacataaagcaggggtattagaacagtacctctgtataccggagagtaagagctcaatgaatgcccccttcctcctggtctgtgcttccctggtgccctggattgtgttgttagagaggcatctacttgggatatggcagtgtctcaatgttctggttcaaaattaaacatcattaagtgtaataggttcaggcactgagtcatctgtcactagcacccacgcaggactcatttatctgataaccaactcagaccaagggggcagagagctctcctacccactcacagaggtggttcaatcaacagcctagctggataaatggatcattgttcaggaacatggtgataaggagggaaaggccagaggtgggagaccacacctaagtaaacgggagttccccagagggaggctatgaccaagggtgcttggagtagaagacaagaaagtctgagctcgtacctagagtgaaatgacccccagccccattccattttttaccccttcattttacaatcttacttggttcaaagtataaaaacttcattatgaaaaataattttttaagcataaaaagtgtattaatgtccctactcaatattgaacatactaggaagagtatttcattgcactgcaaataactatgagaatcacatacaaacatgagaactataatttcaaaaaagaaa

SEQ ID NO: 273281 - DNA, 532 bp, Homo sapiens
tccatgttgtagtatgtatcagtcctttattcatctttatggatgaattatgtatataaatttatgtatataccacattttgtttattcatccgttgatggacattgatggacatccattgatggatattgatgacattttgtttattcatccattaatgggcacaataaccaaaaagacatttccttttggttattgtgagtagtagtgctataaacatgcatgtacatgcatttgtttgagtacctgtttcaattcttttggatctacacctagaagtggaattgcagggttatcggtaactctaggcttaggtttttgagagacctccaaactgtttttcacaacagctgtaccatgttatattccgaacagcaacatataaagtatctgatttctctacatcctattacagccatcctagtaaatgtaaagtagcatctcattctccttttgacagagcaatatgtgatcagcttaattcctctaaagtcaaatttcagtagtaaaataaagttgatgatgaagatgt

SEQ ID NO: 273282 - DNA, 423 bp, Homo sapiens
ttttagaggcggagtctcactatattgcccaggctggtctctaactcttgggctcaagtgattctctcacctcagccttccaaagtgctaggattataggcgtaagccaccgcacccagcccttttttatttttaacatgtgaacttacaccagaagttgattattatgcttgttaagataagctttactttaaaattacctctgatcacgataagtaaaaaaaattataattgtgactagaataaaatctataattctgactagatttctttaaaatctgcatttattatgtcaaagtagatctattattgataaacttgcactcagtgtttagaaagcttatttgtatagtctcatcttgttttattaatgtaaaaagtacgcatgtttgtgagaactttaccaaaatcttcatctttgtt

SEQ ID NO: 273283 - DNA, 185 bp, Homo sapiens
ctggcacacaaaagaccctcctgacaccagctgacctagactcacactttcaaagatcccatcagagcccaccatcctgggagcatcaccgacatcccttcctccggcttctcgaatttgcatccgacctttgaatacccctccaccccgcaatttgcacatgagcacagttaccccaacactga

SEQ ID NO: 273284 - DNA, 474 bp, Homo sapiens
ttcagacctgtggatcaagaagaaacatgagatgaccacagaaaatacggttgctgatccctgccttcaaggaatgctggccagttttctggagactcccagcctctcagctgagaccacaggtagttggtcagactctatactgcaggaggtaccctgtgcacatgatcacccaaatgggctttctgttccagaagaagatggcactgagtcacttttctctgttgttaccctctaaatacaactacataccccgctaattagtcaatggaccatgatacaaggactctgaaagccgagagaaggaaggcagactggctgggagcttcaagacttgagaggtctggcactggcttcaccttccacttttccaccatgctgtgacacaccatgaggttctcaccatatgtggccatctgatcttggacttcctagcctccagaattgtaaacgaaataaatctctcttctttat

SEQ ID NO: 273285 - DNA, 479 bp, Homo sapiens
gctataaacctattccataagtattctagtcctatttgttgatatggtttagaagaatgtataatgcttaattgttttcttaactatttgtaaaacatttaattaacacactgaatcatttataaggacgtactcatgcaaatgcatatttaaatttagtcctttgttggggaccctaatgtttgggtcatggggggatatctctcatgaatagattaatgccccccaaggggaggagatgagtgagttcctgttctattagttccacagagctaactgtgttgttaaaaagagtctgatacttcccttctctctctctcgcttcttttcttgccatgtggtctctgctcatggcgactcccctttgccttctgccatgagtggaagcagcctgaggccctccaaaagcagatgccagagccatgcttcttgtatagcctgctgaactgtgagccaaataaacttctttataaattaaa

SEQ ID NO: 273286 - DNA, 480 bp, Homo sapiens
agaaccaaactgaactggaatttaaaaattcactacaaaattttcataatagtgttggaagcattaacagaggaatagatcaagctgtggaatctcagagctcaaaaactgattcttcaaatcaactcaatcagataaagaaaaaaattttaaatatacaaatcttcagagaggatactcaatctgtatccactgaacaatttctcatttcctgcttcctccagtccggagtaaccaccattctactttttgtttctaagaatttgatcactgtagataacctcatttaagtggaattgtgtagtatttatctttttgtgattggcttatttcatgtatgtgaaatgtaaaaaaaaaatgaagctaacaaatattttattaaaactaaacattaatgtgtttcatgccactgaactgtacacttaaccatggctaaaatggtaatcatattttatcacagtaaaaaaaaatggaaaaaca

SEQ ID NO: 273287 - DNA, 88 bp, Homo sapiens
tttgagaatcatgatcatattcactttttaaccttatcctttaaaaatggtctgcttggtagagggttaaaatagaaagacaacatac

SEQ ID NO: 273288 - DNA, 359 bp, Homo sapiens
ttctggtcttgactgtctgtgagagccttcctggtggaaacagaattgttagtcagctgtcatctccatggtgattttttaaggctaagtgctgaaccagatttcttttcattatgggagtgaaaatgaactcagcggattttctccccgattcctctccattttctgttttcagacttctccatcatgttcttgtgcctggcagtgttaaggggctactatttggttggaagaagcctttggaaaagttgttgaagagtcacgtgcacaagtgatgtgctgagcagactggatcttgcctgatggccagaaaattaaaacaacactgaaattaataaaaattcaaactcccattctgc

SEQ ID NO: 273289 - DNA, 202 bp, Homo sapiens
ggcacattaaatgtttcaggtggatccaggtggatggatgaggctcttggctggaagaaatgctatttgggaaatgccaacaggtgaggtggagagctggcaagcagaccacttgcaaagggctctccagccaaaatgatttgtgtgagaccggaggccctgtggtgctgggggcaggtgaaatgtcagagctacagtgggg

SEQ ID NO: 273290 - DNA, 217 bp, Homo sapiens
acttcatctcatttcatcatttcatctcatgatttcatttcatctcatttcatttcatcatttcatttatttcatcatttcatcatttgacttcatgtcatcatttcatatcatttcatcatttcatcttttcattccatcatttcatcattacatttcatcgtttcatttcctcatttcatcatttcatttcatcctttcatcatttcatctcatc

SEQ ID NO: 273291 - DNA, 162 bp, Homo sapiens
ttttggcatacatgtagaaaagacagtgctagagagatttcattctgcacatatggcctagatctgcagcacataaagttgccaagaagtgtattagaagtggtaaagtgttggaaaggagctgaataacgttgattaaataaatggtgcttgctaaactgt

SEQ ID NO: 273292 - DNA, 410 bp, Homo sapiens
gcgacgaggagggcggcgcccagagcagggactgtgacctggcactgggctatgtggcggccgggcatgcggagctggcctggacccaggaggccccggtcagctcggggccactcctgtcccccgtgcccaagctgtgccgtattaaggcctccaaggccctgaagaagaagatccgcaggttccagccgacggccctgaaggtcatgaccatggtgtgaggtgcagtgactgcgtcaagagaagcctgctgcacacaggggccctttccatgcagtgtcctgtgcatgtctgggtttcagtgtcgtcttgccaagtcgctttatcttccgaggccaccgtttaacaggagtccccgcagatgggttctgccctgtggagtatggccgtgagtccccgccccagcaaag

SEQ ID NO: 273293 - DNA, 396 bp, Homo sapiens
gggccgggccactgaaatggcctccctgagagtgcctgcctttattcagaagtagaaagggatgaaacacgccctagtctcctgcagcacccccagacttgataggattaggaaattccagcctggcaaattctagtcagaccggttctctgctcttgaaccctgacagtgcgtgccagtgggacctggaagttcattagtgattctagtttcgccgtgaccttctgccctgtgatcttttgtcgcccttgaagtatgtgatctctgtgacccacaccctgttcgtgcactccctcctctttgaaaattgctaataaaaactcgctggttttacggctcagggggcatcacggaacctgcggacatgtgatgtctcccctggacacccggctttaa

SEQ ID NO: 273294 - DNA, 474 bp, Homo sapiens
ataagtagatgatgactggtcactgattttttgtctagaccccctgatgggctccaagccagctgagtctcaatcatgtgaagaggaacagggttttcatttgagcgaaaaactcacaccactcattcttgggggtgtaactgaaaccacaaatctagcatgttctaaggaacattatcaggcacagtcaggatccagttcaagatatatctagttgaccaaacacattccttatataggcagtcattcaagagctcctacgctcagaaactgctatcagtacatgacgttccttgttattcagtgttcttttcctaattttcaccattttaatgtttatttcctcttcaatatatgagtatattaagtatgtaatcaaagtatataagttaagaatagtaagtgtgcaaactcttatgtgcttccctgtcttcacatggcaaaaaagtaaatatttctattttggctgaaaca

SEQ ID NO: 273295 - DNA, 656 bp, Homo sapiens
aattaacattttttgagtgttcatctctcagtccctctatggccatgaaggtgggagatgtgactctgtttagtctcaagtaaagaaatgcaaactgagataatgggtacaaatggagatgaagcaaagccctgtgatgttcaagttcctggtttctgttaccattcagtctggctggacctctgcctttcccatggtaacatgacctttctaatgaattctcccttttcatctaaactgtttcagattgagtttctctcacataactaagagatctgattactatagcttcggagcttctaaggcatcttatgcacttgtctcttccccactgttcaatctgaagcatgtactctgccctttagcaaaaatcacaactccaccaggtgtggtggctcatgcctgcaatcccagcactttgagaggccaaggcaagaggattgtgtgaagccaggagttcgagtccagcatgggcaaagcaagaccctctctacaaatgaatgtttgaaaaaaaaaaaaattaaggccgggcatggaggctcacaccaataatcccagcactttgagaggccaagacaggaggatcacttgaacccaggagtttgagaccagcctgggcaacatagcaatattctatctctaccaaaaaaaaaaaa

SEQ ID NO: 273296 - DNA, 566 bp, Homo sapiens
gctggagtgcagtggtgcgatctcagctcactgcaacctccgcctcctgggttcaagcgattctcctgcctcagcttccccagtagctggggctacaggtgcatgccagaatccctggtaatttgttgttgttgttgtattttttagtagagatggggtttcaccatattgcccaggctggcctcgaacttctgcgctcaggcaatctacttgcctcagcctcccaaagtgctaggattacaggcttgagccaccacacccagcctgatgataatttcttgattacagattatttgcgaggcactgtgcaaagtgatttatgcacatcatttcatttaatcctagcaataaccttaagagttaggtattattattcccaattttacaaacaaaggaattaaggctcaaagaagttagtttgtacatagtcgaacagttgggtagtggtagagtttgaattcaaacctaagttagtctgagcctatcttatattagccaccttgttccacagaaagcagttttgtttctttgaaggacagggcagcgaatgggcagtgaggcaaggt

SEQ ID NO: 273297 - DNA, 268 bp, Homo sapiens
gccagcccattcattcattccacaaacaccaaagcacccactgcaggcccaatgtgtactccagatcaggaatgtcaccagacaggcaggatcaggccgcagagtccaggaagtcccccgtcaccccggcgggtgactacgcatcagacgggtggctcacgttaatggcctggtccctgaggaatggcaccccttgttttgtagctgggtgtgcgcatgcacacacatccggccctttctctgaacacctgcattacttccacttctg

SEQ ID NO: 273298 - DNA, 355 bp, Homo sapiens
gacagtgacaaggttcccgatgagcacttctccatgctgctgcctaccatggagggcatgggagaggactggggatgggacagggagcaggaaggggttgctcagtcagtcagtgctggcagagggaggggcgctgggaaggcactgcaggccctgtgtctggggcctctcagcacaaggactgggctttgcacgcgaggactgaagggtcaaaggcgagggccaaggtttcctacgtggcattcactcgggagggctcctgaagctggagacacactgccttactttgtgcgtgtttttctctatgcattatccagtatttggctatgtgtgcatttagctcaataagcaatga

SEQ ID NO: 273299 - DNA, 376 bp, Homo sapiens
gtagtcagcaactctcaccctcacccgctctgtgaatgttcagctccaatgtgtgcgggtgggacccatgcttgtccctgccaggcttaagccctgtctgtcagcatcacgggtctgtctgcagctgcctcatttctgtggaaaaatgagcagcagcccactgggtatttccagtgagcaacggtgggttttatgtaaagagtcagaataagcacgtgtaaacacggctgtggccggcacttcaagagggctgtggcccgtgggccttgttttggagaaattcgctgagggaggggttggaaccacctcacagcaggagcaagcgaaggaacaggtgggaaaagtgcagacgcagaggatcaccgagctgtcgccc

SEQ ID NO: 273300 - DNA, 482 bp, Homo sapiens
caggtttacccttcttttaggcactgacctgtactacctgcaatatcttaaaatagaagcactgaaatgccattgtaaagaaagggacatgacagtgtccagaggacaaggccttgtctcagcagaatcagtttcaggagctgaaactccttccttcttacagctacagcacttctctggtggttacatgacagcaagcaattgattctggaagtatttaggaggcaagattaagccatcattgtctgtgttctcacaatacccagaaacaacacctattgcagcctttgcagtacttcattgcacttaactttttgtccatctgcctccttctcctgtctgtaaacacggaggtggtttctgattcatccaaatctccagccccaggcaggtcagggcacagaacgatgtaggctgttttcactgttcccctaaataagtgcctgacccatagtaaacactgaataagtatgaactacagt

SEQ ID NO: 273301 - DNA, 445 bp, Homo sapiens
aacctggcatgagcatgaaactggaaattaacaaggaatgatgcagatgaacacctgcagcaagaaccactctacacctgtccacaggatgtctgaaaaatgaggctgtgttcccacaaatctgtattagatggaactgaattaacaacagtgctccagaaccctggaccatccagcctaaattccatttggggatgagatgcgtttttgcctcagaatcccaagcggtaagcaccatgaacccctcagttcatatctcaatcttcctttctattggattttgttctcaatttctaacttcttactagattatatctcatttaattctacttgttaaagctgatttattctaaaatttgatgaagcaaaagtctggattttgcctcaatataataagaaccacttaattataaacattgatgcagggctttgctaacctgcattt

SEQ ID NO: 273302 - DNA, 2129 bp, Homo sapiens
  misc_feature (384)..(384): n is a, c, g, or t
  misc_feature (1073)..(1073): n is a, c, g, or t
  misc_feature (1770)..(1770): n is a, c, g, or t
agttatgactgacccttcttgactcctgccacctgtctgtcagttatcttttaaagtacagttagggtctcggatttccagaactggggctgggatggcctttgagtgtcaggcattcctgttcttggtggaggtggactgctcagcctcaggtcccagtgctgggcccgaggagggacagcgcgaggtgtgctggcacctgcagtcttctttcttgccaccgcataggacatcactagacaaaagacatcaaaatcagatgctgttgtcccacgttgccatctctctcctcaaatcagtgtcccaatattcaggccgacttcggttcatcctgttttagctgtgcccactagaatttaaaatgtggccgtgcagctcctgacnctgctgagggtgcctcggaaccagaagactgtagagctgcttttctcccaggggagaaactaatgatttgcagaagctagtaatttagagtctatggaacttgccccaggctctcccttccctcctgctttcagtggtactgaggagctgtatttaatctgaacagaaaattccattttcttctgatgattttgtgactatatgaaaatggaattaagggattgtagatttcttccccacaagcatattttaaaatccagagtaaaaataaaaactttcgcagagtaattgagaataaaggtgagaagttttctaataatactttaaaaaattctcatatacagataaattagaagaagcatgaagacttttccttaaagaaatgttcctttccctgcactttgaatagatggacaaaattagtatgcagggacagatccaacttttgtgggagctcatacactttggtgtcggtgcggagggggtggttcttctatagaaaaagaatgcaaaaatatctcccttttgcagaatgttcacattctgcacgtgtgagctgctgttctcctcacctgggcctggagaacatgggtgagatgctgagccccagggcttaggccagctgcctctgcgtatggaggctgtgtgtgcccctcagctgtgccagggaggagtcacagcagacggcntgctgccatcctaatctctgtggcacacaggagaatgtccccacccccaaggaagtccccatgctaattctagaatacgtggctatgtcaccttacatgataatccagagactttgcaaatgggattgagtgaagggtctggagatggtcctggattttccagggagccctaatggtaaccacaaggtccttataggaggaaggcaggagggtcagagtcagaaaaggagcagtgaagacgaagcggggtcagggtgattcaaggaaggggctgcgagccaaggggtgtaggcgcctctagaagctggacaaggcaagggaacgggttctttccgggagcctctagaggcagccagccctgcccacaccaagaacgtaagaggatcgacacgtattgttttaaacccctacacctgcgttaatgtgttaggctggactggctccagcctctcccctctagcctctcagcaacctccacagttaggccctcctggagacccctcctggctgcctcaggccatctcctgtacatccctcctcctcccctcacccagcttgttctttctccccacccccatcttccttatttttcttcttttctttgcaacctcaaaacataaaccctcaagctcatttccgcagcctgatgtgcagtcttcctctctgtcttgtgtctctcctctcacccatgcctccntgggggacagaaggctacaccgtgtggctctggcagcccctcactccacacagtgtaggcatgtgctgttctatcacacatggacactaagagatcttgtcaagtagacagagactaagaggacctatgtgttcatgacactttttaaaggtctgagctgcccattcagctttgcatgaaaatggagattgggagttttgaccaccccatgactgtggcttgttgtgagtgtctgctgtgaagtggcactgcctcttcacaatatcgttggaattccatttggccaggtgacaagaaagtattcacaagcctaaggaggaacttatctgctccttcctgaggaaatatgtgcccccacc

SEQ ID NO: 273303 - DNA, 1727 bp, Homo sapiens
  misc_feature (338)..(338): n is a, c, g, or t
  misc_feature (585)..(585): n is a, c, g, or t
  misc_feature (698)..(698): n is a, c, g, or t
  misc_feature (861)..(861): n is a, c, g, or t
  misc_feature (1103)..(1103): n is a, c, g, or t
atttaaatgtctgtctacccagacttactcgttcaaaaactgtctcatttacattttgtagaagtagagtaccatagtggatagaaccacaggctctggggctgtcctgtctggggttatttgctagctctaccacttaacaatcttagacaagtcacttcagtcttttttttgagacaggatcttactttgccacccaagctggagtacagtttaagagctcactgaagcctctacctcccagactcaagtgatccttctgctttagcctccctaagtattgggattataggcatgagccactgtgcccagcctcacttctctttttttttttttgngatgggcccttgcactgtcacccaggctggagtgcagtagcctgatcatggctcataacagcctcaactttctgggctcaggtgattctcctgcttcagcctcccgagtagctgggactgcaggtgcatgccacaactggctaataattttttgtagagacaaggtctcgccatgttgcccaggctggtctcgaactcctgggatcaagcaatttgcccacctctgccttccaaagtgctggtatcncaggcctgagccaccgtgcctggccctcacttcattgttgatgccttagctccctcatttgtaaaatggggataataatagcaccaacttatgtggtggttgtgagaattcantgatttaagctataaagctggtattcttggccttagcttatcttgaggggggtggtatttatttacaaataaaaggattatcagcacttagctcagtgtctggcacatggaagaaggcttttaatgaatgcagaatgaatgaataaatgagagcaaatggtanagaatgagcctacacaaaggagatgtttctcctctagttctaccagttggcaagatccctacagctaaaaacagttccaccatataatctccagacctggcctggccacagagtagatcagactaaaaatagagcctgctaagcttgataaaaaagactgatattggcacaccctgtccttccagactcctgcaagcctcgctacttctactctggtgtctagaatccacctcacaggaaanactaaagaaatgttttcctttaatgtccaaaatcacaccagcatatttggaagttagttttcaacaaaggttctactgactgagtcagttccctggatttagaaggaaataaatttcttaagccctaactagaacaagaaatcaggagttagttcatacttagttgaagaatgatcatgtatgaattcataaatatagtcaatgactacaacaaaaaaatttcgtgatcagaatgcctatttcagttggatatgagtgatcagatggtagtatgtgtacccattgatgccatacaaattttgtaggaagctggtagagaatttggttttaaagaggtctgtgttggccgggcacggtggctcacgcctgtggtcccggcactttgggaggccgaggcaggtggatcacgaggtcagaagtttgagaccagcctggccaagatgttgaaaccccatctctactaaaaatacaaaatttagctgggcacagtggcaggcacctgtagtcccagctactcgggaggctgaggcgggggaatcgcttgagcccaggaggtagaggttgcagtgagccgagattgagccattacactccagcctgggcaacagagcaagactccatctc

SEQ ID NO: 273304 - DNA, 1569 bp, Homo sapiens
  misc_feature (338)..(338): n is a, c, g, or t
  misc_feature (427)..(427): n is a, c, g, or t
  misc_feature (540)..(540): n is a, c, g, or t
  misc_feature (703)..(703): n is a, c, g, or t
  misc_feature (945)..(945): n is a, c, g, or t
atttaaatgtctgtctacccagacttactcgttcaaaaactgtctcatttacattttgtagaagtagagtaccatagtggatagaaccacaggctctggggctgtcctgtctggggttatttgctagctctaccacttaacaatcttagacaagtcacttcagtcttttttttgagacaggatcttactttgccacccaagctggagtacagtttaagagctcactgaagcctctacctcccagactcaagtgatccttctgctttagcctccctaagtattgggattataggcatgagccactgtgcccagcctcacttctctttttttttttttgngatgggcccttgcactgtcacccaggctggtctcgaactcctgggatcaagcaatttgcccacctctgccttccaaagtgctggtatcncaggcctgagccaccgtgcctggccctcacttcattgttgatgccttagctccctcatttgtaaaatggggataataatagcaccaacttatgtggtggttgtgagaattcantgatttaagctataaagctggtattcttggccttagcttatcttgaggggggtggtatttatttacaaataaaaggattatcagcacttagctcagtgtctggcacatggaagaaggcttttaatgaatgcagaatgaatgaataaatgagagcaaatggtanagaatgagcctacacaaaggagatgtttctcctctagttctaccagttggcaagatccctacagctaaaaacagttccaccatataatctccagacctggcctggccacagagtagatcagactaaaaatagagcctgctaagcttgataaaaaagactgatattggcacaccctgtccttccagactcctgcaagcctcgctacttctactctggtgtctagaatccacctcacaggaaanactaaagaaatgttttcctttaatgtccaaaatcacaccagcatatttggaagttagttttcaacaaaggttctactgactgagtcagttccctggatttagaaggaaataaatttcttaagccctaactagaacaagaaatcaggagttagttcatacttagttgaagaatgatcatgtatgaattcataaatatagtcaatgactacaacaaaaaaatttcgtgatcagaatgcctatttcagttggatatgagtgatcagatggtagtatgtgtacccattgatgccatacaaattttgtaggaagctggtagagaatttggttttaaagaggtctgtgttggccgggcacggtggctcacgcctgtggtcccggcactttgggaggccgaggcaggtggatcacgaggtcagaagtttgagaccagcctggccaagatgttgaaaccccatctctactaaaaatacaaaatttagctgggcacagtggcaggcacctgtagtcccagctactcgggaggctgaggcgggggaatcgcttgagcccaggaggtagaggttgcagtgagccgagattgagccattacactccagcctgggcaacagagcaagactccatctc

SEQ ID NO: 273305 - DNA, 395 bp, Homo sapiens
catttccaattaatcttggaatgagagccgagggcaagaagccagcggtgcctgagggatgctaaagagccaaccgatccagggaaacaaatgccagcgagggaccccacagcaaagagacagacactgtgagcaactctcctgttaccatgaggcttgcgaggcgtgtgtgcgggtctccgcattggcaccatctgccaattcctcaggaggacagaacaaaccagtgaggcatgaagattagattatgtaacgctcgaggattgctgttttcaaagaggaaacaaatggaatgaattgatttgcttgtcaaagtcatgtcactaaaggagatctattccctccccttctaagaggacctcattaaagagtggaatgatttcacagattcagaa

SEQ ID NO: 273306 - DNA, 407 bp, Homo sapiens
cttttattaaaagttctggccataaaagagaaacacctattaggatagaagaatttagtaaaaatagtagtaataacaagacagtttggaatatgtcatatattcagtaaatttcaaaagtcttcatctcatttaaaatacagtattgtgcccatagatcctgaatgcaatacctttgtaccctagggcttcctctttcctacactaaaaacattctatttaaatgcagattttgatttgcaatctaggaagaggattctggaagaatgggaagaaggacaactctgcatctattaattttagttttatgttattcgcgtttttcctctcatccttatctcctccagcccttccttcctgtaaaaggatcctttctaaacatacaaataaagacatgcttagaattt

SEQ ID NO: 273307 - DNA, 197 bp, Homo sapiens
atgcctctgaggtacactccaggtaaaaaaaaaaaaaaaggagcaattcacttttactaggaagaatcagggaaagctgcatggaggaggctggttatagctgcccttgctgtgaagaaattcagaggaaaatttctgaatccaagagggtcatctactttacagacaatcaaatgagacctgtgtcccttgtcccg

SEQ ID NO: 273308 - DNA, 479 bp, Homo sapiens
acccaacccacagtgtcatttgtgagcacacagtctggcttcctttgggggatggtggctttcccgttaccagcagggttatcagtaattcacacccacatggctcatctacctgaaggatccagactgctgaagcagaactgcaacactaaagtctgtgttgggtggaagcagccatgtccctgctctgggctaggtggtgtggatgaggcatagaggaacatgtctggctggacacatagctcaccataggaacatgtctggctggacatataactcaccatggacactttctgctggacacccagtgtctgtcctcattctcaagctgtttccacagcttcaaacacatcaagaagataagcggctgaagacaaaggttaggaaaagtggccatccaccacctgagcccgctgatgagtcctaaagacaccagtgcctcctgagtgaggtgtgcggaggacacagcaccacctgca

SEQ ID NO: 273309 - DNA, 540 bp, Homo sapiens
tgtctgccaagatgacttttgggatggcattactccagtcagttgggctcaaaaaactgatttttctcagcacttgcagcttccacttctcaaagaggacattttgttttttgttttgtttttgagacagggtctcattgtgccaccgcactccatgctcggtgacagagcgagactctatctcaaaaagaaacagcaacaataaaaagaatcactgggggtagggattatttgaaaatgcagattccggccagatacattggctggcttacacccgtaaacccaacgctctgggaggccgaggtgggagggttgcttgatgccaggagtttgaaactagcaggaacaacataatgagaccccatctctacaaaaaacaatattagccaggtgtagtggcacacacctgtagtcccagctacttgggtggctgagataggaggatcgctttaagccttggagtttgaggcttgctgtgagccatgattatgccattgctctccagcctgggcaacagagcaaggcactctctctaaaatt

SEQ ID NO: 273310 - DNA, 483 bp, Homo sapiens
cgagatcacgccactgcactccagcctgggcgacactgcaagactccgtctcaaaaaaataaaatccaattatcctctttatctgtctctttctcaacataatatataaatgtatatatatacacacacacacatatttttctatgctgtgtgtatgcatatatatgttatatgtgtgtatatgtatattatatatataacatagagaaagatgttttaatatctcaaatcttgatcagtcttacatgaaagagactatatagcatgtccaattctcttaccatttatgataactctctactgattttgatgtgatcatatattcctgcatcttccttatgatattgctaaagctaagagtgctccattctctaggaaaatgcgttgtcatattcctaaatgttgactaatactctatatatcatttatgaagaggttattatgccaaagtaggaaataaagtgaattttcatatgtcatata

SEQ ID NO: 273311 - DNA, 548 bp, Homo sapiens
atccattcacctattgaagaacgtcttgtttgttcccaagttttggcaattaggaatcaagttgtataaacattagggtggtggtaacgtatggaaggaagggaagtgttctgtagttctgtgattagatcatagttttatcattagctcttagtgaccctgtgtccctaggatgtgacctttacgagttcttctcagttttgttttatttacctcttagatgagacaagaaggctagtgggggctggcgttgggtatttgccttccaccaagtctgttaggctctggtaagatagtttctcttgaggacagacattgtttagaggaacaaaatgctctgggcatatttcatagaggctaccttattttccttttaaaaaaataggccgggcacggtggttcacacctgtaatcccagcactttaggaggccgaggcgggtggatcacgaggtcaggaattcaagtccagcctgaccaacatggtgaaaccccgtctctactaaaaatgccaaaattagctgggtgtggtggcgggcgcctgtaatcc

SEQ ID NO: 273312 - DNA, 488 bp, Homo sapiens
gaatagaatagagaactcagaaataagtatttgtatttacagccaactgatttttaacaaaagcaccaagaacatttattggagcaggacagtctcttcaataaacgatggtagggaaactagatatccacatgcagaaaaatgcagctcaacccctatctctcgctatttacaaaagccaactcaaaatggatcaaagacttaaatgtaagactcaaaaccatgaatctactagaataaaatacagggaaaacacttcaggatattggtctgggcaaaaattgtatggagaagacctcaagagcacaggcaaccaaagcacaaatagacaaatggggttgcatttcagtaaaaagcttctgcacagccaatgaaataatcaacagagtgacaacttgcagaatcagagaaaatattgcaaactatttatctgacaagctattaatatccaaaatatacaaggtgaaactcaacccatcagcaaaaaa

SEQ ID NO: 273313 - DNA, 379 bp, Homo sapiens
tgcacctgtgaggcccaagaccagccccggctctcccaaaaccgtgttcccgttctcctaccaggagtccccgccacgctcccctcgacgcatgagcttcagtgggatcttccgctcctcctccaaagagtcttcccccaactccaaccctgctacctcgcccgggggcatcaggtttttctcccgctccagaaaaaaggatctgtgctgggagctgtttgaaattcgaatgagtctttcagagaagtttatttaacttgtaaaacttcaggtcctttcacaccatttcagcgttggatcacagacagctcttcctttatatcccagcaacttgagtttatttttcaaataaaagtctgttttcccataaaatgccaaa

SEQ ID NO: 273314 - DNA, 594 bp, Homo sapiens
ctctctcagactcagcttcctccttgaagactgggatgctatgtagctcagaggaaacatacacctgaaggtgctgccccggggggtgcaatgacctgttactgaggctggatggaggatggcatccatcatcagctacaggtgcctcctctatctacaggttcctgctccatctatactagccacctcctggacaagggctccagtgtcctccatgacaccagctttctccagagcctgtgcaggatttccttcctctaccctgaatcagggtgattcttaaaggacagtttcaggaacatataggggcacttgggtaatcttggtcagtaactgacctttaactatcatccatgtgaacatctacagttagggattttcttggtgatgtttggcaaaaagtaaagaattccccaagtgtgaagcctcattcattcacttattcaacaaatagttattgagcacctactatgtgttaggccctgggccaggtgctgggaatacagcagagacagacctggctcctgccctcatggagtttgcagtcattcattcactcactcggtgccgatgatagcgagggatcctctagat

SEQ ID NO: 273315 - DNA, 249 bp, Homo sapiens
gtgtggacgtgtggtgtgtgtgtggagatgtgtggtgtgtggaggtgtggggtgtgtacaggtgtggggtatgtggagatgttggggtgtgcaggtgtgtggaagtgtgcaggtgtgtggaggtgtgcaggtgtgtgggtatgtgcaggtgtggggtgtgtggtatgtggtgtgtgcaggtgtgggtatgtggaggtgtggggtgtgtggaggtgtgtgatatgaggagtggggtgtggaggtgtgggg

SEQ ID NO: 273316 - DNA, 945 bp, Homo sapiens
tcttaaagaaggcctttttcctgttatcacagaaaacaatggcagcagcctgtttgccaggggtagcagaccctttcttctgcctcaacacacttggtggataaggcatactgtcactgggaacagctgctcactccttgtgatgcttaatggaggtgtgggaatgatggtggataggctatgcctcattaacatggggagtctcgaaactggaaaaagtcccactgttgccctctttctccccatccctcctctcctccatggagaattactatgctgtagactaagaattttttttaagtggatgcgtagttatatctatccctggaaatgagctagacttccttatttcaaggaagaattaccatcctcattaaaataaaagctgctgtttattaagcgcttactatctgtcaggcctgtaacttactagcttttcagaactttacctatctcacttcatttagtccacagaacagccctatgaagtgatattattatcttcctcttacagttgaggtgaccgagactcaaaggaacatgagagctcttggtctcgtggattagcttcagaatctagcaggggagaggcatccttggaaattggcagatttggtttggaatctcagtgagcacttcttctttaaactcaatggaagctaagcagagtttattaatctaaaaacttcttagacaataggcctgataatggggaatgaatccctgcttaattatctcaccagatgactgggtagtgacctaagatacactttcttcagtttctgggtaggattttagtgactggtttcccctgggatacatagataactctcctgctgcagtccttaccaactgccaaacccagatctcacccatctctagcttcagtaagtttgagtctcctcccagctcatccactttattccaccaaagaaaaatgtgaac

SEQ ID NO: 273317 - DNA, 322 bp, Homo sapiens
agagctcatgagtcacctagtgtgggatggggtctgggtctgcatttgttccggtggttgcttctaatgtccagccctggttgggagccactgccttaggtcaccaactcttcctggttactgctccctgtcctttttcttgtcttggtggaatcataagataattggaattttacggtgacatgcaaaccttctatagtttcttgatcacattttgtgatctgcttcattgagatttttttgtaatgaaaatttgttaggtggtcctgtagtacattctccattctcccgttccttggtttacgagggaagcctgctgaat

SEQ ID NO: 273318 - DNA, 294 bp, Homo sapiens
cactgtggcctgtcatgtgctgttttttatgaacccctagacatagacatagtgatggatgaggcagggtgcgagggtcaagatcccgtggtttgttcctctgtcccaaggtgggagtgagtgtacctagtttattctgaagggggaggtccccatcctttccataggaaccatcaagagcgtgagtttctgcagcgtcctcacattttaggaagtatctaacagttgctttgtcaaggagttcgagttcttacatccaagttattttatctagactgctgcaaactcactagg

SEQ ID NO: 273319 - DNA, 483 bp, Homo sapiens
acattcttgatgtattatttggaatgctcttcagaactccaagctgctattcttaacagcatctgagcaaagaaaatgctttggacatgatgggtttcattcattcacttattttctaaaaagtaggtactgactaagaataacctatgtcctgggcatttcatcaggtgctagagaaatggagataatttggacacagttcttgtttgcaacgcttttacctccaaggagaggagatagtcatagtcacaccctggattgtgggcagtcttattaggagggtaacaaagttcatgcagcctgctggaaaatcctgccacttgactatatttttaagttttccaactgtgctactgatggatcatttatttcctagaatggtctcaaggatgttaggagaccatttggtaaatcaggtatatgatgaccgaatcttttagcttgaggcaaataaaacatgctcacaagttaagtaagctcaca

SEQ ID NO: 273320 - DNA, 463 bp, Homo sapiens
actagaatgaaattcaacaaagaggatgcaagttcctcaaaagaggaggagcagtatgaaggaggacagtcctgcagcagcccagagaacagctagtgtgtccacaactgtttatttaataaacagaataggagcaaacatctggatgatcttggtcccatggtaaatttttgtgggtcacatagttagtttgagaatcatcattctaggaaaaactaaaaccttcatacagtaacgtcaaagttgaaataaaagaaaatgaaaatgtggcacgatacgaagcagtgagtccagctggcatttaatgataatgcttcacatgccactggtttagtgaaataaaaatacatcttcattatggatctacaggattaatatttccataacctccatattttacatggtctatattttcaatttcaggcagcacaaagcattgcacaaagcaattacataggttacc

SEQ ID NO: 273321 - DNA, 528 bp, Homo sapiens
ggaactcctttcagagcaggcctgtttttagccttctaggatatttagcctcttgttgatgggagatttgttcctatcatttgcatatactgctccatctctgagctttgcttagagaggagaatttggacattcatttgggtattctaagaaagggaaagggaacaagctgtgaagctaaggtataggactcagcttgtagattctcctagaggaaacttttttttttttttttttgagaacagattatccagtaagcaggaggtagaggggaacgagattgaactttgctgacctttgatgtgaggcgctcagccagggccaaggggagagcctggcaagattggcagcctgaagccatgggccagggggccatggtgacctgagacaagtggactctgtatagtggccccctgcttccccttctacctcccctaccctatgctaaggggactcgtctccacctcgtaaaggaaactccccaagggaatccctgtcccctattttcctatccttctacccttccaa

SEQ ID NO: 273322 - DNA, 541 bp, Homo sapiens
ggggtgcgcttccgcgggcggggcgcggagcccgccgtctcggaggccgcggctcggcccggcactgcggagggccgcttgatttcccggaacccaggtcgcgcggctgctagggccggagccggtggatccgagcgggtgccaccagcggcggcgcgccgcctcccccggtgggagcggtggttgggccaggctgcggcagagcgttcgctcggagatggcggagcagccgcgacgcggcccgtggccccgaaagcagggaagccgggcagccccgggacgcggcggagcccggggacagcggggacgccgcccagtcctccgggtatgaagctaaaatgcagcggctaagaacgcggctctggagcttgacaggcctgacgtcgaatcccagccctcccaccaactgagctgtgtgatcctgggcaaggttctaagcttctctgagttactcatatgtgaaatggggataatggagcatgtaccttttccctacctcttagggctggtgtgaagattaaatatatgtgaagctcttaga

SEQ ID NO: 273323 - DNA, 772 bp, Homo sapiens
  misc_feature (583)..(583): n is a, c, g, or t
ggggtgcgcttccgcgggcggggcgcggagcccgccgtctcggaggccgcggctcggcccggcactgcggagggccgcttgatttcccggaacccaggtcgcgcggctgctagggccggagccggtggatccgagcgggtgccaccagcggcggcgcgccgcctcccccggtgggagcggtggttgggccaggctgcggcagagcgttcgctcggagatggcggagcagccgcgacgcggcccgtggccccgaaagcagggaagccgggcagccccgggacgcggcggagcccggggacagcggggacgccgcccagtcctccgggtatgaagctaaaatgcagcggctaagaacgcggctctggagcttgacaggcctgacgtcgaatcccagccctcccaccaactgagctgtgtgatcctgggcaaggtagaggggaacgagattgaactttgctgacctttgatgtgaggcgctcagccagggccaaggggagagcctggcaagattggcagcctgaagccatgggccagggggccatggtgacctgagacaagtggactctgtatagtggccccctgnctttcaccccactgagtacgcttacccggaaagccctaatggctaaaggggggatctacagtctcgcagcgctcgttagaaggacaatttccaccagagggaaagtcccgtggtacaccgttattttctgcgtacttccttatcataccgcctatccagagagacgtccctaagcccatattcgaactg

SEQ ID NO: 273324 - DNA, 718 bp, Homo sapiens
caaggactgtttcttttgttaccctgtttttcacatggtgctcaaccttatgtttgtatataattgatactctttccatattgttgattcgttgtgaatttttaaaaattaagagctaagacttaggaagttttaagatacttgtttacatgctgtgagttagggcttctcctaataagagattgtatgattgagttatgtgctaacgtgtttctgcttgattagttgacttcaagtgctcaaacacagcaaataattgcccaattgaagatgtctaacattattagatattaagctatttcagacccatactaaatcatccatttgaatatagtacaagaaacttctttattgggacttatttttcctctttacaaaatacctttgaaaagagatagtgatatagtagagtgagggaacctgagttccttgactatgtagtatatgaacatgggcctgtcatattaattttctgggactaacaatttgtactattaagtaaaagttaccaatcaaaatccctttctatttttttcagttaccacctgtaaagtctggtagttatagtaatcctacctgagtgggatgttttgcagaacctcagttgtttccactcctctgacttaggataatgactgtttcttgtgtgggggccacagatgccaggatttagatatgctatcattagaaagcaaactaatttttcacaggtttctac

SEQ ID NO: 273325 - DNA, 173 bp, Homo sapiens
ttttttactaggtaggtactagcatctctgtggagaaatcacttttgtgaaatgtaactaatatttatcatcctcataaaagtgacgaagtagactgggcacggtggtttacacctgtaatcccaacactttgggaggctgagaagggcggatcatgaggtcaggagatcgag

SEQ ID NO: 273326 - DNA, 599 bp, Homo sapiens
aagggagagggaaatatgactgggaattctttagagattgagagctgtactagcctggcatgcagacagcagctttagaatcagatctgccttctggcggcttcccacctaggagccatgggacctttgtgaagtcaccaattgtgctgtggatgcttcatttgtgaaggagaacaggactgccttatgaggaaactgaggtacagatgggaaacttgctcaagttcacacagcaattaagtgatcaagtccaagagcaaaaccaggcaggctggctccagagctcacgatagtccaccactgctttccaccatcactacggaatcaagtccatgaggatactcaccttatgtcagttgcctaagttggaaattatagaatcttcaaattggaagggacgttatcatccaagatttcaactttctactcactgcaaaatcccttctggaacttcccagattgatgaattttcatcagctctgcttgagtactcccagtgacttggaaaaaaaacactgtaatatggatatgaaatataaactgttcatggataaattattgcataataaaaacatgcctaatggctacactcccctaaa

SEQ ID NO: 273327 - DNA, 1552 bp, Homo sapiens
agttgtccagggctccctgagggaggccagcacaagagctctgccataaaaggacattggacagaagtgaagagtccaatcagaaactctttttgagagactgaacgcaaagcattcagagagtcagcaggctggagaggccaagacacacacacgaagaaggcaggacactcttctcctcctgcggttggactccaggctctatgaccttcaaactccaggacttacaccagttgcccctgggcactcaggacttctgcttcagactgacagttgcaggacagtgcagcattttattttaaagataccccacaacgtaggtggccagtcctgctgcaggtgcggtttcaagcctttggagtttgaccttctagtccaaggtcattacagctgcaggcagaggctcccgcggggaaaagagcatttcctgggacgctggaactaaatgaacggcccactctccagttcagcccttgcctccttcccgacacataaagttcaagagccacggtcctgagtgcataggaacagccccatcacccttctccctctgggcaagctaggagcagcggtgcgaggctccatttcttcttctctgcctcctggacctcagccacctctgctcaggcacaggccagctgcccaggcgtcctcatctggcgaccagctctgaccgcagccctggtctgctctcggggtcgggcccacacccctcttcttcctcctcttcctcccaaggcctgggctcgggtccctcttctcacctttccctttcttgcgttgcaaccgtaacttgggaaaacccttcttgatcttcctctctcacctcctttcaaacacatgcttgcaggctttttcccgatctcatccttagggcagatacgctcccttgattctgaggtctttgaacttgctgtgaagccacactacctgcgtcccagggtctccagcttgcagatggactgtggtgggacttctcagtcaccaagattgagagctgtactagcctggcatgcagacagcagctttagaatcagatctgccttctggcggcttcccacctaggagccatgggacctttgtgaagtcaccaattgtgctgtggatgcttcatttgtgaaggagaacaggactgccttatgaggaaactgaggtacagatgggaaacttgctcaagttcacacagcaattaagtgatcaagtccaagagcaaaaccaggcaggctggctccagagctcacgatagtccaccactgctttccaccatcactacggaatcaagtccatgaggatactcaccttatgtcagttgcctaagttggaaattatagaatcttcaaattggaagggacgttatcatccaagatttcaactttctactcactgcaaaatcccttctggaacttcccagattgatgaattttcatcagctctgcttgagtactcccagtgacttggaaaaaaaacactgtaatatggatatgaaatataaactgttcatggataaattattgcataataaaaacatgcctaatggctacactcccctaaa

SEQ ID NO: 273328 - DNA, 1473 bp, Homo sapiens
agttgtccagggctccctgagggaggccagcacaagagctctgccataaaaggacattggacagaagtgaagagtccaatcagaaactctttttgagagactgaacgcaaagcattcagagagtcagcaggctggagaggccaagacacacacacgaagaaggcaggacactcttctcctcctgcggttggactccaggctctatgaccttcaaactccaggacttacaccagttgcccctgggcactcaggacttctgcttcagactgacagttgcaggacagtgcagcattttattttaaagataccccacaacgtaggtggccagtcctgctgcaggtgcggtttcaagcctttggagtttgaccttctagtccaaggtcattacagctgcaggcagaggctcccgcggggaaaagagcatttcctgggacgctggaactaaatgaacggcccactctccagttcagcccttgcctccttcccgacacataaagttcaagagccacggtcctgagtgcataggaacagccccatcacccttctccctctgggcaagctaggagcagcggtgcgaggctccatttcttcttctctgcctcctggacctcagccacctctgctcaggcacaggccagctgcccaggcgtcctcatctggcgaccagctctgaccgcagccctggtctgctctcggggtcgggcccacacccctcttcttcctcctcttcctcccaaggcctgggctcgggtccctcttctcacctttccctttcttgcgttgcaaccgtaacttgggaaaacccttcttgatcttcctctctcacctcctttcaaacacatgcttgcaggctttttcccgatctcatccttagggcagatacgctcccttgattctgaggtctttgaacttgctgtgaagccacactacctgcgtcccagggtctccagcttgcagatggactgtggtgggacttctcagtcaccaagattgagagctgtactagcctggcatgcagacagcagctttagaatcagatctgccttctggcggcttcccacctaggagccatgggacctttgtgaagtcaccaattgtgctgtggatgcttcatttgtgaaggagaacaggactgccttgtgaaattacggatggtgctactaaaacatatcaataatttgaatttcacttttgtggatgctttaaacatcatagtcattagaaggtggatctggctgattgtactttaagttttcagtttgagctggagctttgtattataacaggagggtactggacaagaacaacacaataagataggaccctgtcccagagatgactacattgaagttcagagagtttaagtaacttgcccaaagtcacatcgctagtgaatagcaaaacgaggattcaagcctaggcctgcctattttcaaagtttatggaaggaattaaaacatttcttagtctaat

SEQ ID NO: 273329 - DNA, 1459 bp, Homo sapiens
agttgtccagggctccctgagggaggccagcacaagagctctgccataaaaggacattggacagaagtgaagagtccaatcagaaactctttttgagagactgaacgcaaagcattcagagagtcagcaggctggagaggccaagacacacacacgaagaaggcaggacactcttctcctcctgcggttggactccaggctctatgaccttcaaactccaggacttacaccagttgcccctgggcactcaggacttctgcttcagactgacagttgcaggacagtgcagcattttattttaaagataccccacaacgtaggtggccagtcctgctgcaggtgcggtttcaagcctttggagtttgaccttctagtccaaggtcattacagctgcaggcagaggctcccgcggggaaaagagcatttcctgggacgctggaactaaatgaacggcccactctccagttcagcccttgcctccttcccgacacataaagttcaagagccacggtcctgagtgcataggaacagccccatcacccttctccctctgggcaagctaggagcagcggtgcgaggctccatttcttcttctctgcctcctggacctcagccacctctgctcaggcacaggccagctgcccaggcgtcctcatctggcgaccagctctgaccgcagccctggtctgctctcggggtcgggcccacacccctcttcttcctcctcttcctcccaaggcctgggctcgggtccctcttctcacctttccctttcttgcgttgcaaccgtaacttgggaaaacccttcttgatcttcctctctcacctcctttcaaacacatgcttgcaggctttttcccgatctcatccttagggcagatacgctcccttgattctgaggtctttgaacttgctgtgaagccacactacctgcgtcccagggtctccagcttgcagatggactgtggtgggacttctcagtcaccaagattgagagctgtactagcctggcatgcagacagcagctttagaatcagatctgccttctggcggcttcccacctaggagccatgggacctttgtgaagtcaccaattgtgctgtggatgcttcatttgtgaaggagaacaggactgccttgtgaaattacggatggtgctactaaaacatatcaataatttgaatttcacttttgtggatgctttaaacatcatagtcattagaaggtggatctggctgattgtactttaagttttcagtttgagctggagctttgtattataacaggagggtactggacaaggtgagttgctgatagcctccccccacctgccaacagacctatcattagatggaatgtaatggactttggccagttgttctccaccccagctctgacttagcggctctggcaagaatggatatatgagcctaaatacagagcttgttgtgctaaattt

SEQ ID NO: 273330 - DNA, 938 bp, Homo sapiens
agttgtccagggctccctgagggaggccagcacaagagctctgccataaaaggacattggacagaagtgaagagtccaatcagaaactctttttgagagactgaacgcaaagcattcagagagtcagcaggctggagaggccaagacacacacacgaagaaggcaggacactcttctcctcctgcggttggactccaggctctatgaccttcaaactccaggacttacaccagttgcccctgggcactcaggacttctgcttcagactgacagttgcaggacagtgcagcattttattttaaagataccccacaacgtaggtggccagtcctgctgcagggcagatacgctcccttgattctgaggtctttgaacttgctgtgaagccacactacctgcgtcccagggtctccagcttgcagatggactgtggtgggacttctcagtcaccaagattgagagctgtactagcctggcatgcagacagcagctttagaatcagatctgccttctggcggcttcccacctaggagccatgggacctttgtgaagtcaccaattgtgctgtggatgcttcatttgtgaaggagaacaggactgccttgtgaaattacggatggtgctactaaaacatatcaataatttgaatttcacttttgtggatgctttaaacatcatagtcattagaaggtggatctggctgattgtactttaagttttcagtttgagctggagctttgtattataacaggagggtactggacaagaacaacacaataagataggaccctgtcccagagatgactacattgaagttcagagagtttaagtaacttgcccaaagtcacatcgctagtgaatagcaaaacgaggattcaagcctaggcctgcctattttcaaagtttatggaaggaattaaaacatttcttagtctaat

SEQ ID NO: 273331 - DNA, 823 bp, Homo sapiens
agttgtccagggctccctgagggaggccagcacaagagctctgccataaaaggacattggacagaagtgaagagtccaatcagaaactctttttgagagactgaacgcaaagcattcagagagtcagcaggctggagaggccaagacacacacacgaagaaggcaggacactcttctcctcctgcggttggactccaggctctatgaccttcaaactccaggacttacaccagttgcccctgggcactcaggacttctgcttcagactgacagttgcaggacagtgcagcattttattttaaagataccccacaacgtaggtggccagtcctgctgcagattgagagctgtactagcctggcatgcagacagcagctttagaatcagatctgccttctggcggcttcccacctaggagccatgggacctttgtgaagtcaccaattgtgctgtggatgcttcatttgtgaaggagaacaggactgccttgtgaaattacggatggtgctactaaaacatatcaataatttgaatttcacttttgtggatgctttaaacatcatagtcattagaaggtggatctggctgattgtactttaagttttcagtttgagctggagctttgtattataacaggagggtactggacaagaacaacacaataagataggaccctgtcccagagatgactacattgaagttcagagagtttaagtaacttgcccaaagtcacatcgctagtgaatagcaaaacgaggattcaagcctaggcctgcctattttcaaagtttatggaaggaattaaaacatttcttagtctaat

SEQ ID NO: 273332 - DNA, 701 bp, Homo sapiens
cagttattaagtggcaaagaccggatttgaatcaagatatctgatttttaaaattcaccttgtttcaaagcattttacttcacctaagaagttaatacacctcacaaccagataactccttcttttcaattagactgtgtctgtatctgggatcagttgcgaagcagaagtatgacgtgactaaggccaccgctgggttaggatacccccatccaagattgagagctgtactagcctggcatgcagacagcagctttagaatcagatctgccttctggcggcttcccacctaggagccatgggacctttgtgaagtcaccaattgtgctgtggatgcttcatttgtgaaggagaacaggactgccttgtgaaattacggatggtgctactaaaacatatcaataatttgaatttcacttttgtggatgctttaaacatcatagtcattagaaggtggatctggctgattgtactttaagttttcagtttgagctggagctttgtattataacaggagggtactggacaagaacaacacaataagataggaccctgtcccagagatgactacattgaagttcagagagtttaagtaacttgcccaaagtcacatcgctagtgaatagcaaaacgaggattcaagcctaggcctgcctattttcaaagtttatggaaggaattaaaacatttcttagtctaat

SEQ ID NO: 273333 - DNA, 284 bp, Homo sapiens
ctagcccagacctcagagctctgatttgcataaccagtcgcctgctgtacatctccacttggatgtctcacagacatcttaagcttaccatattacaaagtagcacactttgtttcccccagaaattatgctctccctacccctcaactctgtatctcccacagccacccatttacctaagttagaaacctaagagcaattcttgactcattcattttcctcccttttcaaatcctggatgatgtaaaaagctaatcctgattattttatcaccaaaataaatt

SEQ ID NO: 273334 - DNA, 220 bp, Homo sapiens
tttttttttttacaagttctccaggtgattttaacaggcaaccaatgtagaaaagccatacttaagtcacaggactgcctatgtccttatttattttacctatggctcaggtaaaaggaagatttcaaaaggaatacttgacagaactcttctaataattctgatgtgaatggtggaacatgctacttataaaaatacagaagaacaaaaaatacactat

SEQ ID NO: 273335 - DNA, 238 bp, Homo sapiens
gtttgagcacagaggcaagggatgattattcacatacacatggtaggcactcaataaatatggaatcgaggaattgaagtacatttactcagtcaatgtttattgaatttgctcaataaatgtttattgagcattaactaactaaggtcctgctctcaggaagctcacttcctggtagatttactaccaaatgccagttctgtcagatccaatttgctcttgtgttctcccacggcct

SEQ ID NO: 273336 - DNA, 452 bp, Homo sapiens
taccaaccagaatattcacagaatatacacacttattttattcttgaatatagagctaagaacatgaatgctgtgctaatttttactccataaagacattataaatcagttttatcaaagcttaagtacccaccctaggacaaaaataaattattctgacctatatgccaaggaactaaaggagatctccagccaccaaaaaacctgtgaggaactgaattcctaccaaagaactgaaagccttggcttaacagcctatgaggagctgcattctgccaacaaccatgtaagcaaacttggaagtgaatcttcctgcagatgcgatcgcagccctgggcaagacttttgtttgcatctttgcgagagatcctgaaacagagaacccagctaagccacacccagattctgacccagggatactctgaaataataaatgttcattgttgtttttt

SEQ ID NO: 273337 - DNA, 425 bp, Homo sapiens
attttgacatgtgaatatgtctacaaaaccatcacctcaatcaagataatgaacacagccaccacccccaaaagtgtccttgtgccccttttcattcctacatctctccgcttcctgactccttgatttctaggaaatcacgatcttctgtcagtctgttttagttttcattttctaggattttatatgaatggaatcacagtctatgtatactttttgtctggctttcctcacggcataattattttgagattcacccatggttttgcctgtatcaaaagctcattcatttttattgctgggtactcttctattgtatggttatagtataatttatttatccattaacctgatgatggacatttggattgttttctggttttggttattataattaaagtggctatgaacaatgtggctatgaa

SEQ ID NO: 273338 - DNA, 455 bp, Homo sapiens
gtgtggggactatccctagctttgtgactgaagacttgccaggtcctggaagcatctgggaagtgttttggttgaggagagttgaatgtttgaagaagaaaatatcagagtgacattcctgctgctggctcccctctgatgtaccgcccttgtgctttctcctactgcacttgcgatccagcagcctacaaagaacatgtgctttcgaatgaaagccctgctccagcactcactagctagttaaccttaggagtattatttcaaagctcttggagcctcggttttcctcatctgttaaaatgggaccataaatacttaactcagtgttgtgagagtgaaattatgttatgtacagggaagtacacatagcaagtatttgatatgtgttaatttctctttctcgtccttactggatgggatcagagggatggataaaccagttaccacttcaccag

SEQ ID NO: 273339 - DNA, 1070 bp, Homo sapiens
ggaaacttaaaccaaagtctattttcctatttaagaaaactggactctgggccaggtgcacctggcccagagtccagttttcttaaatgggaaacttaaaccaaagtctattttcctacaaagtcttcgttggattttttcataatcttttggattttccatgtaccttctcacctcaccctaacatagaaaaatctctctcttatctggttataaggtcatcatcatctttttcttctttatttctttttttttttgagacagggtcttgctcaggctggaatgcagtagcacaaccatggctcactgcagcctgcctgccaggctcaagtaatcctcccacctcagcctcccaagtagctgggactgtaggtacacaccaccaggcctggcaaattacatttttttttatagaaaaggggtcttgccatgtttcctaggcagatctcaccatgtttcctaggctgatctcgccatgtttcctaggctgatctccaacttctaggctcaaaggagcctcctgcctcagcctcccaaagtgctgggattataggtgtgagctactactgcacctgaacctttttttttgatagaaaatgtgaaaagtgcgttaacattttgaagcatgtatttgcccccaatttcaatgtgtatatatactcataaaattaaaagacagttttactttaagcaactgacccatcttcacaacatttacaaacaaaaacaaacaaacacaaacacaaaaaagcataacaaaacaacagagggggggggcagagtgtagaaaagaatcacaacaggagagagaccacactatcatcagcggcaccgccacatttatttctgtcaacgaggtggccccccataaagagagcagcataactaaacagcaacaacaaagccgggacgatcaaaacagctgctagatacggcgaaaaacgcgtgtcgacgcgagcaaaatgttggtagagaaaacccatcaacacagggggaggagacaacgtggtcgacaaactactgaggaaaattaaacgcccgcaggcgaaaatacaacaatgaaaggaatg

SEQ ID NO: 273340 - DNA, 556 bp, Homo sapiens
gcgttcgagacgggaaacctgggtagaaaaatctctctcttatctggttataaggtcatcatcatctttttcttctttatttctttttttttttgagacagggtcttgctcaggctggaatgcagtagcacaaccatggctcactgcagcctgcctgccaggctcaagtaatcctcccacctcagcctcccaagtagctgggactgtaggtacacaccaccaggcctggcaaattacatttttttttatagaaaaggggtcttgccatgtttcctaggcagatctcaccatgtttcctaggctgatctcgccatgtttcctaggctgatctccaacttctaggctcaaaggagcctcctgcctcagcctcccaaagtgctgggattataggtgtgagctactactgcacctgaacctttttttttgatagaaaatgtgaaaagtgcgttaacattttgaagcatgtatttgcccccaatttcaatgtgtatatatactcataaaattaaaagacagttttactttaagaaatgaaaaattaaaaaattaaacagtt

SEQ ID NO: 273341 - DNA, 324 bp, Homo sapiens
tgccttaccgtttagcagacaatgctgggattgtgcgtgcatctcgtcagtgatctttcctataaatgtgactgtactcaatgactttgcttttacaattccagccagtcttttgatattgaacatagaatgtatatgatcctggaaaccacgaggagggtggtacaggctgtgttttttttttctctctctctctcttttttttttttagttattcaatcagctacaaaacatccaatccttgaagtcctttattttacccacaggcctgttgctaagaatcaaagccacatgccactagccagtaccccaaaggacggcttt

SEQ ID NO: 273342 - DNA, 525 bp, Homo sapiens
actgcctagaagcttgtttctctgctacaattagaatttaatcactggtaatttaagactaatagacccacagatggacatctgtaattaggaaagtatttttgcttttcgttgcaccactcagtttttttcccttttttaaaaaatacatttttgtgttagtgaagcaaactactaaaagtactgaaaatactacaagttgttatttgagttatttcctctgtaaaattacagcaactcattttcagctggctagttagctatctgaaaggaggatagctgtgctagctcaatgcttgcaacacagtaggttctcaggaaatatgttacatgaaataaattaaagatggaatgaatcaatgagtgaacccatgaatgaataaactaatgagagttgccccaatttctctccatctctaggtaacagttctgctctctgcccaccttttgtaccatttccccatcaacaacatccccaacaacagcacacgcacactggcaccaaccagtgtgattatatgaatg

SEQ ID NO: 273343 - DNA, 328 bp, Homo sapiens
ttctcagaatttgaagagccaatatactggcagtaagaaagtgagatggctggacatggtggctcacgcctataatcctagcattttgggaggccaaggcgggtgaatcacttgagtccaggaattccagaccatcctgggccatatggctagaccttgtctttacaaaaatagccagatgaggtgacttgtacctgtggtcccagctatgcaggaggctgaggtgggaggattacctgtgcccaggaggttgaggctacagtaagctgtgattgcaccaccacactctaccctagcctaagtgacagagcgagactccgtctcaaaa

SEQ ID NO: 273344 - DNA, 385 bp, Homo sapiens
  misc_feature (22)..(22): n is a, c, g, or t
acctacatagcaaagggattcntgtattaagaatagaccaccacgcctggactcccagtgagccttcaagaaggtccctttggtgcatgaagctagttcctggaggggcctctccctgtgaccacccccaggaaggttcccttactttctaggggacatgagtcaccctctcacatgagactggcatcttgatgtccccttgatgaaacccccccagaggaaaacccccttcagatgctaaatgcaagggccagccagctcccctagtaactggtttgttttgattggagaatcgtatggtgaagagtgtttccctctttgatctggtcacgagggagctcagaaataaatctgcagcccacttccagcagcagaaccagacatc

SEQ ID NO: 273345 - DNA, 240 bp, Homo sapiens
ggagaaaaagatcctgagtgttgtcttaaagaggcattacgttatctgctgagaatgtcaggagatcagggggatcggtgcccccctcccacctcaggtagaggagccatcagtcccagctggaacccaacacacagggctagagctttatctgcctgaggcagccaggatgtccggcagaacaggtgctggagaccctggtagtcagagctttccaaaacatgttgacttgatttccct

SEQ ID NO: 273346 - DNA, 358 bp, Homo sapiens
cttctcaaggttgaaaataaaaaaatttttgataaattatttctagagtcatagtcaatgaaaaaattatttcaactaaacaaggattttgttaacatacagaatttttataagttaacacacaagctttttaagtttctaaggcctggacttttcacgtgtgtttcaaggaatagattgagttcaaaaaaccttaaattttgctaacacaaaaattttttttgtccaggcatggtggctcacgcctataatgccaacactttgggagactgaggccagaggatcatttcagaccaggaggttgagaccagcctgagcaacatagtgagacgccatctcaattaaaaaataaataaat

SEQ ID NO: 273347 - DNA, 585 bp, Homo sapiens
gttacttaaccttttcagttaaggcaacattgctacctttcaaggagtgagtgattgaagtcaagaaagaagccctgcttgggattagagaaactgaaaagaaatacgatgactcattaaaacagtttgaaaactatagaaaggtcaacaatttaatgcaaatattaattaaatgcctagaaaaagaaaagggaggcaaaagtgagtgaagaagaacatctattgcccttcatatgtgtcaaccactgagctacgagctttacctatatgaattgaattgattttcataaccctataaggcaagtactatttttatccccattttacatatgaagaaatcgtgccacagagaagtttaataacctgcccaaggtaacacacagtagagcagtcaggattccaattcactaactactgctttatcctcttccttggcactacataccagtgactgctggggcaacaaaaatgtagaaaacatggtcccagtctttggaggactcatggggaaacaccatacaatattctgactttgggaaagtgacctaatatttctaattaaaatggaaattaataaccccttta

SEQ ID NO: 273348 - DNA, 464 bp, Homo sapiens
agggtgcagttcagagagcttgaggatcactggacactctgtgtagttagttacctttcttgctttttcatgactcaatctttcactgaataggtttggcagtaaatttcactaagatttcagaaattcgaattataatttcagttctaccaactggatatatttacttaagtctgttttctgttctaaaaaatttgaaggttggattcagtagcctctaaccattttcagtttaaaaattctgtgattttaagcagtttttgaaaacttactctttggatgatatcttagaggaatgtgtttcagcatttccacatttagaagaggcaatctttgctttaaagaaaacagctgtttcactgtatgcaacatggactttgttaattgtacttgtgatctctattttgtaatagctaccatttgttgaactctaaagtattaaagatttttttcattgcaaacca

SEQ ID NO: 273349 - DNA, 433 bp, Homo sapiens
tgaataagcattttctaagaagcaaggaaactgtggacagagggaatagtatctctaaagacactgtcaagaaagtgtatgttgtgttcactgattggagtggctgaattatagattgggtggcatgaagtgggaaggatgagtttggagggaccatattatgaagggccttttaataatgattagtaattatttttcgtttataggcaattaaaaacaaaaaaacaggagcatggctttggactattagtagaaactttaaatccaaaactagcttatgtctctataatagcattttaaaaaatgtacacattaaaagttaagattgcactttgggaggcggaggtgggcagatcacttgaggttaggagtttgagaccagcctggccaacatggtgaaaccccatctctactaaaaattcaaaaaattagc

SEQ ID NO: 273350 - DNA, 124 bp, Homo sapiens
gggggggaggtgccaggacaacccacagacatcggaacagcatggcctgcccacaaaatgtggccagcgctgggggcctggggccatgtgctcagccaagatcaacaggctctgtttaaagctg

SEQ ID NO: 273351 - DNA, 411 bp, Homo sapiens
ttaaaggagcagctgccaacttttcagaaacacgatcaccttccctcctcctgcaaacagtaggtaccattattttctccaatttactgatgaaatagaggcagaaaatggctccgtaatttgctcaagtatttcgttgctcagctagtaaatggcaaagctggaacatgaactactaacttgtacactctcctgcttctccagatacactgaaaaaaggcaggcggcactgttcgtgagatgcatgagctttgcactgtggtccagcacatctctgttgtaggcttcctcatgcctgatcctgaaagggtcactcctaccctttccaaaaaccactacaggtacagcgggacactaatcccttcaggttcacctgatgttagggaccaaataaaagcttggaaaggtttt

SEQ ID NO: 273352 - DNA, 382 bp, Homo sapiens
tgagcctaggttccctacctggcttttatctgcaggaatccagatgtgactcctccccaggctccctatgctcttccccacacccctgttggcaaccactgattttttcactgtccctatagttttgccttttctagactgtcatagggttggaatcatacagtatgcagccttttcagattggcttctttccattagcaatatgcacttaagtttcctttgtgtctttttgtggcttgacagctcatttgttttaagcgttggattaatagtctgtcttttgggcataccacagtttatttattcacctattgaaggacatcttgttgcttccaatttttggcaattatgaataaaactgctttaaacattcatgttcagg

SEQ ID NO: 273353 - DNA, 825 bp, Homo sapiens
caaaaaatacaagttgtattttacttctggttcattaaaatattgtgtttagttggattttttcctcctttattttcagaaacataaaagaaattgttttatttcctaaaggataaaattggatatagcctctttagtagacactatcacagttctgttgtttgctgtgttcatttgcttaatgaattgcgtgagaacagtcactgtaatgaaatatgtgtgctgggggtggggggaagggcatgggaaatgttttatgaaaaaaagttataagcctaatactatgaagtaacatctaatgcagttctttttaagtgcaatatatttatttctgctagaaatatattatcaaccttatgtaatatttgaagcattacatattatttgtaaacagcttaaaattatatattaccccaattgtacataagtacaaatgtgtggatattagtttctttcattaaaagtggtgtttttttaaaaatacatttgcacccatttacacctttcattcactgacactgttttatgatgtttggtacctgtttcctcacctgacaaaaaggattagataagattgtgggtcccagctggccactcacaggctggacacagcccgggattactgcatagtattttgagtttgtctttagttgcatttgaaagccttggaaaagacattgctctcaagttcccactattttccattttctgcacccagtccccttcattcgtgtatgctacccaatgaaccctcagaatcacatgattttgcacctctctgtactgaattatactgaagactccataaaacttaaaaacgcctgt

SEQ ID NO: 273354 - DNA, 1007 bp, Homo sapiens
aaaagttttgcagagtatcgcagtgcctggttcatggttatccgaggaaaacaagtctcagccctggcacaggagcacacatgaaaccattgcagtgagtcgcctgctgcccactttggaatctgtccctcagttggacaccgtgtccccacccctgactcaccttcatgacccaacccgcgagccctgagggtggtactccacatcccccacgctgggctgcgggtgcctgtttctttctaagaaatagaatgcctcactgccgtgagctgtccctcctagttgccagcggttctttctcttgagtaattttacctgttgaggggctgtttgtaccacaaaaagagtgacagacctggttatatgagccttaatttttacactgagtgttaatttctgtgcctatatgttaacatctaattcataaaactattttgagagttaaaagcacccattaagtccctgacagtaagttctcaataaatgttactttaacaacagcaacaacaaaagtagctgctagaagagtaaactcaaagagcaaatttccaaaagaggaaaataaaataagaaaataaaacctgaaaaggacaaataggaaaaagacgaaacaagtaatgacataataagccataaaaatgaataaaaatatattactaatcagtaaattcattaaattttctagataaaaagcaacagttgtcaaatatttttaagaatctgtctcagccaggcgcagtggctcatgcctataatcccagcactttaggtggccgaagtgggcagatcacttgaggtcaggagttcctgaccagcctggccaacatggtgaaacctgtctctattaaaaatacaaaaattagctgggcgtggtggcgcgcacctctaatcccagttactcgggaagctaaggcagagaatcacttgaacccgggaggcagaggttgcagtgagtcgagatcgtgccactgcactccagcctgggcgacagagcaagactgtgtctc

SEQ ID NO: 273355 - DNA, 380 bp, Homo sapiens
actcagggcatacctggtgaataaattaattagttccaaacattgacttgttctttactggaagaagttgcttttattcattaaatttaaggctgatttattcatccatccatctgtccatccatccacccgtccgtccatctgtccatccatccattcattttaaaagtcttgatgcgctgggcgcagtggcttacgcctgtaatcccagcactttgggaggctgaggcaggtggatcacgaggtcaggagattgagaccatcctggctataacacggtgaaaccccgtctctactaaaaatacaaaaaattagccaggcgtggtggcggtgcctgtagtcccagctactcaggaggctgaggcaggagaatggtgtga

SEQ ID NO: 273356 - DNA, 456 bp, Homo sapiens
aatatatatttggttgcagcaaatgctatgcagaaaaaaataaagcaggtaagagggataaggagtacaggggaaaacaatgcagtgataaatagggtcatcagggaaaaaggcctaactatgaaagtgatatttgtgtcaggatgtgaagtcagctgtgtgagcatttgtggaagatattttggacaaaaagaacagccagtgccaaaactttaaggacagagactgcctgaagtaatccggcaagcaaaccagtgtagcttcaacagcaagtggtgaagaggacacaggaggtgaagtcatagacagaaaagggaactgaggtaggtggagacaggttgtgtggaacctagtaggcctgttgtgaggattgtagctcttgctctaaggtagaatgccagttcctgctttgagtagaggagtgacatgatctgattagtttgtggacagaagcaa

SEQ ID NO: 273357 - DNA, 463 bp, Homo sapiens
aatatatatttggttgcagcaaatgctatgcagaaaaaaataaagcaggtaagagggataaggagtacaggggaaaacaatgcagtgataaatagggtcatcagggaaaaaggcctaactatgaaagtgatatttgtgtcaggatgtgaagtcagctgtgtgagcatttgtggaagatattttggacaaaaagaacagccagtgccaaaactttaaggacagagactgcctgaagtaatccggcaagcaaaccagtgtagcttcaacagcaagtggtgaagaggacacaggaggtgaagtcatagacagaaaagggaactgaggtaggtggagacaggttgtgtggaacctactaccccccttccaaaaattttgccactgtctccagtgaaaaaagccgttgacaaaacatgtttgtttataataccttgagttgaaagacctacaatataaacccaatgct

SEQ ID NO: 273358 - DNA, 441 bp, Homo sapiens
actccccagatgcctctaatatagacatctcaagtttggtttctgccatgaaatcgaggcagtttccaacaaagatccaattttcaaatgtgctgggttgccacctggcctcctctaactctgcatagcaatggtgaccttgcagatataatcaagaacccaagcttgccctcttcaccctcgccttgggtttgaattgcaaatagaaaatgtggggccgacctgtggagaggtcaccatgatgtatggagggtccatctctaatatgactgagctgggccccttctccaacctttgttcatttgtgctgcagattttcaaagcatttgaaatcggagctttcaggatatctgtgtgaccattggcaaataattgttaatagatccgatggtgtgactttattccatacctgctctgcttcaacccaacaacaaaaaaaga

SEQ ID NO: 273359 - DNA, 408 bp, Homo sapiens
ggggaaggacacacacagcctgggtgagtccccgaatcactgtaccgagtggaagatgtcagaggaaaccacgtacgcactgcaggaggccattatgcaaagctctagaagatgcaaattaacctacagtgactgaaggcagaaagaaaacaaaaagcagcccaaggcgaaaaagtcgatcctgtgccctgagcacaggcagtcctgaggtgcgagcggtttcccaccaggctcttcttggcctttcgagaacttcagcccctctctgctgtttcctgttgctggcatccactttcccatctcacaatattttctcctgtctggtctcctgtatctgaaacccactgctacgggatctcccctctttctggaaaatgttcattaaacaggaaacaaacccaaaaaaaa

SEQ ID NO: 273360 - DNA, 368 bp, Homo sapiens
atggcttctggtgtttatacgtatttcaaaactcatcaaattgtactctttaagtatgtacagttcagtgtatgtcaatgatactgcaataaaattgttacccacagaaagaaaacaaaaagcagcccaaggcgaaaaagtcgatcctgtgccctgagcacaggcagtcctgaggtgcgagcggtttcccaccaggctcttcttggcctttcgagaacttcagcccctctctgctgtttcctgttgctggcatccactttcccatctcacaatattttctcctgtctggtctcctgtatctgaaacccactgctacgggatctcccctctttctggaaaatgttcattaaacaggaaacaaacccaaa

SEQ ID NO: 273361 - DNA, 550 bp, Homo sapiens
ggcttttgagatgagaaatatatggttttggtaggagttgaggtcaaaaggaaggcctagtatctctaattctgatccacagggttctaacttaactttgcaaagtaagacatggatttacaactgttttatatagtgcatgctgtgcacctacttcccaaatgcacttcgatttttttttttttttttttttttttgtcataaagagtctgggctccttcctgttcttctctctacaactcagcctgtacctgagtggtactagctattcttatattgcttttctatggaggaaaacacagtcttctagagctgaaatcttaagaatgttttgggaagattagagagcttctttagaaaaagtttccaggcatttaatcatacttagtatcttagttcatttgtgcggctatagcaggatacctcagattgggtaatttataaacaacagaaatttatttttcatagttctggaggctaggaagttcagaatcaagatgctagcaggttcagtatttggtgaaggttgctctttgtttccaaaatgatg

SEQ ID NO: 273362 - DNA, 325 bp, Homo sapiens
caactttatctccaattttaatctcaatgcctcttattttatttacaaataattttcataaatgttagagatacaaagtaaatgaagaagactagacaaatttttttctgactttccaagagtttgccatttatcttgaaagacataaagatttttttttaatttaaaaattagttcaccatttaaaacaatgaacaatctagtggtatacaaaatggaaggagaagaaagaaggctataggcttgaaaaatcatctgctgtgcaaattttcagattaaattgatggaaaaattatccaagtttgaagaatctattcattgtggc

SEQ ID NO: 273363 - DNA, 502 bp, Homo sapiens
tcacttttccaaattatatttgagcaccaccatttctgccactcagcagtgtgcccagagcgggctgagcagcccgctactcagcgggctgagtaggctcacagtttgtcggcggtgtgccttgttcccattgaagccagagccgctggcctctgtggcagcctggacgccaggcctctctctttcccactagggtctcacaccaggtggtctctctctcacaatggcatgtgccacagatgctcccccaggttagggcacttaacggctatgtctgggagttcttatcacctaccagtccagtcaactgatgtgtctgaggcctcccattcattgcagactgcaagtgtgaaactctcaaaatcccagaaatcagtaagcagtattgttatggctgtgtgaataaatcacacatttatgaagttacgttttggctatgaaagttaatatgagctcactgtagatattttggaaaatataacagaatacaaagaaaaaaatt

SEQ ID NO: 273364 - DNA, 410 bp, Homo sapiens
gtgtactcaagagctttgaaaactgaaaagtgtcatggaatggcacagaatgacattaagggttttgggtttttatttttcacattggatatcatgagactcattctgaggaaattggtataaatcaagcgtgagactagaaaatgaaagctggtaaaatgagccctgagatgattccttgagctccaactctggtgcaaattaatcagtttgtctctgctgtctgggactcactttccttatcttataaaatgagatagccagagaagataagctcaaaagacccttctagctctgacagtgttcttctgtggttctatgaaaatgacttctgttgggctgaactttgtagtaagttaggtttagaactccacacacctggaaaggaaagagagcaggacaagattgag

SEQ ID NO: 273365 - DNA, 594 bp, Homo sapiens
cactggcagactaatgataaagacactggggtgaacctagccattctaacgggagagactcccagctgacaccaggcagtctaatgatagagacacttgggcgacaacaggcattctaatgtgaaagactcctggctgactcaaagctgtctaattatagagacagctgcatgaacccaggcattcgagagaaagatacccctggccgaccccaggcagtctcatcatataaaaacctgggcaattccagacattctaatgggagagactctcggccaacacaaggcattctaatgggagagattccttgcagacagcaagcaatctaacaatagggacacctgggcaactgaaggcattgaaatgagagagactcctggtcaaccccaggtaatctaatgaaagtaaaaactgggcgacccaaggcattctaacgaaagatactttcagccaacaccaggtggcctaatgacagaaacacgagtgacccccagaattttaatggaagagactcctggttgagcccaggcagtctaatgatagagacacctgtgcaaccctatgcattctaataaaaaagagtcaccaccgaaa

SEQ ID NO: 273366 - DNA, 568 bp, Homo sapiens
gtcaactgtggaatatcctcttaaaatattttataaaacatggtttacactcaatacacaataaaaaaatagatatgtgcaggattttactgtcttatttttttcattctcaaatcggatataagacagacataaacccatacacgcctttatgtttgttaatgtggttatgtttaaacatttttttgagctttttctcacattagaagcgctggcaagagatgtttttttgtgttatagccttgggtagcatgctggtatatagtctgtgaagccaggagagtaactatataatgaattgaccattaggttatgtaatggggatgactatctttatagccttgggtagcatgctggtatatagtctgtgaagccaggagagtaactatataatgaattgaccatttggttatgtaatggggatgactatcttcagatttattttgacaacttgatgcgaaccaacggtagacccgctcatcagggtgtaataggaacatttaatgaaagaagatataatgaagatctttaggtctcttcttgtcatgtcattttattgtgtctgaaa

SEQ ID NO: 273367 - DNA, 292 bp, Homo sapiens
cccccaccccacgaatacacatggtgaagagaggttcacttctgttcctgttgctgagtttcagctatgcccctcggcctcggaggatggctcacctttactgtgaatttctagctgaaagaacaatgctgagaacagggataacaagaggacctctctaacaaatgcatctgctagttacaaaagggctgggaagaacggctcagggacattcctcccagacccaaggaaagggaatggagacacattttgatgttttctacatacttggtcaacttgcagctactataga

SEQ ID NO: 273368 - DNA, 445 bp, Homo sapiens
aacacttgtgaccataggaatatagcagtgctaaggcaaaataggtcttaacttgacttttcctgtcatttgctgccattgtttgccaaaggtctagcacctatcttcagaggaaagtcaagaaattagtgctcagatggtgggatgaattcctgaattattgttggctctagtagtttcttcagatcaattttatagtttctttagaactagaaaattaggtctcagaatggcagttggccacccaatgtgtataatacaattactcaaccagctgcttgaaagcaaggggcaacagagaagtcagctactggctcaggcaacaggaaatttgatgatactccttggtcaaatcattcatttaacatacatttatatagaacctttctgtatcaggcaccattctaggtaccacagataaaacaataaagagaactgacaaaac

SEQ ID NO: 273369 - DNA, 467 bp, Homo sapiens
caagagggattgtttcagagagggcatctcatgtgcagaaaaacaggttgtgaagtcaaacgcagctcagattctcaccagctgtgcgtgtaccctgacgagtcccctcaccattctgggccttagtcccctctgaaaaatgggacatgggcaccagagagactcctgagagctcccttagtgctcttagaggagacaggggaggtctcctttatctttgacccctaacccctcagacttccagaggcgggaactgcagcgatgatacaaatggtgtggtggaaagaatgccgttttggagtcaggacacctgggtttgaatccacttgcagccacttgcaggctgcttgaccttgaacgtatcgtgtcgtatcgtttcaccttgggatctgtacctgtgaagtgggtgaaagttaaagagataataaagtaacagtcgtgaaaccagcctggagcctcctcacaca

SEQ ID NO: 273370 - DNA, 1503 bp, Homo sapiens
  misc_feature (6)..(8): n is a, c, g, or t
  misc_feature (11)..(11): n is a, c, g, or t
  misc_feature (13)..(20): n is a, c, g, or t
  misc_feature (27)..(27): n is a, c, g, or t
cattcnnnagngnnnnnnnnaccaagnagcagcttctccgctccttctaggatctccgcctggttcggcccgcctgcctccactccagcctctaccatgtccatcagggtgacccagaagtcctacaaggtgtccacctctggcccccgggccttcagcagccgctcctacacgagtgggcccggttcccgcatcagctcctcgagcttctcccgagtgggcagcagcaactttcgcggtggcctgggcggcggctatggtggggccagcggcatgggaggcatcaccgcagttacggtcaaccagagcctgctgagcccccttgtcctggaggtggaccccaacatccaggccgtgcgcacccaggagaaggagcagatcaagaccctcaacaacaagtttgcctccttcatagacaaggtacggttcctggagcagcagaacaagatgctggagaccaagtggagcctcctgcagcagcagaagacggctcgaagcaacatggacaacatgttcgagagctacatcaacaaccttaggcggcagctggagactctgggccaggagaagctgaagctggaggcggagcttggcaacatgcaggggctggtggaggacttcaagaacaagtatgaggatgagatcaataagcgtacagagatggagaacgaatttgtcctcatcaagaaggatgtggatgaagcttacatgaacaaggtagagctggagtctcgcctggaagggctgaccgacgagatcaacttcctcaggcagctatatgaagaggagatccgggagctgcagtcccagatctcggacacatctgtggtgctgtccatggacaacagccgctccctggacatggacagcatcattgctgaggtcaaggcacagtacgaggatattgccaaccgcagccgggctgaggctgagagcatgtaccagatcaagtatgaggagctgcagagcctggctgggaagcacggggatgacctgcggcgcacaaagactgagatctctgagatgaaccggaacatcagccggctccaggctgagattgagggcctcaaaggccagagggcttccctggaggccgccattgcagatgccgagcagcgtggagagctggccattaaggatgccaacgccaagttgtccgagctggaggccgccctgcagcgggccaagcaggacatggcgcggcagctgcgtgagtaccaggagctgatgaacgtcaagctggccctggacatcgagatcgccacctacaggaagctgctggagggcgaagagagccggctggagtctgggatgcagaacatgagtattcatacgaagaacaccagcggctatgcaggtggtctgagctcggcctatgggggcctcacaagccccggcctcagctacagcctgggctccagctttggctctggcgcgggctccagctccctcagccgcaccagctcctccagggccgtggttgtgaagaagatcgagacatgt

SEQ ID NO: 273371 - DNA, 1072 bp, Homo sapiens
  misc_feature (6)..(8): n is a, c, g, or t
  misc_feature (11)..(11): n is a, c, g, or t
  misc_feature (13)..(20): n is a, c, g, or t
  misc_feature (27)..(27): n is a, c, g, or t
cattcnnnagngnnnnnnnnaccaagnagcagcttctccgctccttctaggatctccgcctggttcggcccgcctgcctccactccagcctctaccatgtccatcagggtgacccagaagtcctacaaggtgtccacctctggcccccgggccttcacttggcaacatgcaggggctggtggaggacttcaagaacaagtatgaggatgagatcaataagcgtacagagatggagaacgaatttgtcctcatcaagaaggatgtggatgaagcttacatgaacaaggtagagctggagtctcgcctggaagggctgaccgacgagatcaacttcctcaggcagctatatgaagaggagatccgggagctgcagtcccagatctcggacacatctgtggtgctgtccatggacaacagccgctccctggacatggacagcatcattgctgaggtcaaggcacagtacgaggatattgccaaccgcagccgggctgaggctgagagcatgtaccagatcaagtatgaggagctgcagagcctggctgggaagcacggggatgacctgcggcgcacaaagactgagatctctgagatgaaccggaacatcagccggctccaggctgagattgagggcctcaaaggccagagggcttccctggaggccgccattgcagatgccgagcagcgtggagagctggccattaaggatgccaacgccaagttgtccgagctggaggccgccctgcagcgggccaagcaggacatggcgcggcagctgcgtgagtaccaggagctgatgaacgtcaagctggccctggacatcgagatcgccacctacaggaagctgctggagggcgaagagagccggctggagtctgggatgcagaacatgagtattcatacgaagaacaccagcggctatgcaggtggtctgagctcggcctatgggggcctcacaagccccggcctcagctacagcctgggctccagctttggctctggcgcgggctccagctccctcagccgcaccagctcctccagggccgtggttgtgaagaagatcgagacatgt

SEQ ID NO: 273372 - DNA, 1455 bp, Homo sapiens
  misc_feature (6)..(8): n is a, c, g, or t
  misc_feature (11)..(11): n is a, c, g, or t
  misc_feature (13)..(20): n is a, c, g, or t
  misc_feature (27)..(27): n is a, c, g, or t
cattcnnnagngnnnnnnnnaccaagnagcagcttctccgctccttctaggatctccgcctggttcggcccgcctgcctccactccagcctctaccatgtccatcagggtgacccagaagtcctacaaggtgtccacctctggcccccgggccttcagcagccgctcctacacgagtgggcccggttcccgcatcagctcctcgagcttctcccgagtgggcagcagcaactttcgcggtggcctgggcggcggctatggtggggccagcggcatgggaggcatcaccgcagttacggtcaaccagagcctgctgagcccccttgtcctggaggtggaccccaacatccaggccgtgcgcacccaggagaaggagcagatcaagaccctcaacaacaagtttgcctccttcatagacaaggtacggttcctggagcagcagaacaagatgctggagaccaagtggagcctcctgcagcagcagaagacggctcgaagcaacatggacaacatgttcgagagctacatcaacaaccttaggcggcagctggagactctgggccaggagaagctgaagctggaggcggagcttggcaacatgcaggggctggtggaggacttcaagaacaagtatgaggatgagatcaataagcgtacagagatggagaacgaatttgtcctcatcaagaaggatgtggatgaagcttacatgaacaaggtagagctggagtctcgcctggaagggctgaccgacgagatcaacttcctcaggcagctatatgaagaggagatccgggagctgcagtcccagatctcggacagcatcattgctgaggtcaaggcacagtacgaggatattgccaaccgcagccgggctgaggctgagagcatgtaccagatcaagtatgaggagctgcagagcctggctgggaagcacggggatgacctgcggcgcacaaagactgagatctctgagatgaaccggaacatcagccggctccaggctgagattgagggcctcaaaggccagagggcttccctggaggccgccattgcagatgccgagcagcgtggagagctggccattaaggatgccaacgccaagttgtccgagctggaggccgccctgcagcgggccaagcaggacatggcgcggcagctgcgtgagtaccaggagctgatgaacgtcaagctggccctggacatcgagatcgccacctacaggaagctgctggagggcgaagagagccggctggagtctgggatgcagaacatgagtattcatacgaagaacaccagcggctatgcaggtggtctgagctcggcctatgggggcctcacaagccccggcctcagctacagcctgggctccagctttggctctggcgcgggctccagctccctcagccgcaccagctcctccagggccgtggttgtgaagaagatcgagacatgt

SEQ ID NO: 273373 - DNA, 298 bp, Homo sapiens
atttttatatattttttctagagacaggatcttgctatgttgcccaggctggtctcaaactcctggccttaaatgaccctcctactgtggcctcccagttgctgggattacaggcatgagccaccgtgcccagaacctcatctgagtcttgaaactaaaattaacattcctttgactttgtcctttggcagactgtttaatcagttctactgagcaggtattatttattttacaatgttaaaaaaaaaaacctacatttttaaaccctaaaaataaactaaaggaaaaaaatataaag

SEQ ID NO: 273374 - DNA, 369 bp, Homo sapiens
gctccaggcaggagtccggacttcctcaggggagtctgcaaggctggggcaagagagaccagtcaggcactggcctgggtgcagaatttcaggggctaccaaaaaacacagtagttgagatgagtaatattgagatgtatttttttaagtcaaaattaatgcaaaaaaaaaaaaaaaaacctgtgataaaggaaatatccagattttaaatagagtcagtaatagtggtatgccgagccatattggagcctgaggctaactgaaaaatcagcaacacggatcctgtctttatttgatatttggatattttgttcattacagatagttttgcattaatttttattttaaaaactattgtgttaaatatta

SEQ ID NO: 273375 - DNA, 238 bp, Homo sapiens
aattacacacatgagccattgagcccaaccagataagatgatctttaagggcccttcccatggtaccatatccaagtcagcgagactgtggctatagcaagtttaacataaccagatacgctagtattatgggctgcatggtgtgccccccacccctaattcatgtattgaagccatgaccctccagaccttagaggtgaccttattggaaccagagtctttacagaggtgatcaagt

SEQ ID NO: 273376 - DNA, 462 bp, Homo sapiens
ggctgctgaggagagccctcggagatgcagtgcagaagcctctccctgacgctgctgatttgggggtaggcatggaaatgtagagagtaccgctcagagaagaatctgccctttgcagagcggatctcagcccaccatggaggccctgtgaactcggtggaaggtgggatcatctcggcgtctgactgactgattctgcttctgcttctaagataaagtggatcaccgagaagacagcccctttacgtctggttctgactgcaggaaggcctggttggtgaagtagaaaatgttggaatcttgagtgagcagctgagttgttttgaagtttggacaattgagaaagaaaacactaagcagtgtcagacacggattccagaaaagcccacgtcacaggcttaaagaacagatgtgtgtgggcacatgatgggaagccacaacggaaaagctagttaactggag

SEQ ID NO: 273377 - DNA, 453 bp, Homo sapiens
tgggccaatgtgtaaagctgtttatgaagaaatgtcaagccagaggggctctactacaaatttggcaaaggacaatttcaggagaagctcttggccgctgggttctcctggccaccatgaacttcaggaagtgggtgccatagcagcagcctgaactacagaatctgggcactggtgtagctctgtatgccctccgtgtcagatgctggagatgtcatttgcattgccagagtttgccaagggtgcacacagaaagcagattgaaaagcaccctcttggaacatctctccaatgccttctactcacaaagtttaacatcattaacacgtgacaaagaagaactatttaatgggcccagatctatttatgaagacaatcaagtgggagtttggagtggataacccaaatttggataactggtgaataataaaatgtatttatttctgctggtgt

SEQ ID NO: 273378 - DNA, 506 bp, Homo sapiens
tcagaataaaaccaggaatggctttcaactctgctggaatcatcaataaaactagtgatcattcagaaatactagataacatgagtggtctccacaaggaaagcccagcaatttgtaggatttccttaggcaacagactcccataacaccaggttaacagaggactctgggccatctccaacaccgaactataccccaagggctctgaagtcaatccaggatggcatgaggttactccttggtcctaaacttctccccagatagctgtaaagctagaaaaattttattactgggtacatgtatataatcatccacagatgcaaggtctctatatgagagggggactgtcttgtataatttaaaacgcttagcagcattcctggctcctggcttctacccactacataccagtagcatccatcccactccagttgtgacaaccaaaaatgtatgcagacaatgccagatgtctcctgggtaccaaatgagcccaggtcaagaacatt

SEQ ID NO: 273379 - DNA, 564 bp, Homo sapiens
atcctaggttttgggctaatatccacttatcagtgagtacatattgtgtgagttcctttgtgaatgtgttacctcactcaggatgatgccctccaggtccatccatttggctaggaatttcataaattcattctttttaatagctgagtagtactccattgtgtagatgtaccacattttctgtatccattcctctgttgaggggcatctgggttctttccagcttctggctattataaataaggctgctatgaacatagtggagcatgtgtccttcttaccagttggggcatcttctggatatatgcccaggagaggtattgctggatcctccggtagtactatgtccaattttctgaggaaccgccagactgatttccagagtggttgtacaagcctgcaatcccaccaacaatggaggagtgttcctctttctccacatcctcgccagcatctgctgtcacctgaatttttgatcttagacattctgactggtgtgaggtggaatcttagggttgttttgatttgcatttccctgatgattaaggatgttgaacatttttt

SEQ ID NO: 273380 - DNA, 292 bp, Homo sapiens
agaagatatgggaatatgatgggacaaacttgagacatgctgttgtagtaaacattgtttttttaaactaagcttaaaaagatttgctaatttctgaatacagattggcaataataattgaaatcatgcaaggagaccggggagacttcctaggagcctcgtattcaagtgctgattaccgtaagctaagcacctgaatgtagctagggaacatttggatgaccattaattaatttctgaataggtatccattatgattgtcaagatatgatatttacttatgagaggaaaa

SEQ ID NO: 273381 - DNA, 386 bp, Homo sapiens
ctcatagatggacagatactatctgtcccactactactcaatgcaaggtctacagtcagatgagcatctaacacaatttggtttgcagagttttcaagaaagcagtgtattttatctgtacagctgcccatttcaactgtcccttctatgctcataggaggaggaaaagaaggcccttggaaattgccattctggaattgaaaacttaaatcctccagacaaccattaacttttaaaggacatctaaaagtgcagctctgtgataaccaagaagatgatggtgatagttctgcctatgactgaatacacaaatctcttaaacctctacagctgctcaacaaaacaaagaaataaacattgcattttgcagagaatccattctatca

SEQ ID NO: 273382 - DNA, 434 bp, Homo sapiens
ctaattccatcttatttatctgagattgaaatgctcttagctattgaaatcttcatggtatctaatgctagtagtattcagagtcctggaacttctacacagatactgcagatagttttgaaaaggtgtgaagacaaccagtctcggagcaatgatgattatcaagctgcagtagaaaggttaattatggctgctcgtatatcagatccaaagcttttcgttaaacacatgactgtcaatgttaataaggaacaggtttatagtttggaacattgttctgccctgaaatggttaaaagagaatatgaagtgggctggaaaggtttggcttttcagtaaccattagctaataaagtctgctttttttttttttttagttcaagtaatcattgttgaaaataaaaggcaataaaaatagacagttttcactatatt

SEQ ID NO: 273383 - DNA, 435 bp, Homo sapiens
acttttagaagaacatggtgagaagactatcatagcttagtaccagtaaatgtaaatgactatcttttgaagaaactatatagcttttttaagagtttctgactttatgaggtgttcattttataggtgtgaagacaaccagtctcggagcaatgatgattatcaagctgcagtagaaaggttaattatggctgctcgtatatcagatccaaagcttttcgttaaacacatgactgtcaatgttaataaggaacaggtttatagtttggaacattgttctgccctgaaatggttaaaagagaatatgaagtgggctggaaaggtttggcttttcagtaaccattagctaataaagtctgctttttttttttttttagttcaagtaatcattgttgaaaataaaaggcaataaaaatagacagttttcactatatt

SEQ ID NO: 273384 - DNA, 424 bp, Homo sapiens
ttttcccctaaaatttcatcattcaataaccagtgttattggcttgctatatattttctctagattttataaagtcatagcctacatatgtatacatgttagtatatattaataggtttgcacttctgtgtacttgtgtgaaagaataatcttctgttcctagctaaaaataaattgctatatataatatatagtgcttgcagtttttttctctaaatttacaatatttatcatggacatctttttatgtcagtacacaaggatctatcttgctgttattaacaaatatctgtcagccaggcgcagtggctcatacctgtaatcctagcactttgggaggccatagtggaaggatagcttgagaccaggagtttgaaaccagcctgggcaatgtagggagaccccacctatacaaaaaataaaa

SEQ ID NO: 273385 - DNA, 425 bp, Homo sapiens
aaaacaaacatcttatatgtacccggcatccaatacgggcttattgattatatttgtgttccagaacaggaactgaagggtgtgcaggaagtggtgaggaacttctgagcaaatctcagtgtaggactccttctgagttttcggtgatatttgatcatcaactgcttaagcccaaagaagaatgttcctgccccctagatgtgctgttctggttatccaaatgacggggctgtcaagtgcgagttcttaacctgactttcatggatgaacttaagggggatctgtaaaattgttttttctttctttcttttcttttctttttctttttccttttcttttttttttgagatggagtctcactctgttgcccaggctagagtgcagtggcacgatcttggctcattgcaacttccgcctcccaggtt

SEQ ID NO: 273386 - DNA, 456 bp, Homo sapiens
ggtcacttgagaccaggaggtcaaggctgcagtgagctgtggtcacgttaccgtactccagcctgggtgacagggtgagaccgtgtctcaaaacaaaacaaaacaaaacaaaaaaaaccaaaaaaacaaaccaaaaccaaaaccaaactttaacatgttctattattttatatataataaatctattttatctattattttacatatgccacaaagcaagatatttatagcaaaataaaatgaaatatcttaaaacatgtagctactatgactttaaatgatctattggtaagatcatttactctgcaatgtgaatgccattaaagataagttttaggccagtgtggtggctcatgtctgtaatcccagcactttgggaggctgaggtgggtgaatcacctgaggctaggagttctaggccagcctggccaacatggcgaaacccagtctttacta

SEQ ID NO: 273387 - DNA, 367 bp, Homo sapiens
catagagtttctgattctgtaaatctggggtgaggccctaggatttgcatttctatcgagttcccaggtggtactggtactgctggtcggtctggagatcacacctcgagaaccactgtattaagcacttactgtgacgccttagcgcattatttccttatgatcacgccgtttttacaatgaaggaaacagagtcctccatcgctgaagagacttaaccaaggtcaccagcctgtcctcttccactcgcacttacacagtgcatgtaaggagtccaggagctttttatggaactaactaatgaaggaataagctccaacatcccatggaagtaaaggaaaaggaacaggggaataatgtaccctaa

SEQ ID NO: 273388 - DNA, 503 bp, Homo sapiens
ctgtcatcctgggcttagagcaaagtaccctggataaatgttgactcagctatatctactccttaaattaaagtgctttactttctgtatcccaactttttaaagcaaatacaggaaacaacacaagtgagacaatttctgcatgtgccatggtttcaaaatcaatagcacttcaactgccaaacaggctctttaaactttaatgaagaatggattagttggtagaacaggagaaattcaagcctatcaccagttatagtaaagggtccttgcaacatttcttgaaacctattaagtaactttttttggtgcccagtgtttcaatatcccacattttaacgtcagaggtagctaaattatttcaaaggaaaaggctgtcttttcatgaacacatacaaatcattacactggaaattcacagacattgctgcagtcccttcctccaccagagactgctgaaaaggaaattagattgcattttgagtgagcaggaggtcagtgac

SEQ ID NO: 273389 - DNA, 297 bp, Homo sapiens
tagttgccctcaaattgagtgtgcattagaatcacctgaagggcttcttaaaccatagatccctgcgccccacctccagagttctgggtccagtaagtgggaggtgggagactctaacaagttcccaggggattctgatgctgcttatctgggaactgcactctgaaaaccccttgtcttggaaaatccaatggaagtttcctgtctttgtccatctaagcgttcactaaaatcatagtaaatgccagagcatgacttgttttggggaatggatggaaggactgcacactccagcca

SEQ ID NO: 273390 - DNA, 430 bp, Homo sapiens
gtatttaccatcttacatgccatctatcttattttttttaccgtgtttattgtctgtgtccacaatggaatgtaaggtctctgaaggagggattcttgtctgttttgtagtgatatttcctcgacacctacaacagggcctgacacagagctgactagttcataaatgaagcagacatgtaaaggcatgtgcgtaaaaagttctcagaggcatattcctatcctggtgagtcaaaaagctgcaggcagggagatggaactcttatgagattcacatactgtgagaaaacaaaacaaaacaaaacaaaacagaagctaggtatggtggctcatgcctgtaatcctggcatttgggaggccattgtgggaggactgcttgaggccaggagttcaaggtcagtctgggaaacctagcgagaccctgtctctac

SEQ ID NO: 273391 - DNA, 492 bp, Homo sapiens
tgagggataaaagactatacattgggtacagtgtacactgcttgggtgaagggtgtgccgaaatctcagaaatcaccgctgaataacttattgatgtaaacaaacaccacctgttccccaaaaacctatttagataaaaaaaaattaaaaaaagtaaaagtattttgatttcatcatcttgatataaaatttttaagtgtctggggcttaaagatactctttcaaaaacttataaagaaattattactgaaatatttgtacatatgagcaagagtgttatatataccattgtctgtaatagaaactatggtaagggaactaaattttcaccactaggttactgtggaaataaactttaggatatcatataaatgaaacactgggtccataaaaaatattgatattatgttgtaatttcaaatgttatcatagaaatgtatttccatgaaaagatagtaataaagatgtaaagagggttacaaagataacaag

SEQ ID NO: 273392 - DNA, 382 bp, Homo sapiens
aaaagaaaaaaaaaaaaaagagagagacacccaaactaaagagaaggaaaaaaaggtatgaacagctttactttcaggggaaaattctctgaaattttcttgaagcagaagaaagttgatctggatagaaataaaaacaaaatacaaactttccagtatcaggctaacacaaaacaaatcaccaagtaagcacacacaaactaggaactgaaagttccttttggacattgtgaataaagcactttttaaaaggtgttttccatgaatatgcttatgaaaacgtgcttaaaggtgggaaggccatgttagcagtctaagatctgttctgagtaaagatgttccatccagagaaacactgatggcgagtaaaccacatgtcctt

SEQ ID NO: 273393 - DNA, 443 bp, Homo sapiens
tttttttttgagacagggtctcactctgtcacccaggctggagtacagtggcatgatcaaggctcactgcagcctcaacctcccaggctcaagcaatcctcctgcctcagcctttctagtagctgggactacagtcacgtgccaccatgtctagctaatcttttaattttttttgtagagacagggtctcactttgttgtccaggctggtctcaaacacctaggctcaaaccatcctcccaccctggcctcctcaagtgctgggattacaggcgtgaaccactgcatcttgcccctcttccttaaaacaataacaaataccagactctccccattttccaagtgtctaacgtttggtgatccaggatgccactgccagctacaggtcagggtggggacttatggaagtcaggtgatacgtggagtttctaacagagtctacct

SEQ ID NO: 273394 - DNA, 296 bp, Homo sapiens
gaagataaaatagtcatgagcatgttttcgtctaatgacatacattcagaatatgtaaagcaaaagctgttaaagaataaggagaggctgggcacactggctcgcagctgtaatcccagcactttgtgattacagcactttgtgagcccaggagttcaagaccagcctggacaacatggggaaaccccatctctacaaaaaaaatacaaaaagccaggcgtggtggtgtgagcctgtagtcccagctacagtgaggacaggcaggaggatcacatgagcccggagagattgaggct

SEQ ID NO: 273395 - DNA, 563 bp, Homo sapiens
atccattgtttctgttgagaaatgagttactgtcttagtgttgctcctttaaaaataatgaatttttttctcacggctttaatcatttttctccttggcttttgttttcaacagttttactacattgtacccagctgtggttttctctgtgtatatcctggttggggcaagccagggcttcttaaatcacattttgaagtagaattttaggtgttagaggctgagaaaggtaggaaggagaggtggatggggagaggttcattaatggataccaaactatagaccaaattatagctatgtaggaggaaggagttctggcatcctgcagcactctcaggtgaatatggttaatgatgatttattgtatgttttcaaaaagctagaagaaaagattttcaatgtccacaacacaaagacatgataaatgtttgagttgatagatatgctgattaccatgatttgatcagtacacattgtacacctataccaaaatcatcactttgtatcctataaatatgtacctacaaatatgtacaattattatgtgtcaactaaaaagaaaa

SEQ ID NO: 273396 - DNA, 523 bp, Homo sapiens
tctgtcataagacgttcacttaacaggtgctatacctcaaaggacagatattgtcatttttgtttgctgcaggcttaattttgttcccctaaagttcatatgttgaagacctaacccccagtacctcaaaatgtcactacatgtggatatggggtcttaagagagacaaataaatgattatgaggtcattaggatgggccctaatccaatctgcctggtattcttgtaagaagagaaaatttggatgcacggaggcaccacggttgtgcacgcacagaggaaaggcctcatgggaggacacggcaagatggtggccgtctgcaggccgaagagaaaggccccaggagaaaccaaccctgcttgacaccttgatcctagacttccagcctccagaactgtgagaacgtaaaattctgttgtgaaagccacctactctgtggtattttgttatggcagcccaggcaaatcaatacatgattaaactcctctgatgcttaagtacctcacgtattaaaaaaaaatg

SEQ ID NO: 273397 - DNA, 709 bp, Homo sapiens
gctacttgaagacccagaaaaattgattcttacttgtctttgttatcaagaccctgtttcatacctaagtactggtgaaacatgctctagtttgtgagctatttgagtagaactaatggaaagatgaaataatagtacatcaatagttacaatgaagaaactaattatcccagagagtttttgagcatatgggtagtgtttgtgaatttaagtttgttccccacattgtcagtttattctaaaattatcaccattttagacttaaagaattttaaagccaaaagataagcaaacagacttgcttaggtcctgtagcaaattaattcagaccttgaacaacatttcattgtgctgtttaggaagtgttaagtatattgagattttccatattactgtgttactatcatacttaaattttagaagatgatcaaattattttaatgactaggactatgcttatgaagttagcatttcctgcccttatttatagaaagcacttgatatatttcacaaaggtgaggagattaactttttagggaacaagtcatttaaattcttgaaccagtttccatcttttaggctatatgagtattgaatataggagaaaagagaaaagtatgcatgtttctcaaaggctctttctttaaatgtcaccagcagatctaaacagtatccataggcacctatggcaaatttactgaaaaaaaaa

SEQ ID NO: 273398 - DNA, 133 bp, Homo sapiens
tggaaatcagtcatttcttctccccttttgttaaatatattaataactccaagactcctttaacaagtgtgttttctctctgctaagatgacactctctaccgcatctcaagtggtttaaccaaaggtcgacg

SEQ ID NO: 273399 - DNA, 545 bp, Homo sapiens
tgtaatggctttgagatataattcacacatcacacaatccacatgttttctttctaacaaaagatacataattatatacgttatgggtcacatttaacatgcataaacagattttgtcctacagcaactgttgagtccatttgcatataagtagaacactaaggtggaaaaattaccactatctagagcaaaaactattacaaacatgtgcataaatttcccaatatatataaggagattatatatatatatatatatatatatgaccttcaaatttgtcatgaaaattttagtcacatataaacctgtgtgacgaacagtacagttttacaaaaaatattctgtgctttaaaccagcagaatgtttatgcacattaacaggtaaatttctacctctgaggtttttatatcttagaagaggaattgcttactagaagagtaggaagatatgagattatatatgtgcatgtgcacgtaatgaatatggaaccgaggctcatgactaattcttgtttcttaatggtatgatgaatcaaagaattaag

SEQ ID NO: 273400 - DNA, 285 bp, Homo sapiens
ggagagaccttggccgagggaaaaacaaccccaagaagcctggagtaagtggtcccgaggcggctcaagacagtttggttttattcattttagagagacaggaattgcagggaaaatcatgaattagtgcctggaaggtgtaatttccttaggcagaaagggagggacctggccgggcacggtggctcacgcttgtaattccagcactttgggaggccaaggcgggcggatcacctgaggtcaggagttcaagaccagcctggccaacatggtgaaaccccgtct

SEQ ID NO: 273401 - DNA, 443 bp, Homo sapiens
tcttccctaacctccatagaaaacaaattattttgttagaactggagggtggtatctgtgatttcaagatggttcttcgccattttaatctctctttatctcaggttagacttttgtttgcaattgtgattttcaaagaaaaggtccttgtcaaatgtttcaagtagaacacagcaacacacatttatttgcaccccaacttgtcaacaaagcgtggggacaggcatgaaggaaagatgccattgcctgccagtgtttaacttcattgctgcccaactcagaactcatctgactaaaaacacttcttaaccccaatgtttttctgtcattttaggatttcactgtggcacaaaatgttcctgcggtccaaaattgagaagggaattgaaacaagggaaacttttactgttatgaaatataataaatagtgcttgctttacaaa

SEQ ID NO: 273402 - DNA, 420 bp, Homo sapiens
tgttctgtttctcttctgtaacacaaagagtactctgcctccctaggccataaataactccagggaccttggaatatgacatacgattatgaattgagtttcataactatcttaaatgactcattgtgactatcaggtttaatgaaatgctgcttctccattttttttcagaagtatacagtaggaaagatgccacaaaattactgagaggaatgtaatgataaactaacttgccaaaatattcttgtgaacaagaggccaaataaaaatggtgaaatgagttttcaaaaaagaatcaaacaacagaaggcaggcatatgtagtgatatagtatgatgatagaagaaggaggacaaaaagttcaaagacctgtcaagtgaatataaacagagtcaaagtgaaaaaaaaaaaatttaaacg

SEQ ID NO: 273403 - DNA, 456 bp, Homo sapiens
tctgattagccacatggtggatattttaatgaaatatttgctaacttctaaaaagcaggagattttattttatttttttaacttagatttctagttttgcctggggaatcagaagactggtacagtggatccacatccccaaagcagctgtagctatgctgggtagcagctgccttcttaaacctggcgtattctctgtcagtttgccaaagtctccactagttccccaccaggctggctttactcgtccacatcctgtctaccccagtgggctcgtaagtgtgtgatccctggcctgtgttgctttcttccctaccagccctcactgctggcagttcccacagcagccatcatgagtgggagagtattaagacatggaagcatgctgtgtaaggctttctcagacccaaagaacatgagagagaaaaaacacaaacacttcattcccacccatga

SEQ ID NO: 273404 - DNA, 186 bp, Homo sapiens
tttttacatgacttttctttttctgtccataaatcctctatgaccgtgtggcatcaccagagtctctctgaacctactctggtttggatgccagggaagggggttggcaaggtgcccaatttgcaaattgttctttgctcaaactctgttaaatttaatttgtctaaagtttttatcttaacaagg

SEQ ID NO: 273405 - DNA, 657 bp, Homo sapiens
agtcccagctgacctgggaagctgaggcacgagaatcgcttgaacctaggaggcggaggttgcagtgagccaagatcatgctactacactccagcctgggcaagagagcaagacattgtctcaaaaaaagaaaaaagaaaaagaaagcaagagttggctcctgtcatttctctgctcaaaactcctcaatggctggttcctgtttcactcagaataaaatccaaagtccttaccatggcctgcatggtcccaccagctgaggccaccttctgccattttcctcttcatgctttgctccagccgcagtgacaacttgttctttccaccacctggatgaagctttccccaaatatcctcacatctgttttcctcacttccctcaagtcactgttcaaatgtcactttatttaaaatagctgccacttctgaccctctgtcactcttgatcaccttaccctaccttgtgtctttcttagcaactgtcacaacttcacattttttttttttggtctattttccacccccacagacacccaaactgattttatataaaccccttgaaatcaaggactttgcctgttatggtgctgctatattccctgtacctagaacaaagcctcatacctggttggagctcagtaaatatttgtgaaaaaa

SEQ ID NO: 273406 - DNA, 315 bp, Homo sapiens
atgtacagatagcaaataagcatatgaaagacttgaacatcattagtcattgtggaaatgcaaaataaaaccatattgtgatactacacacctgttagaagggctaaagttttaaaaactgacactatcaaagtttcaggaaggacacagagtaactagaactcttaaacattgctactgagagtgcagcatttgtacgtcactttggaaaagagtggcaggttcttataaagttaagtgtatttaccccagcctgggtgacagaatttacaccagtctaggtgtatttacaccagccggggtgaccctgtctca

SEQ ID NO: 273407 - DNA, 476 bp, Homo sapiens
cagctctgaccaaggctggttggcaggggagtgtcacggagagacagagcagaagtgagtggggtagggccaagccatttccagctgtgggctcaggaaggcttgaaggatagttgataaatgagtgatatctggaaggacaggagaatttccgagagtggaggtggagccctcgtgtggaggaaacagcctgcacaaagacaggggcaggggggttcgtgtggcagttttcctgacctgccttgcccctggaggctacagccagttgtgtccctggagtagaatgctgaccctcaccattcccagctcaccccaaggacctccccaccccattgtgacactacttcctggacaccagtggagctcaaaggttctgcttccaagggtctggctgggcctggattgtggtcaggtgggccctggctttggcttgcggtcctgcctacagggaggcagggccgggagggtgtggagag

SEQ ID NO: 273408 - DNA, 214 bp, Homo sapiens
gtagagctggggtcttgtcatgttgttcaagctggtcttgaactcttggcctgaagcaatcctcctgcctctgccttctaaagtgctgggatcacagatgtgagccaccgcacccagccgggaaaaattatttaaactatttgaactgatctctgaaggttcatatgtgtcacatagtacttgcctctttatttttctggatcccaaagtccaa

SEQ ID NO: 273409 - DNA, 241 bp, Homo sapiens
gacaatgaagccacccggcccctaccactttgactccctctcgccctcctcaccgtcagtccacacagcataattaggatcaaaactgaatccacctgatccctggacacagctcagacactccttgccactaataccacaggaagcaaggtggcaactcctaagcatcagaataaattcagttaaaaaacaaaaatccgctcatctccccctggatgaaattcatgtttctggaagaaaa

SEQ ID NO: 273410 - DNA, 434 bp, Homo sapiens
acgcgtgggttgaattcctggcctcaagtgatccacctgccttggcctcccaaagtgctgggattacagctgaccactgcccccagcctgtacttctttttagtagaggtggagtttcaccacgttggccaggttggtttcgaactcctgacctcaagttgatctgcctgccttggccttccaaggtgctgggattacaggaatgagtcaccatgcctggcccaacttttctgctttgtattttctttttttttttctaatattccttttttgcctacagaccaatttttaggtttttaaattctgtatacatcctgtgtggccttgggcaagttacttaattgcattgcaacttaagttttcccttttgtacaaaggagagcatacatgagaattcttctgaggatcaaacgtgtgtatgcaaaggggctgca

SEQ ID NO: 273411 - DNA, 241 bp, Homo sapiens
ccagagcttcttgcagaaacacagacaaatgaaataatagctcttctccccatggggttatactgagtacagcccattaggcagaatggagccatattacatggttttgaaagaagaatttaaaagtcatataaaaggtaatgtactgggctggacagtagagtaaccagatgcgtgaagtagacaaagttgacattaacctctaagatcggccaggcacagtgactcacacttgtaatcc

SEQ ID NO: 273412 - DNA, 407 bp, Homo sapiens
gtcaatacccaaggggctgttgacctcagaggcactccacacttttccaagagggtattgcaaaatctgcaccattcttttaaaaggcaaaatggtgactttctgcctgaaaacagcctgaagtcccttgtggtcctctgagtccacgcttcaaagatgtttctctccttagacactagtgtggcatcagaggtccaccaaaggtggatgtctctgcaaatactttccaaattacttgttgcaggaagctgattaatgctattttaacagttaaatctgaaaaaatagaaccagtgtctttaaatctgtgttgtgattatctcaggtaatagacttggcatttgtactatgagtctgttgggcacaaaatgttcaattgcctgaacccaataaggaatggatttttc

SEQ ID NO: 273413 - DNA, 482 bp, Homo sapiens
ttttatgctgactcagccccactctgtgtcggagtctccggggaagacggtaaccatctcctgcacccgcagcagtggcagcattgccagcaactatgtgcagtggtaccagcagcgcccgggcagttcccccaccactgtgatctatgaggataaccaaagaccctctggggtccctgatcggttctctggctccatcgacagctcctccaactctgcctccctcaccatctctggactgaagactgaggacgaggctgactactactgtcagtcttatgatagcagcaatcacacagtgctccagacccatggggaagtgagacagaaactccccagagcatctctacctgggccagtctcagcctgtctccaccagagagggtagctctcccatctctcctgtctaagtgcttgaggtgaactttgcttatgacttcctcttttccttttcaaaataccaatctgtttttccacacctt

SEQ ID NO: 273414 - DNA, 400 bp, Homo sapiens
atcataaagcaaaaagaacattcttaagaagtaactttcttctgttgacaagcacttggacttaacgttccacgaaaacaggaaatcctctcctttctcgtaggcagagacgcatccctgcagtcacaggggcttggcctcagatgtctagggtgtactgagggggtgttgccatgttgaccatgtgcgtcctctctggctgccacaacagaatactgcagagtggggggcttcagtcacaaacctttattgctcacaatcctggtggctgaagtccaagatcaaggtgtgggcagggctggtctctcccaaggcctctctcctgggcttcagatgccgtctctgcatcctcaagtcctcacccctctgtgtgcacctgtgtctgcatctccttcctaca

SEQ ID NO: 273415 - DNA, 587 bp, Homo sapiens
ggctttacggcctttacagtgctggccccggtggccacccacctgcctgcccaccgtgctcaccctgcctttgaatgcccagcctctttgccccacaaccaatgtgacctggcttaggagcatagctgaagcaggtcgctaaggaaaaaccaagcaacgggactaatgggatgttctgaaagacaaggacaaatcaagccatttgtcagaacattggttataagagggaaaatttgggaataactctactacctaacagaataggaacgtaaattcagaacggatacttaaaagaaaatgtaagcagtcttaaaattttattcatgagtatgcaaaatatatgttaaatgagagaaacagaacaccaaattgcatcagcaatatagttaatatctatgttaaaatacatagtacacacagcaataaaacactaaacagatttataaataaacattaatgatgcttgtgccagggtggtacaattggagtgatggttctccattttaaaaattgatagatattactttggttaattaaaagtctgcctgtagattttctaagccttcgaagcactaaaagcaattttt

SEQ ID NO: 273416 - DNA, 91 bp, Homo sapiens
ccccggtctgggagggaggctcacaatccctgggcagactgagctagggacagtgatcaccatctttcctggcctggctgggggtagaaaa

SEQ ID NO: 273417 - DNA, 484 bp, Homo sapiens
ttatttaagtactgatgggccattcacagatcattgtccactatgccatttaatgcctaaacaatcctttgacacaatattcattctcattttataaataagatatagagaagtcaagactggctcaagatcatagctcttacccctgctcttactattaataatatatcctaaaatactaactggcaaataataaatgttaatgaatagtggtttatcttgcatctcagcaaagctatgtccaattttagatatcacattctttccatcactttttgctttcagagcgagtgacaaggttataaaaacaagaaaaaatatagcgttaggctattttataaacagtatagtagaaaactctaatcaaatttctcaagttttctcaatgccattatatttctcaattctttcagagaactcttctgctcccaaaacatccaatatacaacaaaaatgtatgatttttatagtaaaatgactttcc

SEQ ID NO: 273418 - DNA, 148 bp, Homo sapiens
ccacccttccaagcagccatgctaataggggccatcgtaattgtccagcagtaattcatccagagacagattcgtgttggccatatctaatggcctggctctcggtccccttctgtctcctttatgactcaagctaattcacgatgtg

SEQ ID NO: 273419 - DNA, 378 bp, Homo sapiens
aatgttttgcttggtttgctgtaatgtttgtttggtttgatgctcttaatatagttaactagttactccagctggaatttatttggtaaggagtaaagtgctaaactaatttttcctcctgaaatagctaactaattatcccaataccattcactaaataataatctctcccagcagtgcgttagtctaaagaaagacagtatctgctgctctctaactgcaaagctttgaggtttcaccctaatatcagcacttacactaggaaactgaagtcagttactttatctcaggcactgaggccacaaaacaggataaagaaaaacagttactttcttcgaggattcaaataaagataataaattgtatttaaatccaaaa

SEQ ID NO: 273420 - DNA, 164 bp, Homo sapiens
aatgttcttcttgatgtaagtaattactacatagtccttcctttgtgataaatcatttagctgcatatttgttttactcgccagtaattaaagaccagtaacttaaaaatttcaaattttatgtaatcttaaatcaagcctacaataaaaaaaaatgtgcaaaa

SEQ ID NO: 273421 - DNA, 165 bp, Homo sapiens
agcatctgtaatcccatatctagaaaaacatgtttaagtagaaattcaggttcacaaagatgagttaaggattctgctaataaatagaattgattctattaatcttttctaactacgtgacatgaacataaacaataagtcagaagagaaataatttatcataag

SEQ ID NO: 273422 - DNA, 356 bp, Homo sapiens
gcgcccttgtcatcattgggatatcataggcaagccaggtgttccagctttagccagctgtgcctgaccccacctgggcctgcactgaacaggaaactcggggcacaatggacacctctatccagcccattgtctgaagcagagagcacttgatggtaaacaaagatcaagtacatacccatctgcttttactgcaattggctattacctgtaattgccatttattagcctatagattgaactgcacaatccaatataaaacctgctgacagaagtgcacagggctaaaggaacaaagccagaagatcctatccaacatgctttattgtctcaccatcaagggatggagaaaattt

SEQ ID NO: 273423 - DNA, 477 bp, Homo sapiens
acagttgctcctttttctctctggttttcctggactatgtgaccaggaggactgtcttttcaaagggaatttagagcctcactctcctggatacctgttacttcctggctgtcaacccttaaaggaccccagtgaaatgatgtgcatatgaaaatgtagtttggggatgactctacctgaaaactccaaacagggaaaaagacctcaattacgagaggcatagtgacctgcctcacctaatcctcacccttgctgctcctgatgcaaagccaggcacaacaagggaaatccatgtccaaagcatagtgtggtctcaactcttagaaactccctgggtttcccttttctcttagccacatgctaaccagttgcttctcagtgtttctcttcaatagaaaaataaggttttatatgccagcagcctatccttgtttttgcattttaaagacttagttatttatacgtattttaaaatga

SEQ ID NO: 273424 - DNA, 440 bp, Homo sapiens
atgctacctcctgggaagccctgagaggaaggatagttaagaattcatattacccagggaggtctggccttgccctctttggctacagggaggcaatctctaggctctggaatgtcatgcctcataggggtctctttatttgcctggggtctttgggccaggtggtaccagttctgtctctagaggggctggggacgagagggcagccatgtgggcagtatttgaatgagctccagcaaaagctttggacaccgaggcctgggtgagcttctctgggaaattgacactgtgacagtgacatgtctgtgactccactgggagaggagaacagagattccacgtttagagccctcctgggctctgccctttgggcttcatcacttggctgactttaatctgtactctttttgctgtattaaactttaactgtgagtataaca

SEQ ID NO: 273425 - DNA, 424 bp, Homo sapiens
agttgatggtaccctcagaattgaattaattctgtaattctttcaatttttaaaatgtcaggcaattcttcctcattgaattcaggaaattagttaatcatctgccttaaaagaactaacttgtttgaatgttgaactggtggctcattgatggtttctgagatgtactatttaaataagtatgtgcatgttataaaatatatttggctatgcctagtgttgctaaattttaaatgttcttttaaatgtaacattataagaaccaattaatgatgaaggaattacacagaataacaaaatgcttgcaaatgagaccaagcaatttgcttagttatactaagtaaacagagtaagttctagaaatggtcaatattgcttttgatcaaactgatatactcagagtgattaatgcctgaaagatggg

SEQ ID NO: 273426 - DNA, 489 bp, Homo sapiens
ctatttctgaaatactgaatttgtacggggaaaaaagcaatattcaattaaatatgattgacttactaaaacattacgttaggaacaaaaatgtaacatttattccaagaatatcttctgggatcagctccattctacttccaccatgcctacattttctaattctactctagttatgaataaacatgaagcttgatactcaggagtgaatacgcccacggcttaagctgattctaggttctaatagaaacaactcgtagcttgaaagaggtgttgttcttttacaataaagcagaatctggttcaataatgtaaaagcagaggtagtcctgcaggaattagactgtgtcatttgatttttatgggagttattgtctaatgagagttaatgattaagcacatttggttgtattgtcttttggttgttaacctattctacaaagtttattacaaaaaaaaaaaaacaagaaaagcatttcactttcaaca

SEQ ID NO: 273427 - DNA, 502 bp, Homo sapiens
gggcaggtgaactcaggagagatgtcagagagtaggtgatctttatcctaggttttgatgagagggcaggtccttgataggaagatacagagtacagtataaaaatagatcagcaacagcaatagaaacattttaggaagagtttttttggcctctctggaaagatttacacggggaaagaatgttctcttcctcattttgttaattttacatcagcaaccagaatgaatctctcccctccctggttcccagcacacctcccctgcacctccccagcagcttccctgcagcttcgaggtctttctattcttattatagttatggtgcatgctcctgtctctccctctagtatgaattcattcagatcaggggctgtgtcctgttcggcttcttattcttgacaggccttatcttgccgccttgcccttgtaagcacttcataaatgcttgttggcttgaattttcaccaggaattaaagaaaaaagttttacacagataata

SEQ ID NO: 273428 - DNA, 564 bp, Homo sapiens
tctttcaagaaaggatgaaacaaagatatttttcagacatagaaaagttaaaagtaatatattatcagcaaacctggactatgagaacagtgtaaaagcctttcaggaagaaggaaaataaagaataatatctttgtgcagatagaaacatggatccacacaaagaaatgaagagcactggcaatagtaacaccataagtaaatatacaatacctgcccttattacttaaatatcttttaaagataattggctgtttagaaataatagcagtgtcatgtgagttctgcagcatgagtaaaagtaaaatatatgacaacaataacctagagagacttaatggaaatatagtttgtaaggttcttagactgtgtgtaaagttgtataatgcctattaaaagttggctattacaagttatctttaagttaaaacatctgtatggtgtaatccctaaagcaaatgctagagtaacaaaaacagtgataatattacaatattacacaataatatacaatgcagcgatgaaatagaataaatgtttcaaatgcttgaaagtagacaaaaa

SEQ ID NO: 273429 - DNA, 291 bp, Homo sapiens
ggcgggacacggggtgtgaaagagaggagatgaggagtcagcacatccagccaccccctccaaacacacctgggaaaagggagaaccccggaggacagcccagtgggagagtggctcacaacaagtccacatacatcttgtgggactcagggaccagccagacacaggaccagggtatacaggtgctgacttttgagttgtccacggcactaggaggcacatgccccagcacctccccaaattggaaatctgggggtacaacctctgtacacacatgcattccagctcgca

SEQ ID NO: 273430 - DNA, 550 bp, Homo sapiens
gctgcctctaggcagcagctcaggagcagtgggcaattgagagcaactcctgagagcactaaaagaaatcacattgcttaaatggcatttacaccgaggggtggggtggtagtggcaggagtctcaaagctttttccgagggcactgtggcaagaagtccatggtgggaagagtggcatccaggtgtcctctatccaaggaggcagctgttcttattcaagggtggggtccattttcttcctccaaagtcaaagagattctctttaaaagctcaattgtgacttctgggacatcttagcaagagacactgagcgtcttcatttcctctctccatttcaggacacacctcccttggaggagtgctttctacctggaaagcagtgcatgtatcagtggaattctgcttagcacaacagaattgggaggtggagcagggagaatgaggccaccctggccccactggggggtcacaagacagctacttcatgcctgagaacagggcagaatcaggctgggcaaatagtagggctgagggactacccgctgcatc

SEQ ID NO: 273431 - DNA, 298 bp, Homo sapiens
ggaagaacatcagccctgctgagacctgggtgagggtaacaggcacagctctgtttccaggctaggtgtgggttctgggcgcctaataggtttccagtaaacgtctgtcgagtgactgggatggacggggacgggaggaagcagtcaggagatgtgccggtgccacttgcatccctccttggaggcccttgtgcctctgctccaggatgggacaaccaggagatgggataggaccctaggacccctgttgtaaacttctggatcttggaaaatcaagactaggggtcagtccgatggc

SEQ ID NO: 273432 - DNA, 419 bp, Homo sapiens
tcttttttgagtttttatttttaccagaaaatgacagaaaggttaaggtgattccacattaggaaatatatataaaagtaaattacttgagattgtaatgaattattaaggaaagattatgaaaatgtagccttggtaggctgggcgcggtggctcacgcctgtaatcccagcactttgggaggccgaggtgggtggatcagctgaggtcaggagttcgagactagcctggccaacatggtaaaaccccgactctactaaaaatacaaaaatagctgggcatggtggcacacacctgtaatcccagctactcgggaggctgaagcaggagaatcacttgaacccgggaggtggaggttgcagtgagctgagattgtgccactgccctccaacctgggcaatagagagactccatctcta

SEQ ID NO: 273433 - DNA, 786 bp, Homo sapiens
agcttgtcgtgagccgagatcgcgccactgcacttcagccgggtcgacagaacgagactcagtcttaaaaaaaaaaaaaaaaaaaaaaaaagagatttccatgtttcactgtctatgaggagtcaccattttctgtgaaaatgaggtcctatgctttattaagaaaatttgatttttaagaaaaatataaaaatttttaagaaagtaggattttttttttttaactacatggagcaaagagtgccagacagcattctaatgtacagaaatccaaaaagcatcctgctctcccaggccttctcctggctcagagtgggggcagctgggatcacgtgtgctgggaagggcctggttggacttctttctccctgatggtggccaccacgaggcaccttggcagagaaggaacaggggaagctgagaccaaacacagagatgacacagctcctctgaagctaggctggagggggagaaactgccttgaggggtgttgggcctcataaaagcctgtttgtctactgtgctgtgaagtgatcctcaaagctctcagaggaaggcctcaacggggtggcacccttcatgcagggggctggttgtgaaacaggtgatgcttctcttttcaaataatttagacacatttagtggtcacattcctactgagctgaagtatgggccccctatggaactaagtggagtcccttgtattgacgttggcccagcacctcacccacgttttctgggcccactatctccacgtttgcaaaatgggttcctgtgaaaagtttc

SEQ ID NO: 273434 - DNA, 230 bp, Homo sapiens
tagaaaataaggtggtctgaattaaataggggttgagaaaggcaaaggcctcccaagaggcctagatcttttctcctctctcctaataaagagctgcacaagtatatccttagaatgcctgcgtggccacagaacacactgtgaagacaggtggtattttgacattagggctgttttaggaggacaggattaaggctttaaaaagcaattcttacaagatgtagagacga

SEQ ID NO: 273435 - DNA, 536 bp, Homo sapiens
accatatttcatactgattaagatcagtagtttgaagtttgacttttgttagggaataaaaaggttacatttgattgccaggacattgttaaaagactgaataatatagcatttataaaaagaaaccaactttgatataattgataactaaaattttaaaaatactcttttagaagttaaattgctcttgtatttagaaaatctgaaatattcaataaattaaaatgaagacaaaatgaggacataattttgatttatccctaaaagataaggtcacttgtgaaaaagaaaccaaatacagtttttctaatcctcaaggacaattttttaaagtttgcaaacttaaaagaataccatatagtagtcagcctatttttaaaaactgtatagtattcaacctgtttaatcttgtcaaattatatactaagaataatgtgtgtcaaatacagtaggtggcactgtgataaaacttttgttcctataaagagttgcgttcaggcttcatctgtgtatactcttctacctgtggtgttgct

SEQ ID NO: 273436 - DNA, 289 bp, Homo sapiens
cttccacaaaggaactcatggcctgttatcaaggtgactgtgcaatgaggaaaagaaaatgatgaaacttttggagagttactgactgaacaccagctgtgaattgatactaatttctggagacaaaacatgagtttgtccaccagtcagtgtcagagcttatggaggtcagaagatcaatggagttttagcttagatccatcttatagtgacccagtgggtcgccaaacccatcctgcagttacttctccagttccagaataaataattggatagaaatagtcagcaa

SEQ ID NO: 273437 - DNA, 434 bp, Homo sapiens
ctgtcaaccaggtattctatatccagcaaaactagtcttccaaagtgaaggtgaaaaaatggcattcccagataaaacttgagagaatttctccctgtcagactgtcttataagaaatattaaagcaaatcttcaggctgaaaggaagtaacactgtatattagtttgtatccataggaagaattgaagaatgctgggaatagtaaatatgtggtaaatataaaggagttttcaacattgtttggttggatttatagcaggtacatgaaatatatatatgataatagcacaaaggagttaggaaaaggacataaattatagtttctatttgactgatattaagtattattgtgatatagattgtgataaattaagacacattataatccctagagcagttgctaagttactaagaagataactccaaaaatgta

SEQ ID NO: 273438 - DNA, 92 bp, Homo sapiens
ggtgggtggggtgcaggtggttagattgtcagtaaaagcacctaagccctgggtaaattctccagacataataagactgactctgaaagatc

SEQ ID NO: 273439 - DNA, 452 bp, Homo sapiens
tctcccccattgagaggtgtcttgtatcatgcacaaaatctctgtattttggggtccttttaaaaatttctgttccattgtctgtttaacctttttttatatgtaaacttttttcgttgttgttggagacggattctcgctctgtcacccaagctggggtgcagtggtgtgatctcggctcaccgtaagctccgcctcccaggttcatgacattcttctgtatgtagactttttttcttatagcagttttaggttcacagcaaaattgagtaaagtacagagtttccatatacccgctagccctacccaccccacacatacacagacttttgtccacaatcaacatcgccaccagagtggtccatggttatagctgatgagctacattgacacatcgttatcggagtggtccatggttataactgatgagccacattgacacatcgttatcc

SEQ ID NO: 273440 - DNA, 296 bp, Homo sapiens
gaaaaagagacattcttggtcacacttacctgaatacgaagtgaggatgggggctctgcataccctgctgtgggaagcatggcgagaggcaggtgaagtgaggatgggggctctgcataccctgctgggggaagcatggcgagaggcaggtgaagtgaggatgggggctctgcagaccctgctgtgggaagcatggcgagaggcaggtgaagtgaggatgggggctctgcagaccttgctgggggaagcatggcgagaggcaggtgaagtgaggatgggggttctgcagaccctgc

SEQ ID NO: 273441 - DNA, 318 bp, Homo sapiens
atgctacaacatggataaaccttgaaaacattatgctaagtgaaagaagccagtcataataggctacagatggtaggattccatttatatgaaaaggcagatctcgctgggcatggtggctcatgcctataatcctagcacttggggaggctgaggagggcagatcattagagaccagcctgggcagcatggcaaaaccccacttctaccacaaaaataacaaatattagccaggtatggtggcacatgactgaggtcggaggatcacctgagcccaggaggtcgaggctgaagtgagccatgattgcaccactgcac

SEQ ID NO: 273442 - DNA, 378 bp, Homo sapiens
atggttgatgggggttagaggaggtgccataatggtggtaatttaaaatactccccttgacaaaggcttttgtgagcatgttctgtatgtggaagaagtgctgtcttgtagcatgccctgttgacgtggaagacaggctgggaatttgtttcttctgcccttcctgaatctgaagctctttcagctgtgggcaccctggggcagcagagttcaatttacagctgtggtgagaatgttgagggagggacttaagtggactctgtcttcttcactgtggccttgaagagacagctctccacactgtctggcttcctctcctccctctcatcatctcattaccatggctatacagtttgaatgacactgaacaaaaaaatg

SEQ ID NO: 273443 - DNA, 394 bp, Homo sapiens
agaagatggtatgtgttctacaggataacaaacttatagtaatttgacagtagggtagtggctcaagggagacaaatagatcaatataacataatggaaagcacaaaaactcaggcaaacatggagacttactttcagacgaagatggtactgcagatcagtggagaaggtgcagtcttttaaataaatatgctagttgaattggatatcatatgctgggagccttgacccctatgttataacagaaacaaggaatcagtgtgaggtgaattatagatctaaatgtgaaaagcaaaacaataaaacttctacatgatgatatatggaaatatctttgtgaccttgctgacaagatttcttaaacagaacacaaacaagcactaaccatcaagag

SEQ ID NO: 273444 - DNA, 761 bp, Homo sapiens
cctggtcctgttggtgaaaatgaagggctcttgttccaggcctgtcaccttggcaccctttaattaacagtgaactcacttcattctgtgattttaaaagctgatgcatttcacccaaatgaacgtaaccccacctatttgtcgttgaagtagagctttcctggaggaccacatcttctcgacaggtcgcaggtctggccttgcccggcgctggtgagccccagctggcttagaccgtgtagctcgtctgttaaagtctgaccagaagtggccgggcgcagtggctcatgcccgtaatcccagcaccttgggaggctgaggcgggtggatcacgaggtcaggagttcaagaccagcctggccaagatggtgagacccgcccccccactccccatctctactaaaaatacaaaaaattagccaggtgtggtggcaggcgcctgtaatctcagctactcgggaggctgaggcagagaattgcctgaacccaggaggtggacattgcagtgaactgagatgacgccactgcactccagcctgggcaactgagcaagactgtctcaacaaaaaaatctggccagaagtccagacagagggaaagtttatcgccgcagagacagatgtaggggtggtcaagagcgtggccctctgtgaggaggatgtaaagtcctccaggcccagctccggggctctctggtactagctccaggcgcagagggagtctctgagaacagggttgctggggacagccgcggtgcctga

SEQ ID NO: 273445 - DNA, 695 bp, Homo sapiens
cctggtcctgttggtgaaaatgaagggctcttgttccaggcctgtcaccttggcaccctttaattaacagtgaactcacttcattctgtgattttaaaagctgatgcatttcacccaaatgaacgtaaccccacctatttgtcgttgaagtagagctttcctggaggaccacatcttctcgacaggtcgcaggtctggccttgcccggcgctggtgagccccagctggcttagaccgtgtagctcgtctgttaaagtctgaccagaagtggccgggcgcagtggctcatgcccgtaatcccagcaccttgggaggctgaggcgggtggatcacgaggtcaggagttcaagaccagcctggccaagatggtgagacccgcccccccactccccatctctactaaaaatacaaaaaattagccaggtgtggtggcaggcgcctgtaatctcagctactcgggaggctgaggcagagaattgcctgaacccaggaggtggacattgcagtgaactgagatgacgccactgcactccagcctgggcaactgagcaagactgtcgggtggtcaagagcgtggccctctgtgaggaggatgtaaagtcctccaggcccagctccggggctctctggtactagctccaggcgcagagggagtctctgagaacagggttgctggggacagccgcggtgcctga

SEQ ID NO: 273446 - DNA, 803 bp, Homo sapiens
cctggtcctgttggtgaaaatgaagggctcttgttccaggcctgtcaccttggcaccctttaattaacagtgaactcacttcattctgtgattttaaaagctgatgcatttcacccaaatgaacgtaaccccacctatttgtcgttgaagtagagctttcctggaggaccacatcttctcgacaggtcgcaggtctggccttgcccggcgctggtgagccccagctggcttagaccgtgtagctcgtctgttaaagtctgaccagaagtggccgggcgcagtggctcatgcccgtaatcccagcaccttgggaggctgaggcgggtggatcacgaggtcaggagttcaagaccagcctggccaagatggtgagacccggctctgtcgcgctcccctatctcatacatgaagaatagcgcaatagagatgtaggcacggtgtgtgtgtgcacggggcctgtgaatctcatggtagtcggagaagctgaagggcagagagagttggcgctggaagcccagggagggtggacgatgggtcggcgaactggagactgacggccacatggagctgcacgaggccgtggggctatgtgatcaaagaatcaacaaaaaaatctggccagaagtccagacagagggaaagtttatcgccgcagagacagatgtaggggtggtcaagagcgtggccctctgtgaggaggatgtaaagtcctccaggcccagctccggggctctctggtactagctccaggcgcagagggagtctctgagaacagggttgctggggacagccgcggtgcctga

SEQ ID NO: 273447 - DNA, 445 bp, Homo sapiens
ccttcaaatttatatgtcttgagatacactattcagattattctttagaaagcaatcatatctgaaaggagtggagctagtatgatgctttttagtatgcaaaatccctattcctatgaagagtcattattcaaaaaacactacttaaatttgtaagttttttatataaaagtagaatttaggagtaagaaatacggaattagccaaagcaggaagatcacttgagaaattcaagaccagcctgggcaacatagcaagaccctgtctctaaaaaaataaaaaataaattagtcaaacatgatgctgcatacttctagtcatagttactactcaggaggctgaggtgggagaattggttgagcccaggaatttgaagttaacagtgacctatgatcacaccactgcagtctagccttggcaacagagcaggactatgtctcttaaa

SEQ ID NO: 273448 - DNA, 423 bp, Homo sapiens
ccttcaaatttatatgtcttgagatacactattcagattattctttagaaagcaatcatatctgaaaggagtggagctaaaatccctattcctatgaagagtcattattcaaaaaacactacttaaatttgtaagttttttatataaaagtagaatttaggagtaagaaatacggaattagccaaagcaggaagatcacttgagaaattcaagaccagcctgggcaacatagcaagaccctgtctctaaaaaaataaaaaataaattagtcaaacatgatgctgcatacttctagtcatagttactactcaggaggctgaggtgggagaattggttgagcccaggaatttgaagttaacagtgacctatgatcacaccactgcagtctagccttggcaacagagcaggactatgtctcttaaa

SEQ ID NO: 273449 - DNA, 1103 bp, Homo sapiens
ggcacgaggcgaaccctgctccgcgcgagaatttttttgattccttcttatttggagaaatctccagctgctctgatgatagcctaagaagactgcatgctgcttcctctcgatgccaagccagaccctctcacaacctcggatctcagtccttcatggagacctggtcccagcaggaatggcagtgcaggaaattggcgcccagatggttcttccatgtgaagttgtctcgggctctgggctgacgagagaacacctggtaaccaggttagccctctgtcagtcacccagggcagggcagcatggtgcggattcagaggaggaagcttttggcatcttgcctgtgcgtcacagccaccgtctttctgcttgtcacactccaggtcatggttgagctggggaagtttgaaaggaaggagtttaaaagttccagtttgcaagatggacatacaaaaatggaggaagcacctacgcatcttaattcatttcttaagaaagaaggattgaccttcaacaggaaaagaaaatgggaattggacagctaccccattatgctctggtggtccccgctgacgggggagactgggaggttaggccaatgtggagcagatgcttgtttcttcaccatcaaccggacctacctccatcatcacatgaccaaagcattcctcttctatggtaagcaggactttcgcctttctcccttgtttgctgtggtcttcctccaaagctgagttacagtttacctctgaaaagtgatggtggagctccccttgaaaacactttgacacccctgatttcctttgcatttgctctgtggaaggcctgagcatttagcagacacaaaaaagaaacaagcctggccgggcgtggtggcttctgaattctctaacacctgtatctctgaagggttggataagggattatgatcttctagttgtgctttgagatgaagcaaagttaaatgttgagtttaatttcccaaattgtagcagaagcttctagaaagatttccattacattcacaaaaaatatagataatataatgggcatttatgtacctatcacatagcttaaggcataaaatattacatgtataattg

SEQ ID NO: 273450 - DNA, 315 bp, Homo sapiens
gtgggaaggcaaggaaataggggcttaccacccaaaagatgggaggcagaagatacccacctgagttgcccagagcccacagtgtttgctttctcaccactccggactccacctttgagctctttgcgagagatgtggatttccagctttgaacaatccaagaaagaagcccaggcactaagcttattggtatttggcaaacctggtatcctgcagccgagcatgaacatgaaatacattagaacttggcaatgagagatcccatctgttggtttccagggatgtaagtgagtaataaaagctgtttcaagttta

SEQ ID NO: 273451 - DNA, 3327 bp, Homo sapiens
cccaggcttgggctcatagggagaaaggaagctgcgctgcattctgcgggacgaaccctgctccgcgcgagaatttttttgattccttcttatttggagaaatctccagctgctctgatgatagcctaagaagactgcatgctgcttcctctcgatgccaagccagaccctctcacaacctcggatctcagtccttcatggagacctggtcccagcaggaatggcagtgcaggaaattggcgcccagatggttcttccatgtgaagttgtctcgggctctgggctgacgagagaacacctggtaaccaggttagccctctgtcagtcacccagggcagggcagcatggtgcggattcagaggaggaagcttttggcatcttgcctgtgcgtcacagccaccgtctttctgcttgtcacactccaggccttggataccgttgagaatctaatgaaagtcacgggccctccccagggagttacagactccatgcaatgcttcaatgatcagcggcctttatctaacaccaggagcagcgagcacataaaagaggtcatggttgagctggggaagtttgaaaggaaggagtttaaaagttccagtttgcaagatggacatacaaaaatggaggaagcacctacgcatcttaattcatttcttaagaaagaaggattgaccttcaacaggaaaagaaaatgggaattggacagctaccccattatgctctggtggtccccgctgacgggggagactgggaggttaggccaatgtggagcagatgcttgtttcttcaccatcaaccggacctacctccatcatcacatgaccaaagcattcctcttctatgggtactgactttaacatagatagcttacctctgcctcggaaagcccatcatgactgggctgtttttcatgaagagtccccgaaaaacaattataagctctttcataaaccagtgatcaccttgttcaactacactgccacgttcagcaggcattcccacttgccactaactacccaatacttggagagcattgaagtcctgaagtcactccgatacctagttcctttgcagtccaaaaacaagcttagaaaaagacttgctccgctggtgtatgtacagtcagactgtgacccaccatcagacagggacagctatgttcgcgagctgatgacttacatcgaggtcgattcctatggtgaatgtttacgaaacaaagacctccctcagcagctgaaaaatccagcctctatggatgccgatggcttttataggatcattgcacagtataagtttatcctagcttttgagaatgcagtttgtgatgactacatcactgagaagttctggaggccactgaaactgggggtagtccctgtatattacggatcccccagcatcacagactggcttccaagtaacaaaagtgctattcttgtatcagaattttctcaccccagggaactggcaagttacatcagacgactggattctgatgacagattgtatgaggcctatgtagaatggaagctgaagggtgagatctctaaccagcgacttctgacagctctcagggaacggaaatggggagtgcaagacgtcaaccaggacaattacatcgatgcatttgagtgtatggtgtgcaccaaggtgtgggctaatatcaggcttcaggaaaagggcttaccacccaaaagatgggaggcagaagatacccacctgagttgcccagagcccacagtgtttgctttctcaccactccggactccacctttgagctctttgcgagagatgtggatttccagctttgaacaatccaagaaagaagcccaggcactaaggtggctggttgataggaatcaaaacttttcatctcaagagttttggggcctagtattcaaggactgatttcaaaaatgatcagaatgaaacagactagagccttcttgaggtttattttctaggttgccttaatatttgaacataatagctattctgttgactatccatcaggataataattagttgctgcagtactcataatgagccctttcaaggaatagatgtaaattacccttaggggtagccactatattttttatactaaaaaaggaaatatttcttatggacactggttatcttccatgtccgtgtctgtggacccacatacttactgccttttgtggaaattcacctagagtgagtactttccttgtgcaatggagggagacgatctagctatagattcttgatactcacctcactctcaacagcttattggtatttggcaaacctggtatcctgcagccgagcatgaacatgaaatacattagaacttggcaatgagagatcccatctgttggtttccagggatgtaagtgagtaataaaagctgtttcaagtttatccactatccactcttcaagtgaaaagaacttatgtgtgtctaccttcttctccataccctgagccacctctctcactttctttagttgtgccttgccctatcgcctcccattttcccttcaaagtagaatgtcttgtaaagacacagtaactcctgtgtgttttgattagtgagatgttaccacttaccccttctgctgcgcagaataatattaagaattgctatgcttatgattcaggctggacagcctggacattttgagcagcgcgagagtagaagtgaatacccccaggaactccaattgtgctgaagctgatttgtctgttcgtaggatgatgtgcagcctgtcacagtggcagccacaggcattcagtttgtgggcatttcctgtcatttcggatcctgctatagggaaggttcagctctcctgtctggggcatctactggagcacctcagaagacaaggaggaaaacactggctcatgttttctttccatgtgagggaggggaggtttctagatgatactaaaagcctgttgccactgttgtgtcatgatttccattcttcatcatggaaagccacaagcctcagaaggcagccagaggacaggaagagtctgtgatgctcatgtctgtgtcatggcatgagggggaattgacgagtgcttgcttagcatcagctctcattgtattgaaggctgtgcccttggtgtgcttagcagtgagcagcgtcttcattaggtagctctggctgggctttgtcagccagcgtgtgagaaaggagaaccaaaaccaatacctccttatagaagccagaaggatcacattggatgagagaaggtgtctataactgggttcttcccaatcccagctctttcattaactaaatatgatcttggacatatctcttaacctcc

SEQ ID NO: 273452 - DNA, 3261 bp, Homo sapiens
cccaggcttgggctcatagggagaaaggaagctgcgctgcattctgcgggacgaaccctgctccgcgcgagaatttttttgattccttcttatttggagaaatctccagctgctctgatgatagcctaagaagactgcatgctgcttcctctcgatgccaagccagaccctctcacaacctcggatctcagtccttcatggagacctggtcccagcaggaatggcagtgcaggaaattggcgcccagatggttcttccatgtgaagttgtctcgggctctgggctgacgagagaacacctggtaaccaggttagccctctgtcagtcacccagggcagggcagcatggtgcggattcagaggaggaagcttttggcatcttgcctgtgcgtcacagccaccgtctttctgcttgtcacactccaggtgaaactgaggtttagtgaatggacgtgtcaggcagaaacaaagtcattgaaatagaaggtcatggttgagctggggaagtttgaaaggaaggagtttaaaagttccagtttgcaagatggacatacaaaaatggaggaagcacctacgcatcttaattcatttcttaagaaagaaggattgaccttcaacaggaaaagaaaatgggaattggacagctaccccattatgctctggtggtccccgctgacgggggagactgggaggttaggccaatgtggagcagatgcttgtttcttcaccatcaaccggacctacctccatcatcacatgaccaaagcattcctcttctatgggtactgactttaacatagatagcttacctctgcctcggaaagcccatcatgactgggctgtttttcatgaagagtccccgaaaaacaattataagctctttcataaaccagtgatcaccttgttcaactacactgccacgttcagcaggcattcccacttgccactaactacccaatacttggagagcattgaagtcctgaagtcactccgatacctagttcctttgcagtccaaaaacaagcttagaaaaagacttgctccgctggtgtatgtacagtcagactgtgacccaccatcagacagggacagctatgttcgcgagctgatgacttacatcgaggtcgattcctatggtgaatgtttacgaaacaaagacctccctcagcagctgaaaaatccagcctctatggatgccgatggcttttataggatcattgcacagtataagtttatcctagcttttgagaatgcagtttgtgatgactacatcactgagaagttctggaggccactgaaactgggggtagtccctgtatattacggatcccccagcatcacagactggcttccaagtaacaaaagtgctattcttgtatcagaattttctcaccccagggaactggcaagttacatcagacgactggattctgatgacagattgtatgaggcctatgtagaatggaagctgaagggtgagatctctaaccagcgacttctgacagctctcagggaacggaaatggggagtgcaagacgtcaaccaggacaattacatcgatgcatttgagtgtatggtgtgcaccaaggtgtgggctaatatcaggcttcaggaaaagggcttaccacccaaaagatgggaggcagaagatacccacctgagttgcccagagcccacagtgtttgctttctcaccactccggactccacctttgagctctttgcgagagatgtggatttccagctttgaacaatccaagaaagaagcccaggcactaaggtggctggttgataggaatcaaaacttttcatctcaagagttttggggcctagtattcaaggactgatttcaaaaatgatcagaatgaaacagactagagccttcttgaggtttattttctaggttgccttaatatttgaacataatagctattctgttgactatccatcaggataataattagttgctgcagtactcataatgagccctttcaaggaatagatgtaaattacccttaggggtagccactatattttttatactaaaaaaggaaatatttcttatggacactggttatcttccatgtccgtgtctgtggacccacatacttactgccttttgtggaaattcacctagagtgagtactttccttgtgcaatggagggagacgatctagctatagattcttgatactcacctcactctcaacagcttattggtatttggcaaacctggtatcctgcagccgagcatgaacatgaaatacattagaacttggcaatgagagatcccatctgttggtttccagggatgtaagtgagtaataaaagctgtttcaagtttatccactatccactcttcaagtgaaaagaacttatgtgtgtctaccttcttctccataccctgagccacctctctcactttctttagttgtgccttgccctatcgcctcccattttcccttcaaagtagaatgtcttgtaaagacacagtaactcctgtgtgttttgattagtgagatgttaccacttaccccttctgctgcgcagaataatattaagaattgctatgcttatgattcaggctggacagcctggacattttgagcagcgcgagagtagaagtgaatacccccaggaactccaattgtgctgaagctgatttgtctgttcgtaggatgatgtgcagcctgtcacagtggcagccacaggcattcagtttgtgggcatttcctgtcatttcggatcctgctatagggaaggttcagctctcctgtctggggcatctactggagcacctcagaagacaaggaggaaaacactggctcatgttttctttccatgtgagggaggggaggtttctagatgatactaaaagcctgttgccactgttgtgtcatgatttccattcttcatcatggaaagccacaagcctcagaaggcagccagaggacaggaagagtctgtgatgctcatgtctgtgtcatggcatgagggggaattgacgagtgcttgcttagcatcagctctcattgtattgaaggctgtgcccttggtgtgcttagcagtgagcagcgtcttcattaggtagctctggctgggctttgtcagccagcgtgtgagaaaggagaaccaaaaccaatacctccttatagaagccagaaggatcacattggatgagagaaggtgtctataactgggttcttcccaatcccagctctttcattaactaaatatgatcttggacatatctcttaacctcc

SEQ ID NO: 273453 - DNA, 2409 bp, Homo sapiens
cccaggcttgggctcatagggagaaaggaagctgcgctgcattctgcgggacgaaccctgctccgcgcgagaatttttttgattccttcttatttggagaaatctccagctgctctgatgatagcctaagaagactgcatgctgcttcctctcgatgccaagccagaccctctcacaacctcggatctcagtccttcatggagacctggtcccagcaggaatggcagtgcaggaaattggcgcccagatggttcttccatgtgaagttgtctcgggctctgggctgacgagagaacacctggtaaccaggttagccctctgtcagtcacccagggcagggcagcatggtgcggattcagaggaggaagcttttggcatcttgcctgtgcgtcacagccaccgtctttctgcttgtcacactccaggccttggataccgttgagaatctaatgaaagtcacgggccctccccagggagttacagactccatgcaatgcttcaatgatcagcggcctttatctaacaccaggagcagcgagcacataaaagaggtcatggttgagctggggaagtttgaaaggaaggagtttaaaagttccagtttgcaagatggacatacaaaaatggaggaagcacctacgcatcttaattcatttcttaagaaagaaggattgaccttcaacaggaaaagaaaatgggaattggacagctaccccattatgctctggtggtccccgctgacgggggagactgggaggttaggccaatgtggagcagatgcttgtttcttcaccatcaaccggacctacctccatcatcacatgaccaaagcattcctcttctatgggtactgactttaacatagatagcttacctctgcctcggaaagcccatcatgactgggctgtttttcatgaagagtccccgaaaaacaattataagctctttcataaaccagtgatcaccttgttcaactacactgccacgttcagcaggcattcccacttgccactaactacccaatacttggagagcattgaagtcctgaagtcactccgatacctagttcctttgcagtccaaaaacaagcttagaaaaagacttgctccgctggtgtatgtacagtcagactgtgacccaccatcagacagggacagctatgttcgcgagctgatgacttacatcgaggtcgattcctatggtgaatgtttacgaaacaaagacctccctcagcagctgaaaaatccagcctctatggatgccgatggcttttataggatcattgcacagtataagtttatcctagcttttgagaatgcagtttgtgatgactacatcactgagaagttctggaggccactgaaactgggggtagtccctgtatattacggatcccccagcatcacagactggcttccaagtaacaaaagtgctattcttgtatcagaattttctcaccccagggaactggcaagttacatcagacgactggattctgatgacagattgtatgaggcctatgtagaatggaagctgaagggtgagatctctaaccagcgacttctgacagctctcagggaacggaaatggggagtgcaagacgtcaaccaggacaattacatcgatgcatttgagtgtatggtgtgcaccaaggtgtgggctaatatcaggcttcaggaaaagggcttaccacccaaaagatgggaggcagaagatacccacctgagttgcccagagcccacagtgtttgctttctcaccactccggactccacctttgagctctttgcgagagatgtggatttccagctttgaacaatccaagaaagaagcccaggcactaaggtggctggttgataggaatcaaaacttttcatctcaagagttttggggcctagtattcaaggactgatttcaaaaatgatcagaatgaaacagactagagccttcttgaggtttattttctaggttgccttaatatttgaacataatagctattctgttgactatccatcaggataataattagttgctgcagtactcataatgagccctttcaaggaatagatgtaaattacccttaggggtagccactatattttttatactaaaaaaggaaatatttcttatggacactggttatcttccatgtccgtgtctgtggacccacatacttactgccttttgtggaaattcacctagagtgagtactttccttgtgcaatggagggagacgatctagctatagattcttgatactcacctcactctcaacagcttattggtatttggcaaacctggtatcctgcagccgagcatgaacatgaaatacattagaacttggcaatgagagatcccatctgttggtttccagggatgtaagtgagtaataaaagctgtttcaagttta

SEQ ID NO: 273454 - DNA, 1977 bp, Homo sapiens
cccaggcttgggctcatagggagaaaggaagctgcgctgcattctgcgggacgaaccctgctccgcgcgagaatttttttgattccttcttatttggagaaatctccagctgctctgatgatagcctaagaagactgcatgctgcttcctctcgatgccaagccagaccctctcacaacctcggatctcagtccttcatggagacctggtcccagcaggaatggcagtgcaggaaattggcgcccagatggttcttccatgtgaagttgtctcgggctctgggctgacgagagaacacctggtaaccaggttagccctctgtcagtcacccagggcagggcagcatggtgcggattcagaggaggaagcttttggcatcttgcctgtgcgtcacagccaccgtctttctgcttgtcacactccaggccttggataccgttgagaatctaatgaaagtcacgggccctccccagggagttacagactccatgcaatgcttcaatgatcagcggcctttatctaacaccaggagcagcgagcacataaaagaggtcatggttgagctggggaagtttgaaaggaaggagtttaaaagttccagtttgcaagatggacatacaaaaatggaggaagcacctacgcatcttaattcatttcttaagaaagaaggattgaccttcaacaggaaaagaaaatgggaattggacagctaccccattatgctctggtggtccccgctgacgggggagactgggaggttaggccaatgtggagcagatgcttgtttcttcaccatcaaccggacctacctccatcatcacatgaccaaagcattcctcttctatgggtactgactttaacatagatagcttacctctgcctcggaaagcccatcatgactgggctgtttttcatgaagagtccccgaaaaacaattataagctctttcataaaccagtgatcaccttgttcaactacactgccacgttcagcaggcattcccacttgccactaactacccaatacttggagagcattgaagtcctgaagtcactccgatacctagttcctttgcagtccaaaaacaagcttagaaaaagacttgctccgctggtgtatgtacagtcagactgtgacccaccatcagacagggacagctatgttcgcgagctgatgacttacatcgaggtcgattcctatggtgaatgtttacgaaacaaagacctccctcagcagctgaaaaatccagcctctatggatgccgatggcttttataggatcattgcacagtataagtttatcctagcttttgagaatgcagtttgtgatgactacatcactgagaagttctggaggccactgaaactgggggtagtccctgtatattacggatcccccagcatcacagactggcttccaagtaacaaaagtgctattcttgtatcagaattttctcaccccagggaactggcaagttacatcagacgactggattctgatgacagattgtatgaggcctatgtagaatggaagctgaagggtgagatctctaaccagcgacttctgacagctctcagggaacggaaatggggagtgcaagacgtcaaccaggacaattacatcgatgcatttgagtgtatggtgtgcaccaaggtgtgggctaatatcaggcttcaggaaaagggcttaccacccaaaagatgggaggcagaagatacccacctgagttgcccagagcccacagtgtttgctttctcaccactccggactccacctttgagctctttgcgagagatgtggatttccagctttgaacaatccaagaaagaagcccaggcactaagcttattggtatttggcaaacctggtatcctgcagccgagcatgaacatgaaatacattagaacttggcaatgagagatcccatctgttggtttccagggatgtaagtgagtaataaaagctgtttcaagttta

SEQ ID NO: 273455 - DNA, 402 bp, Homo sapiens
gcccagccaggatcagaggttttctactgggagaaaatacctcccagtaaaaaacctctggcagggagacccttccaattcaccccctgccccccttttttaaacaggtgaaactgaggtttagtgaatggacgtgtcaggcagaaacaaagtcattgaaatagaaggtgagtttgagattctcgtaagctcctggttgtagagaaacaggaagtaaagctcagtctgtcttcctgggtcaaaattggatggcttcctcagaatctcctattgttatcacttttgaaagattgcgttcttggagaagcaaggactattctgagaacaagatagtctgtatcttgtagtaagtgtagaacacagacatctatattataagtaaatcttgacatgtgcttctag

SEQ ID NO: 273456 - DNA, 3043 bp, Homo sapiens
ggcacgaggcgaaccctgctccgcgcgagaatttttttgattccttcttatttggagaaatctccagctgctctgatgatagcctaagaagactgcatgctgcttcctctcgatgccaagccagaccctctcacaacctcggatctcagtccttcatggagacctggtcccagcaggaatggcagtgcaggaaattggcgcccagatggttcttccatgtgaagttgtctcgggctctgggctgacgagagaacacctggtaaccaggtcatggttgagctggggaagtttgaaaggaaggagtttaaaagttccagtttgcaagatggacatacaaaaatggaggaagcacctacgcatcttaattcatttcttaagaaagaaggattgaccttcaacaggaaaagaaaatgggaattggacagctaccccattatgctctggtggtccccgctgacgggggagactgggaggttaggccaatgtggagcagatgcttgtttcttcaccatcaaccggacctacctccatcatcacatgaccaaagcattcctcttctatgggtactgactttaacatagatagcttacctctgcctcggaaagcccatcatgactgggctgtttttcatgaagagtccccgaaaaacaattataagctctttcataaaccagtgatcaccttgttcaactacactgccacgttcagcaggcattcccacttgccactaactacccaatacttggagagcattgaagtcctgaagtcactccgatacctagttcctttgcagtccaaaaacaagcttagaaaaagacttgctccgctggtgtatgtacagtcagactgtgacccaccatcagacagggacagctatgttcgcgagctgatgacttacatcgaggtcgattcctatggtgaatgtttacgaaacaaagacctccctcagcagctgaaaaatccagcctctatggatgccgatggcttttataggatcattgcacagtataagtttatcctagcttttgagaatgcagtttgtgatgactacatcactgagaagttctggaggccactgaaactgggggtagtccctgtatattacggatcccccagcatcacagactggcttccaagtaacaaaagtgctattcttgtatcagaattttctcaccccagggaactggcaagttacatcagacgactggattctgatgacagattgtatgaggcctatgtagaatggaagctgaagggtgagatctctaaccagcgacttctgacagctctcagggaacggaaatggggagtgcaagacgtcaaccaggacaattacatcgatgcatttgagtgtatggtgtgcaccaaggtgtgggctaatatcaggcttcaggaaaagggcttaccacccaaaagatgggaggcagaagatacccacctgagttgcccagagcccacagtgtttgctttctcaccactccggactccacctttgagctctttgcgagagatgtggatttccagctttgaacaatccaagaaagaagcccaggcactaaggtggctggttgataggaatcaaaacttttcatctcaagagttttggggcctagtattcaaggactgatttcaaaaatgatcagaatgaaacagactagagccttcttgaggtttattttctaggttgccttaatatttgaacataatagctattctgttgactatccatcaggataataattagttgctgcagtactcataatgagccctttcaaggaatagatgtaaattacccttaggggtagccactatattttttatactaaaaaaggaaatatttcttatggacactggttatcttccatgtccgtgtctgtggacccacatacttactgccttttgtggaaattcacctagagtgagtactttccttgtgcaatggagggagacgatctagctatagattcttgatactcacctcactctcaacagcttattggtatttggcaaacctggtatcctgcagccgagcatgaacatgaaatacattagaacttggcaatgagagatcccatctgttggtttccagggatgtaagtgagtaataaaagctgtttcaagtttatccactatccactcttcaagtgaaaagaacttatgtgtgtctaccttcttctccataccctgagccacctctctcactttctttagttgtgccttgccctatcgcctcccattttcccttcaaagtagaatgtcttgtaaagacacagtaactcctgtgtgttttgattagtgagatgttaccacttaccccttctgctgcgcagaataatattaagaattgctatgcttatgattcaggctggacagcctggacattttgagcagcgcgagagtagaagtgaatacccccaggaactccaattgtgctgaagctgatttgtctgttcgtaggatgatgtgcagcctgtcacagtggcagccacaggcattcagtttgtgggcatttcctgtcatttcggatcctgctatagggaaggttcagctctcctgtctggggcatctactggagcacctcagaagacaaggaggaaaacactggctcatgttttctttccatgtgagggaggggaggtttctagatgatactaaaagcctgttgccactgttgtgtcatgatttccattcttcatcatggaaagccacaagcctcagaaggcagccagaggacaggaagagtctgtgatgctcatgtctgtgtcatggcatgagggggaattgacgagtgcttgcttagcatcagctctcattgtattgaaggctgtgcccttggtgtgcttagcagtgagcagcgtcttcattaggtagctctggctgggctttgtcagccagcgtgtgagaaaggagaaccaaaaccaatacctccttatagaagccagaaggatcacattggatgagagaaggtgtctataactgggttcttcccaatcccagctctttcattaactaaatatgatcttggacatatctcttaacctcc

SEQ ID NO: 273457 - DNA, 3237 bp, Homo sapiens
cccaggcttgggctcatagggagaaaggaagctgcgctgcattctgcgggacgaaccctgctccgcgcgagaatttttttgattccttcttatttggagaaatctccagctgctctgatgatagcctaagaagactgcatgctgcttcctctcgatgccaagccagaccctctcacaacctcggatctcagtccttcatggagacctggtcccagcaggaatggcagtgcaggaaattggcgcccagatggttcttccatgtgaagttgtctcgggctctgggctgacgagagaacacctggtaaccaggttagccctctgtcagtcacccagggcagggcagcatggtgcggattcagaggaggaagcttttggcatcttgcctgtgcgtcacagccaccgtctttctgcttgtcacactccaggtcatggttgagctggggaagtttgaaaggaaggagtttaaaagttccagtttgcaagatggacatacaaaaatggaggaagcacctacgcatcttaattcatttcttaagaaagaaggattgaccttcaacaggaaaagaaaatgggaattggacagctaccccattatgctctggtggtccccgctgacgggggagactgggaggttaggccaatgtggagcagatgcttgtttcttcaccatcaaccggacctacctccatcatcacatgaccaaagcattcctcttctatggcccaagaagaatcaccacctttggcagaaaatgatggtactgactttaacatagatagcttacctctgcctcggaaagcccatcatgactgggctgtttttcatgaagagtccccgaaaaacaattataagctctttcataaaccagtgatcaccttgttcaactacactgccacgttcagcaggcattcccacttgccactaactacccaatacttggagagcattgaagtcctgaagtcactccgatacctagttcctttgcagtccaaaaacaagcttagaaaaagacttgctccgctggtgtatgtacagtcagactgtgacccaccatcagacagggacagctatgttcgcgagctgatgacttacatcgaggtcgattcctatggtgaatgtttacgaaacaaagacctccctcagcagctgaaaaatccagcctctatggatgccgatggcttttataggatcattgcacagtataagtttatcctagcttttgagaatgcagtttgtgatgactacatcactgagaagttctggaggccactgaaactgggggtagtccctgtatattacggatcccccagcatcacagactggcttccaagtaacaaaagtgctattcttgtatcagaattttctcaccccagggaactggcaagttacatcagacgactggattctgatgacagattgtatgaggcctatgtagaatggaagctgaagggtgagatctctaaccagcgacttctgacagctctcagggaacggaaatggggagtgcaagacgtcaaccaggacaattacatcgatgcatttgagtgtatggtgtgcaccaaggtgtgggctaatatcaggcttcaggaaaagggcttaccacccaaaagatgggaggcagaagatacccacctgagttgcccagagcccacagtgtttgctttctcaccactccggactccacctttgagctctttgcgagagatgtggatttccagctttgaacaatccaagaaagaagcccaggcactaaggtggctggttgataggaatcaaaacttttcatctcaagagttttggggcctagtattcaaggactgatttcaaaaatgatcagaatgaaacagactagagccttcttgaggtttattttctaggttgccttaatatttgaacataatagctattctgttgactatccatcaggataataattagttgctgcagtactcataatgagccctttcaaggaatagatgtaaattacccttaggggtagccactatattttttatactaaaaaaggaaatatttcttatggacactggttatcttccatgtccgtgtctgtggacccacatacttactgccttttgtggaaattcacctagagtgagtactttccttgtgcaatggagggagacgatctagctatagattcttgatactcacctcactctcaacagcttattggtatttggcaaacctggtatcctgcagccgagcatgaacatgaaatacattagaacttggcaatgagagatcccatctgttggtttccagggatgtaagtgagtaataaaagctgtttcaagtttatccactatccactcttcaagtgaaaagaacttatgtgtgtctaccttcttctccataccctgagccacctctctcactttctttagttgtgccttgccctatcgcctcccattttcccttcaaagtagaatgtcttgtaaagacacagtaactcctgtgtgttttgattagtgagatgttaccacttaccccttctgctgcgcagaataatattaagaattgctatgcttatgattcaggctggacagcctggacattttgagcagcgcgagagtagaagtgaatacccccaggaactccaattgtgctgaagctgatttgtctgttcgtaggatgatgtgcagcctgtcacagtggcagccacaggcattcagtttgtgggcatttcctgtcatttcggatcctgctatagggaaggttcagctctcctgtctggggcatctactggagcacctcagaagacaaggaggaaaacactggctcatgttttctttccatgtgagggaggggaggtttctagatgatactaaaagcctgttgccactgttgtgtcatgatttccattcttcatcatggaaagccacaagcctcagaaggcagccagaggacaggaagagtctgtgatgctcatgtctgtgtcatggcatgagggggaattgacgagtgcttgcttagcatcagctctcattgtattgaaggctgtgcccttggtgtgcttagcagtgagcagcgtcttcattaggtagctctggctgggctttgtcagccagcgtgtgagaaaggagaaccaaaaccaatacctccttatagaagccagaaggatcacattggatgagagaaggtgtctataactgggttcttcccaatcccagctctttcattaactaaatatgatcttggacatatctcttaacctcc

SEQ ID NO: 273458 - DNA, 1271 bp, Homo sapiens
cccaggcttgggctcatagggagaaaggaagctgcgctgcattctgcgggacgaaccctgctccgcgcgagaatttttttgattccttcttatttggagaaatctccagctgctctgatgatagcctaagaagactgcatgctgcttcctctcgatgccaagccagaccctctcacaacctcggatctcagtccttcatggagacctggtcccagcaggaatggcagtgcaggaaattggcgcccagatggttcttccatgtgaagttgtctcgggctctgggctgacgagagaacacctggtaaccaggttagccctctgtcagtcacccagggcagggcagcatggtgcggattcagaggaggaagcttttggcatcttgcctgtgcgtcacagccaccgtctttctgcttgtcacactccaggccttggataccgttgagaatctaatgaaagtcacgggccctccccagggagttacagactccatgcaatgcttcaatgatcagcggcctttatctaacaccaggagcagcgagcacataaaagaggtcatggttgagctggggaagtttgaaaggaaggagtttaaaagttccagtttgcaagatggacatacaaaaatggaggaagcacctacgcatcttaattcatttcttaagaaagaaggattgaccttcaacaggaaaagaaaatgggaattggacagctaccccattatgctctggtggtccccgctgacgggggagactgggaggttaggccaatgtggagcagatgcttgtttcttcaccatcaaccggacctacctccatcatcacatgaccaaagcattcctcttctatggtaagcaggactttcgcctttctcccttgtttgctgtggtcttcctccaaagctgagttacagtttacctctgaaaagtgatggtggagctccccttgaaaacactttgacacccctgatttcctttgcatttgctctgtggaaggcctgagcatttagcagacacaaaaaagaaacaagcctggccgggcgtggtggcttctgaattctctaacacctgtatctctgaagggttggataagggattatgatcttctagttgtgctttgagatgaagcaaagttaaatgttgagtttaatttcccaaattgtagcagaagcttctagaaagatttccattacattcacaaaaaatatagataatataatgggcatttatgtacctatcacatagcttaaggcataaaatattacatgtataattg

SEQ ID NO: 273459 - DNA, 898 bp, Homo sapiens
gatctcagatacctggaaccactgacttttgaacttttcattacttgaaataaatgttcttgttgcttagccacttttaggtgatatattacgttctggtgaaagcattcttcctaatacaagctgagagcttacagctaggagacaacctccaggagcagagatcacacactctcgggcagaaaaacagcttctgtattcttccctgtttaccattctggcatcaatttcaagtgctcagtccctcaagctctttcctctttacaaaagcccggctactgcaacaaagcatcctgtctgctgtaagtttcaagagactctttgaaactactgaccatctttctcactgcattcatgctgcaacaacccaaatcctgcaaagctctgactgaatcaggaaaaagtgaccttggtagctagtctccaaagatggccaccaccaatacttgccttcctgcgatatatatcatactccttgtatcaggaagagaagtgtaattccctccccatgaatctaggctggccttagtgactttcttggccaatagaatatagcagaaggcacattctgggatttgtaagactaggtcgcaggaagccttatggcctctgccaggcctcttgcaatgcttggccttggaacactccctcctacaagccagctgccatgctatgagaagtgcaggtcctgtggtaaatccacatgtggtcactccagtcaacggtctcagcaagcccccagctgactgtcaactatgtgaatgagcctgcagatgactccagccccagctgccatctgactgcagctgcatgaaacacttaagcaagaaccaccttgctgagccctatcaaccccggaaccatgaggaataataaactgtttttgtttttgttgttg

SEQ ID NO: 273460 - DNA, 753 bp, Homo sapiens
ctcttgtaattacagatctacctttagcacagaagtagccatagacactatgcagatgtgtgagttggctgtgttccagttcaactttatttgcaaatacaggtagcaagccagatttggcccaagagccctggtttgccaaccctgctttatggtgaggtaaggtctatggggcgttatttttgctcctccttccacctttcgttttatacttctgggtgttttgaaattaaagtgagatgaatgtggccattccagtagtctacagtttgaccttgacatactgaagtcaaacaatttttttttttatattttcctaagttacattcttgttaggtagcctttcccctttttgagacagatgtaagaagaaaatgttttttactttataagctcttacttcagaagagggtaatgagttttatactgtaaacacttcagttggaacttaaaagatattgagatatattcctttttaatcaggcaaaactggaattgaaatttatttgggtagctaatcagaaaactaatcaatcaaatgtttttttcctttttttttttgagtgcaaagctgagacccgactctttatttggatgggctgttcctttaccttatcatacgttaattgatgtaatgccaggtcaagaaacagcattttcagttaaatgaaatactgtgctgctgttaataatgagtcctctgcagatgtatggcgatgtctttgtgaactataatgaaatgtgagaagaatg

SEQ ID NO: 273461 - DNA, 735 bp, Homo sapiens
aatcccagcactttgggaggccgcaacagggggattgtctgaggtcaagagtttgagaccagcctggctaacatggtgaaaccccgtctctaccaaaaatataaaaaagtagctgggtgtggtggcatgtgcctgtaatcccagctactcaggaggctgagacaggataattgcttgaacctgggaggtggaggttgcagtgagccaagatcgcgccattgcactccagcctaggcgacagagcgagactcttgtctcaaaccgaaacaaaaaaacaggctcccagggcacaggccaggccactgaattcaagtcttcagctcagaggccagggaagctgtgcctttagtcttgcatccccatgtgggaaccactgtcatagctgaaggagcaccttatcagttggatttctatcagcttgagagttgggtaaggtaaattattggagaacggtagggggtccttaggaatctcaaaaatctcatcaagtagaatcctccagccactgggcagggaacactatggaagtaaagtcaggaaatgagagtgcagaggtacagtctcccaccagagggttgatcttgcctaaaatctgcaaatgactaaatcatgaccttttctttgaatgagaattgtggagtcagaccatctgaatttgtacctgttcccccagcttctaaactttgtgagcttggacaaattacctaacttctctatgccctggctttcccattt

SEQ ID NO: 273462 - DNA, 524 bp, Homo sapiens
atgcacaaaccccatgagttctacttcaagaccactacctatgataaacaacatgacatgtaccaggatgttgattgtcatgctatttgtaatagagggaaaagaaacatcattactcttccttagtaggaaatggaatagcatacagatattaaaatgaatatgctgagcacagtggcccacgcctgtaatcccagcacttcaggatgccaaggcagaggatcatttgagcccaggagttgaagaccatcatgggcaacatagtgagaccccacctctacaaaaattaaaaattagccaggcatggtggcacattcctgtggtcccagccacttaggaggctgaggtgggatggtcacttgtgccggggaggtcaaggctgcagtgagctgtgatagtgccactgcactcccgcttgggcaacagaatgagaccctgtctcaaaaaaataaaatgaataatagatttacatagatcgacatgaataacactcagaaatataacatcccgtcttcaaaaaaaaa

SEQ ID NO: 273463 - DNA, 221 bp, Homo sapiens
ctggaacgctgctgcctctcccctagagcgtgcgtaatgctccccggctgtgtccctgggctgatttctcgttgcaggtctcagctgggttgtcactcctctctgcaaagcttccctgacctcatctccctctccaggtcacgttaggtgcctcttgtctgtgtccccagccacagcccgcatcacaaacaagactataattgccctcgtgcttgtctgtc

SEQ ID NO: 273464 - DNA, 361 bp, Homo sapiens
taactttaaaaatatttttattacaagcagtccagactctcagggcatctcattagactattaagtagtccagcatttacccagaattctgtttccgcttttgcaatggcacaggtatttatttgctttgatgaggaactgtccttctgacttgatccccagctgttttgaatttggggcggggctttgtctttttggcccaagaggagaggttcagaggccacctcctccccggcaggtaggccaatccggacatgtcctgaccatcactcacagcccagagtcctattctggggctatttgctcagagctctgcacgaggccaagtttgtctgaatgccgctctgtacgacggcgctga

SEQ ID NO: 273465 - DNA, 373 bp, Homo sapiens
gaatttgataagagatgatgtgttcaatgaataataatttttgattcactttatgggtattatgttgacaagtcatatagactttctgatagaaattatatctgatttgacggatagattcaacagtgaggattagctttgccaattatactttattttccaaaaattaaactagcgaattctcccaatattaaattcaaaacaggttttgatggtaaatctatttggagcacatatacaatttaacaaaaactaaatcccgtgctgctattaaatgtataatattttaaattatcagctttaagatatggaagtacattcaactttttcccaattattttagaggttatggcaagcaaaaatgtttgaagac

SEQ ID NO: 273466 - DNA, 217 bp, Homo sapiens
gacagcagagcattaaactaagcagagcactaaactaagcacggcaccctccgcgaccgcacaagtcacaggcccatgaagctcgtcatgcctactgggtacatactattttattctttttattttagtccgcccatgaaaactaaggaacaaaggcataagtggtcaacggacagcaccatctgttataagccctttatgatctttcagaactttc

SEQ ID NO: 273467 - DNA, 1192 bp, Homo sapiens
aaacttattatgctctccaaaaggagctgtccattcagggaaaatcggtagcaggaggctgctcaacacaaggccaaccgcccttctagcgacgtgctgcctcttgctgccacagcaccacaccaacgcttcagcgctttggagtgcaagaagcaggcagatcgcttttagaaattagggaaaagagtatttgagagctactcacctgtttttaaagcctccccatgaagcttccacatctctgtctttctcctgcactgtaaggccctggtcctggcccagaaagtcagagtcacagcctagacacactgaggatggcatccagagtgtcctggcctgtcatcctgtccatggcagaatgagtagttagtacatagggcctgtgtgcccaccaggctaggatgtgatttgatggcgcactctccaatatggcagccagtaaccacagtggctgcttggatttaaattaattcaaattaaataaaatttaaaattccattcctcagtcacactagccacatttcaaatgctcaatagtcacccgtggctagggctacctcactggacagatagaacatcttcatcatcacagaaagttttgttgggtggtgctggtactccagtgccatcatttaaactggcatgagttctttgaagggcccccaaaatccacgtggaggaaaataaaaaatggtatatcaagtactagccagggagcacagctacctgtacatccttccctctgctcattcattcgttcaggaatgtcatcgtgtacctgaatacacaaggcacaccagggttgacatactcaggacctgccaaaatgatccagactgtgctcctgctcttaaaggactgcccatttggttcaggggataaatgtgcacaatggccaggtgtggttgtcacgcctgtaatcccagcactttgggaggccaacgcaggcagattgctcgagcccaggagttttgagaccagtctgggcaacatagtaaaaccctatctccacaaaaaactagcaacgtgcggtggtgcacgccccatctctaaaaataaagtaaaagtattcccagcagctcaaaaggctgaggcagaggaatcacttgagcccacgatgttgaggccgcagtgagccaagatcctgccactgcactccagcctgggcaacagagcaagaccctgtctcaaa

SEQ ID NO: 273468 - DNA, 295 bp, Homo sapiens
tcctggacttaagtaacctacctgcctcagcctcccaaagtgctgggattacagacgttcaccaccgtgcccagccttgatgggagattttaaaatgcatagtaacagtagaagcaaaccctgttactttgtttacctcatgtaatgtcacaggaaatgtcagtttacttcatgcttaaaatgcatgaagaaaaaatattctgtcagttcaaattcgtttcctattgacaaaattgcataattttggccaggtgaggtggcttatgcctgtaatcccagcactttgggaggccga

SEQ ID NO: 273469 - DNA, 383 bp, Homo sapiens
cccctcatggtgggcaagaggcatagcaagtgacctacaggacatgttacaaaaggccataaggcctgccttgcctacaaatctctctttcatgactgagccctcccttcatgtccattctgaaattatcactcttatatttactaatggttggaccagtggccccgtaagtagggtgaatacactccagagcctggcaagcagatgcatctctagaagagaattccatgtctatttatttttattgtatccctttaaaaattttagtattgtgggctgggggcagtggctcacacctctaatgggaggccaaggtgggcagactgcttgagcccaggagctcaagaccagcctaggaaacatggtgagaccccatctctata

SEQ ID NO: 273470 - DNA, 464 bp, Homo sapiens
gtgtctggtgacagtgatttccaggcatttctgcaggctctgttcctggaataactttccattctgtgcagtgggcacttcaccggactgggctagagaaagttgaggtcctcactttctggcatcttcagtccagttcctgagaggaggagctgggtgcttgcattctggcctccctaggacctccccacttgtgcccctccttggggccccccagaaacctgaggatagagtgcattgcctcagtaagcatggaggggcgggcaggttttggagatttctcaggggaatctttaagatccaggactggctcctgaagattcctgatctaatgaataagatcaggcagaaacaattccatatttttatgggaatttacaagagttttttgttttgttttgttttgttttttgaaatggagtctcactctgtcacccaggctgaagtgcagtggcacgatctca

SEQ ID NO: 273471 - DNA, 956 bp, Homo sapiens
agtttcactcttgtatcccaggctggagtgcagtggtgtgatctcggcttattggaacctttgcctcccaggttcaattgattctcctgcctcagtctcccaagtagctgggattacaggcatgcgccaccacatctggctcattttgtatttttagaagagacggtggtttcaccatgttgtccaggttggtttcaaacccttgacctcaggcgatccacacgtctcagcatcccaaagtgctgggattacaggtgtgagccaccgcaccctgtcaagatttttttaaagctctaatttttctcctactgggtttttctcgtttgcgccctccatctttctctctgtctctttttgggtaaacctttttgtctaattctgtctattgtattcctcaaacacaggaagcaagctccaatgctatgagatgctccatgtagagacccacataacaaagggtgaggcggtgctcagacgagtagagagaaggaaagtcaggctctctgtccacactaaaccctgtcaattttcacatgagtcagcttaaaggctcatgctttcccagtccagcttcagttaagaccacagcccccagtctcataaaagacctgaaggcagaggtagccagctgaactgtgtccagattctggtccacacaaattatgagatattatatgttgttgaaaagtgccgacttttagggcaatgttgtcagaaaggagcagatatctaacctcatctcccaggccctaggattctccatccctctgcttatctctttctcaggctgtctgcagccaaactagtccctttttacctctgccaaactcacacctatgagttttttcactaagggtggctttttcctgacacatgcttgtgcagatgcctccctgctgtcatcctcatcatggattaaaagtcacctcagtgacgcctgagttcctcccatgcaa

SEQ ID NO: 273472 - DNA, 188 bp, Homo sapiens
tatgacgcacatagcagtcttgcctgttctggacagtggtctttcattgactctttggagtatgtaccctctttccctctagtatataatctctggatctgagggtaaccatgagaaatccctttgtcttgcagctgcccaagaccatgcttctgtctgtgagttccccaataaaccaccctttaccg

SEQ ID NO: 273473 - DNA, 145 bp, Homo sapiens
gtttccactgtggcaaattagcgatgatgagaatgtatagtctggataacggaatggcgtatatggtgaaatataccaggaggtatactggcaggagcaagggactgggttttctcccccgtgcaagctgttcttgctgtgtttc

SEQ ID NO: 273474 - DNA, 581 bp, Homo sapiens
tactctggttagaaatatattactaatctaaactttgttgttggctggctctgaaaaatcagaacattagaaatggttcgcttcacttgtgcaaagcactttaaactgttcaagtagtttaacatattcaagaggaaaataaagagcatttaactttatttacagccttaagtggagttgggagccgagctgaacttagaaactttgaccaaaagagcgagttaggggcgaggatgcgggcgtgggccaagcggaagagcaggagccgggaagaagcccggtgagaagagtgcagagcgctcgaacccacactccgcgagggtccccaaagcagacagcgggcgctggcggtgccagggaagccgactcctctttgcgctctaggcccactgtggggttggggctcgtatagaccccagggcacagccagggcgcctggaccctaggcgcaggcctactgagccgcggcgaagtctaggcgttgtctgaaggccgcggtgtgccctcgtcgcgccctgggctggcgggccaatatgagcggcaggcccagagagcgcaggtgggggcgaccctcagatcac

SEQ ID NO: 273475 - DNA, 291 bp, Homo sapiens
ggaggaaacagcagccatgggcaccgttggaggcagaggcattctgactcaagggacgggcccacctctggtttctggcgctgttgactttagcatgtggtgagtgttgtgcccttgggcatatgtgcactgagatcttgaggacttctgttggagaagtgtctgtcttcttctttctgtggcatagttttttggaactgcctcacgtgtgccctgtgttatggtcagaatgtttgtgtctccccaaaattcttatgttgacattctaaccctccatgggatggtggcatt

SEQ ID NO: 273476 - DNA, 420 bp, Homo sapiens
tttagctttttctacattttccaaatttcctgccatgaaaatattattatatctttaatcagaaaacacatacacacattctaataacaacaaaccacaaaattatcatagtccacacccttttatgtatataagatgtaacctggcttagaagaaacaactttatctaaataacagtctgcagtttttattatattttcatttatttaaaaagtatctcttagaatctgttgataaaacaaatttaaataatcattcaggattgtaatcatggtttttttttttaatcacatattaaaaagactgaaaggacatgaaccaaatgaaaataacggctttgttcacgtgatggaatatgaatagtttcttctttagtttctaaatgctctacaatgttatacatgttgtgttatatactgc

SEQ ID NO: 273477 - DNA, 97 bp, Homo sapiens
ctaataaatgtcagaggcgggacccataccccttctgtctgactatgaaaaccatgagctttctattttatgatggcatcctacagactcttagtct

SEQ ID NO: 273478 - DNA, 290 bp, Homo sapiens
aaatagagcattgtttgagttcaccattagagggcgccttggtacctctgtggatttaaaaattaagccttagttttagttaaaatagaattttctctttcactcttaaaaacactgagccatacagccgtggtctgctaactgctcctgcattgatttatgagtcattcttgggtgaacaaaaccatacaccatggaagtagtctgtcattttttaattttatagctcaggggctcgccaaataacagtgtaaatcattgtagaacaaccacagttcattcagagtttg

SEQ ID NO: 273479 - DNA, 281 bp, Homo sapiens
gcggcggccagctgttgggggacagatgttgggggagccgagaggggagctgggggaggagcctcggggccgggacctccgagaagcggtcgttttaacctcttaattgctggttctgggttttttttccccctctggcttcttcccctacgggtttacctagaagggaaggagcagagagaataggtagggccccacctccaacccaccttgttcgcctcacaggatctaaagccttcaagaaggtcttgaacctaaaataagtgaacctccgtttgagt

SEQ ID NO: 273480 - DNA, 404 bp, Homo sapiens
gtctcattctgaggtagaaggatgggaacatgcctgcttaagcttccttccaacatggctgcctggaggcagggagctgagttactacctctggggaaagaggagctggccagtgaggtcaggaaaattgggctgctctctccacacaccccacccatgttctgacctcctgccatctgtctgtgccacctcccttgtgcccttgtgcctaagtggtcactttctgccctggcatcccagctgtgggaccccttctgccctcctggatgatagctgggacaggaacactggcttttaaatcacaatgcgtttggagaacaaccacagaacagctcaacccaagaaaccaaaaccaaatagcacagacacaagacagaaccaaagacgagtcgctttgggggaga

SEQ ID NO: 273481 - DNA, 373 bp, Homo sapiens
ctaaaatctagattcttattaattcttctaagtgaattggtaaagggagcaaatgcacttctttactattgattcaaaacataaggtgacgacttaataaataatttagattttttcattaattaggcatctcctgagataaggctgaatattaaaaagcatcagtactgaggtttgcactcctttagaactgggctttgggttatacctgaagacattaaacaccccgcctgtggtgtttacttcattattcccatatgaaaaatgaaaaaatttattccaatacctgcttctctttgggattagaggaaaggcattggtgaaactcagaatgcctggactttgattctggctatatatcttaaacaattaa

SEQ ID NO: 273482 - DNA, 535 bp, Homo sapiens
aactcctggcctcacgtgatctgcccacctcggcctcccaaagtgctgggattacaggtgtgagccaccacacctggccaggaggcgggggctctcaaatgatggcagggggaggttacagtcagagatgcaggcagtgctaacatttactgagcacctccaagaccttctctatcgtctcaggacccagggaagctcccttgtgagccggggttacacttcccactttataggcaggaaaactgagtcttggcagacatttcctgtctgtgtccaggagcttctggagctgttggccccaaatgccttcctctgccggaagagccccttttgagaagggaagcagagcttggaattccccaccctccaccatagaaacacacttcctttttatggacactcactggaggaacagctctagagacagccctcacttccccacttttacccagtaccagccctaggcctggctgcaggcctctcccagccccaggagccccccaacacctgagaccccgtctccaactgagcgcgt

SEQ ID NO: 273483 - DNA, 442 bp, Homo sapiens
ttttttttttttgagtcggagtctcgctccgttgcccaggctggagtgcagtggtgtgatctcagctcactgtaacccctgcgtcctgggttcaagagattttcctgcctcagcctcctgaggagctaggactacagacgtgcgccaccatgtctggctaatttttgtatttttagtagagacgggttttcaccatgttggccaggacggtctcgatctcttgacctcgtgatccacccacctggcctcccaaagtgctgggattacaggcgtgagccattgcgcccggtcgtgcatcactattttgatgcatcatcttcaaaccaccctgccccagcatcactggactgccggtgtgcccagcctcccctgcacagcttcccactctgctcacagagaagacggtggaggggggagcccaggcgtgggttttccgtgtgct

SEQ ID NO: 273484 - DNA, 586 bp, Homo sapiens
gaagtagggtaacagtatgagagtatgtggtgttcccatctgtccaccaggccctaggagctctctccccaaagtaactggtgctaatggtttgtcgtgtgtccttccagagatatttgatatttaatatctataaatcttgatttaaaaggactcttctgtaccctttaaaatgatatattttaaagatcattcgtgtcagtactaattggacccatttcgtgtatagagatggatattttaggacactcctgtgttcaccgcttctttttcataaggcaccttcatcatcgcagcagctgcctttggaaatcttcccttgcctctcacaaggagattcatctgattgtctgagttgattttttgtgtttttttaaagggtttggagttaagaacaggtatgtgaatcacacagatcatagtgccattctaagctgcaccagcttattagctatgagactgtaggcggcaactcgatgtttctagcctgagcatccttatctgtaagatgggaagagtgcttcacagtcattggtacttagtgaatgcaagttgtctcatcctttctgcttcatggaaatgtatc

SEQ ID NO: 273485 - DNA, 487 bp, Homo sapiens
cggcggggccgccggatccagggacaatggggtggggcgggctttccctgggtgggcgcagcggcttcctgggtccccctcacgctctgggtcagagttcctttacaggcggacctgagaggcaactcaccgactcctgccctggaccctcctgcgccactgaaccccctgacctgggagcctcggaacctagggctcaggagatgaaccaggacttatccgaaggtaccaagtgaacttctaggaaaagtccaattctcagatgctggatgtcttccaaaaatgaagcaaattagtaacttagtagctgagtcaactaatcctgttagatggtcaacactggtttttttattttaatatttttaagtggcaactctagtgtgtgagaaaattaatgtgacagctgaatttgtagaaagctgctttgactctcttgggccccttcataagccctggaactaaataaaagtctagtgaatacaagtaa

SEQ ID NO: 273486 - DNA, 532 bp, Homo sapiens
cggcggggccgccggatccagggacaatggggtggggcgggctttccctgggtgggcgcagcggcttcctgggtccccctcacgctctgggtcagagttcctttacaggcggacctgagaggcaactcaccgactcctgccctggaccctcctgcgccactgaaccccctgacctgggagcctcggaacctagggctcaggagagcggccgtgggtcccatcaggctttcccctcggatcctctgcagatgaaccaggacttatccgaaggtaccaagtgaacttctaggaaaagtccaattctcagatgctggatgtcttccaaaaatgaagcaaattagtaacttagtagctgagtcaactaatcctgttagatggtcaacactggtttttttattttaatatttttaagtggcaactctagtgtgtgagaaaattaatgtgacagctgaatttgtagaaagctgctttgactctcttgggccccttcataagccctggaactaaataaaagtctagtgaatacaagtaa

SEQ ID NO: 273487 - DNA, 560 bp, Homo sapiens
gagaccatcctggctaatacggtgaaaccccacctctactaaaaatatcaaaaattagctgggcattgtggcacgctcctgttgtcccaactactctggaggctgaggaaggagaatcgcttgaacccaggaggcggaggttgcagtgagccgagattgcaccactgcactccagtctgggtgacagagcgagactccgtctcaaaaaaaaaagaagttttatacatgaggcccatgaggtcctactgggtgctgggcacttttgtaggccaagcacaaaacagacaaggtccctgccctagtggggctgatgttccagccaggaggccagatgacaggcagtggcctgggaaactggagcagttaataacacgctagaaggtagataatgcaatgggaaaaaaaagaaaacaacagcagagtagaggggagggcagaagcaggtggggggagcagccgaagcttcatcacagaggaaactcaaatatccccaggttgcaagagatggccgcttcttttggtcaacttctcaaaaagagtactaaaatgacatcacatct

SEQ ID NO: 273488 - DNA, 411 bp, Homo sapiens
ttcttacacttaagtctttaatccattttgatttaattttgtaattaaaattaaatcaaaaaattaaattactctgggttcttttctcagcataaaaatgtagagattttcccagcaccatttattaaatagggaatcctttccccattgcttgtttttctcaggtttgtcaaagatcagatagttgtagatatgcggcgttatttctgagggctctgttctggtccattgatctacactgctgttttggtatgagtaccatgctgttttggttactgtagccttgtagtatagtttgaagtcaggtagtgtgatgcctccagctttgttcttttggcttaggattgacttggcgatgcaggctcttttttggttccatatgaactttaaagtagttgtttccaattctgt

SEQ ID NO: 273489 - DNA, 432 bp, Homo sapiens
acagctctattttaataatttttctgttgagaaaactagtagatttcttgaattctaagagttctacagggattttattcatcttaactattttgacagatttaaaaattatgtagtaagactttatttcaatgttgacaggacgggttcccatgtgtgtttttgcagagggttattcctgaaactgacttgttactcggaccactatagtttggtacacagtaagaatgatgaactaactttcgctgtagaatgaactgagtgacagttcttgcttgcttgagaaaaatatactgagcatctagattgggccaggtagtgttgctaggtgctcgggatatatagtagaaaaacaagcctgtcttttttaatgtatgcaggatatctctggagaagtaagagagggtaaggaaagctggatatgttcctgct

SEQ ID NO: 273490 - DNA, 1449 bp, Homo sapiens
  misc_feature (829)..(829): n is a, c, g, or t
  misc_feature (1252)..(1252): n is a, c, g, or t
  misc_feature (1343)..(1344): n is a, c, g, or t
  misc_feature (1367)..(1367): n is a, c, g, or t
  misc_feature (1384)..(1384): n is a, c, g, or t
  misc_feature (1389)..(1389): n is a, c, g, or t
  misc_feature (1422)..(1423): n is a, c, g, or t
catgatcttaatttaaaatgaactgttggatctctctttcataaattaagtgcaaaactctactttctgcctttcttcttgtgaccagagtaccagttgactcatctcagttataatttgtttaacaggtttcatttgcttttcccccttaatacatgaatccttttatgtgtttaacagttatttgtttcagagggtctgcattgcataatgccatgagcagccaaggttttcacgtaatgattttttatgaaccatgcaaagacagctcaagttatgtaaatctcagtgaactctctagcgacaagagtcccaatccttaggcttcatcatggagctgcttctctctcaatgtatttgaattattggtctagccaacctcttcttttccccttgctgcagtattttaggaggaaggaacaggctaaatcctagctagacgtgcgcatgcattctggtatttaagagccaataaaatatagccaggaatcaccttgtctcctgtaccatacttggatttgtagttcagatcttcaatgtagtgcttaaaagaaacacacactggggttttcatggtgaagtccagggcaagggcatagaaagaccacttgaccctggatggaacaacatgtggaaaccctccttgccctcctttttatcttctttactttttttactatggccagggttggaaatgtgggtggatgatgggttttacttctttgaaatgttaagtgtggaactttgaaccatgctcggtcttccctggatttagcaagaattgaaggctgtgctcagagaggttaaaggaagcatctgcttctctcantacaaggttgatggagatgattagtgtggtcaaggaagaggagattgtttctgccgtgcagctaatggaaagtgctttgggaacattggaaaaaagcatctcttgctagaagaccttgatcatctgtctcttggctgtagaggtggctccttggggttcatgtgaggccatgtcaaacaaaaacagggagaaattgtgtccaaattcgtgcttagatgtgtgtctgactcagtgttttcctcctttataaagccaagataaatgatttttgaattaaacattgttttggcacttcgtactttcattcattaagagggatgatgaacctgtcaggccataatagctagcctggaattttccttgccaagtctgtcctccttgaatagtttgctatttatgctgatgatttggagcaaggaggtngaaaatagtcatattatttgtccctacaagggaaaatacagcagcaatgttaaaatgataatgacgccaggcgcagtggcccacgcctgtnntcccagcactttgggaggccgangtgggcggatcacctgnggtcnggcattcaagaccagcctggccaacatggagannccccgtctctactaaaaatccaaaaa

SEQ ID NO: 273491 - DNA, 890 bp, Homo sapiens
atcattccaatgttacataaattgtttcagagaatagaagacaagggaatacattcttaggtttattctctaagtcatctatctttaattctaaaaccagacaagaatggcttaaaaaaggaaaattatagttccattttacttatgagtatacgtgccaaagtcttaaatacaggtctacagacccttaacctcaattttgaaatcgactaacctctgaaaaccaaagatttaagaacttggcagcacaacctgatttggcctattctcattgatggcaaaacctgacttgaatggatgtaagtctgcttacaatcattgtttagagtgagtatctgtacagttcactgtgaaaacatgaatgtgtttgaatactggatgctgacactcagtttgctaaggttgttaaaaaatacccagtttttgcaccatgcattattactagtgactagaaatgtttgatttctgaaacatagcttattccaagggttttaaataagggattttgggggatttaatagcagaaaaaccttgaacagtatgtaaaaggaaaatcatatccatgttggatttatatcagatgtgcaaagggtggcttttaatagaaaaatctgtacatgtagtttacctcatcaacaaactaaatgagaaaaaatactataatgacaatagatgcagaagaaagacttgataaaatttaacaattcttgggaaaactgctaaattaggaacaggtaagaactttcttgaaaacgtgtacacagacaagcaaaatttataataaacatcatctatcatcctaaatgaggaaatacattccctttttaatcaaaaagaaggcaaataaaacatcacttctattcagtgttatatggagatcctactcagag

SEQ ID NO: 273492 - DNA, 1196 bp, Homo sapiens
gttttgaaacatctgtttaccagtcacagcactggcattggaagaaaaggatgccaattaacaacagaggatcttgaagcttatatttatgtcttttctcagcctggagcattaagtggcccaattaaccattaccgaaatatcttcagctgcctgcctctcaaacatcacatggtgaccactccaacactactactgtggggagagaatgacgcattcatggaggttgagatggctgaagtcacaaagatttatgttaaaaactatttcaggctaactattttgtcagaagccagtcattggcttcagcaagaccaacctgacatagtgaacaaattgatatggacatttctaaaagaagaaacaagaaaaaaagattgacttttctttatcttctatgaagggtctgtaatgaaatctctaaataatttttaaaaattgttcatcaacttctttatgttttattagaaaaaaactgttttaatgtgctttatcataaataaatatcctgacaaatggtattgaaaaaaatctgagatcatgtgaacatataatacaatgttgattttcttctggtgtattttgcacagacaagcatctgccttaaaatatatacacttgtacaaaaaggaagtttggagtaagtgcttccattttggtttcttgcttttttttactctgttaacatatggtgccttttacaaatgtatattaaagattagctgtgccatattataaggcaaacctgaaataatataaattttcattctattgttcaaaaaaaaaaaaaaaaaaaaaaaacaaaaaaaaaaaaaaaaaaaaaaaaaaaaaaaaaaaaaaaaaacaagagaagagagaacaacagaaacaacaaaaaaaaaaaaaaagaggggggcggcggcgcgagcgcggcgaaaaaaagatcaaaccccccacggcggggacggcggacgaccccacgacggtactaagaggagaagcaaggaaagaacagagcggacacaaagaaagagaccgccgggccaaagaaaaacgcgggtgtgatcgaaccagaaaaaccaaaaagacaagaccgcgcggcgcgaaaaaaagaagacgacgaagaacgacacccaaacggacgagcgagagcagacgacaagaaaaacgaagacatacaaaagaaagaagagacgagggaacaagaaaaaaaaggg

SEQ ID NO: 273493 - DNA, 626 bp, Homo sapiens
ttggtcaggctggtctcgaactcctgaccccaaatgatctgcctgcctcagcctcccagagtgttgggattactggcgtgagccaccacgccgggccagagtccacatttttaatcaaggccccaagtggttaaaaaaataacttaaggagcactgtgacatgggaatattgatccccttaagccctttttaaagtgctgaggcttaatcaggagacccttggtcttctttctttttttttattattaaattggaattgtaaaattcctcctggaccttctcctgactaactgttttaatccctgtacctcaggctgcctgtcattggcaggacaaatgcacaagaactgatttccctggagagggttcttggtgtcacatggtgggagatgctgtcttgtttaaaaacaaagaaataaaacccttcattgaactcgatggtctccctgaagaggctggaaacgtaatccagtggtgtctgtttgtttccagcccatgttgttattaatcctgttacaaatgataatgctttgcctttacaggcttgctgtctcggaggagttttctgtattgcctgctaggccctgctgggtgattaagccactcactcagagtcttacaggcca

SEQ ID NO: 273494 - DNA, 283 bp, Homo sapiens
caaagggttcactcttccatttgctcttctttccaagaaatcataaaagcacataagacatttttatcattttctaatttaaaattaaaactagaaatttaaatacatcacctgtcttagtatcctcgggttttgaaagtttcatgtttcggttcttattaattcgttatgtagatttcacttgttgcctatgtaactgcatttattgttaagtaattgaacatttacagtttttttgttgttgtttatatgtgattaaagtgaaataggctgttcaaatcta

SEQ ID NO: 273495 - DNA, 404 bp, Homo sapiens
gtagtaggaaggcaaaaaaggtaattgaaagaccctgttcttcaaattaccaagagaaagatgtcgtgcaaggaataggacaatgacctttctgttatttgcattacggcttgataattatcacaagtacattcagtttgagagtttctcgatctcttctcaatgccttcaaatagatatgttacaagacatggcaaattgattctttacctaagcgaggccagtttcatgttccaaaaatatttcaaagccaaatacacataactttataaatttagccactgttttttttccccttgactgttttattcttgactgccatagccaagagttaatatagttgcgttttcttaaggaagcaacataagttctaacaataaatctgtgaaaatgaatttgtgatt

SEQ ID NO: 273496 - DNA, 182 bp, Homo sapiens
cccctcaccctctgccaagttctagaagtgcacagcattcctgaaggcctggttcaaataccatctcttctggtaggcaggcagagctcgtcactccctcctcagcatgcccacccctgacactgagcactcttgtccactacctaatttgtcatgttgtcatgaagttagtgtttgatgaa

SEQ ID NO: 273497 - DNA, 351 bp, Homo sapiens
ttataacagcccaaaactggaaactgttgaacaggccaggcacagtggctcatgactgtaatcccaacactttcggaggccaaggtgagaggattgtttcaggccagtagttcaagaccagcctgggcaacacatcaagtccctgtttctacaaaaaacaaactttgctgggaatggtggcacgcacctgtagtcccaactgctcaggaagatcacttgagcccaggaggttgaggctgcagtgaaccacgctaatgccactgcactccagcctaggctagtataaacaaggtcaaaagtaatatgttcaggatgggtgtggtggttcacgcctgtaatcccagcactttc

SEQ ID NO: 273498 - DNA, 473 bp, Homo sapiens
tatatgtatatcaattttatatatatatatatataaaatgtatgttggtacacatgtgtgtattcatttactgacttgccctaattgaacaatcaactcagtcaaaacagagggtacagtagccacatacacagggttaatttgtttctttcacaataccggcaaaaagtgatgtcagaagcttctgtaccattctccagagctgctcctaccctaaggactaggtgtaggtttttgctgcttgggaaacgtgttgttaggagtggtcaggcgtactcctggagacagttcaggctcaacttttcagaggatcactgtcaattctgacaccaagtttcaggtttggcaagagggacataaaaatattctcaagttataatgatagaaaaaaaatccaagcttcaaagaggatcagctttgcctctcccaacttgcctctgcagacataaaaagggtgggactttttgggagaa

SEQ ID NO: 273499 - DNA, 271 bp, Homo sapiens
atatagctgccagtaaactggtaggaatgtatatgtcctctaagagataagtcatatgccttttacaattctttaattatttaccagtcagtgtatttccagcattgaatctaaaaatcctaaaacaagttatgctattatcagtgttctaattcccttagtggtctagacacatgttatataaatatttaattgcaatcactccatcaaaactctatgacaactgaatttcaggattctagtatcattttaaaagaaatatttgatcttt

SEQ ID NO: 273500 - DNA, 684 bp, Homo sapiens
ctgcctctgctaaaactttatattgcaagtgaaaaagagcttgtccctttagctattctcttatggcatgctgggatgttatgaaccatccatcataatttgggatgaaatgtaaaatatttaagctagtcttctgggttaaaagggggttaaagatgatgattctgtgatctctctaagtaccttaactgacattctttctataagtagcaccataattttgctaatttttcttatctttatgttgaccagtttgttccactttttgaagtaacttcattgaactttctgctaacgtatcctttccatattcccctctctcatccctgttctccttcagtctgctaggtcaaagtataaggattctcaaaaatgcagagtaattatgaaaattctgtttaaaaagcttcagaatagaatgtttatatagcattgatttggagctaagggctatattctggtaacataacaaggtgctatctagtgaatgtgtgattgtgtagtcatggagctgatgtccctgccatagaattacagaattatctaaaaagggaaatctataataatggccttcaatgctcccacacttggactagccattgccataggcagaaaggcaatctcatctttactgtgtgtgcaaacagtactttaatgtaatgtgtgcttaatataagctttctt

SEQ ID NO: 273501 - DNA, 346 bp, Homo sapiens
atgttacctagaatatagcccttagctccaaatcaatgctatataaacattccattctgtttaaaaagcttcagaatagaatgtttatatagcattgatttggagctaagggctatattctggtaacataacaaggtgctatctagtgaatgtgtgattgtgtagtcatggagctgatgtccctgccatagaattacagaattatctaaaaagggaaatctataataatggccttcaatgctcccacacttggactagccattgccataggcagaaaggcaatctcatctttactgtgtgtgcaaacagtactttaatgtaatgtgtgcttaatataagctttctt

SEQ ID NO: 273502 - DNA, 469 bp, Homo sapiens
gaaattatttcaaattattttaaaaattaaaaatgattaattcgcatttgctatggtccaaatgtatccaccgaatttcatatgttaaaacttaattacccatgtgataagaggtgggactttcaggaggtgattaagtcatgaagacagctgtcagggacgagagtagtgtccttttaaaatggcgtgagagagcaggttcataccttttttgcccttctgccttctgccaagtgagaatgcagcaagacagcagacactgaatctggcaccttcatcttggacttctcagcctgcagaactgtcagaaataaattcgtttttttataaattatccactatcaggtattttcttagcagaactaacaagctatgaaaacattgcatatttttgattgtcaaaatgaagttggatattgttaaatgtgtttgaattctttgattttgctaaatacaatggaatgatctg

SEQ ID NO: 273503 - DNA, 405 bp, Homo sapiens
actacccttttggagcagaaactcgtggtatctaactaaacttcatatacacccagccttcaactcagcaatccttctttctagaaattgaccctgaggttagactttcaacaatatggagggaaagtcagctcacagttattcatcacagcatcatttgtaattacaaaatactggaaacaatctaaatatctctatataggagagtcgttgaataaactactcacacaatgggtacaatgcagctgtaaaaaaagaatgagaatatctgaagtgaaatgcagtggtttctagaacatactgttaagtggaaaaagcaaggtgaaaagactatctaattctaaagtgtatggtatctttcctaaaagaaaggggaaaaagaaaagtgcatctgctcatctgtac

SEQ ID NO: 273504 - DNA, 346 bp, Homo sapiens
tagatcaacacaaaagagactccaaacgtcttgaaagcaggaaccatgtcttatctccttttttccccctatagtaaatatcacacattaccttcagaagagaaattcaatacttttttatttgaatctaacctttatacctagcatatgacatcttaacagaaactgctgtgaatttacccaacgcttagcatttagagtgatgacagactcaggaatccatttaggtctctaggtcctacgaaatccaatcaaatcctaaggcaatcttttcaagatcaccaagtaagagcacgaagtcttgagatttaattattactctgggtagtgcctcatactaataaaa

SEQ ID NO: 273505 - DNA, 705 bp, Homo sapiens
tatattcccagcattttttaaaagtttactcattattcccttttttcagatgaaaatacatatacaaagagagtgatttgctcacagtttcacaaccaggaaacgtttgcaccagagcccttccctctggtctgagcaaaaagtatatatataatataacgagtgacaacacgcttgcttttttccctttttagtgtgaaattgagtactttttcaactcacagatcaccaaaatgtaaccccctaaactgttaagccaaattcttaacctactgagtaaaaaagagcggggctcctccccgtggcttcgtcatttgaaaagcaactaacaagaacctcaaacatctatccttgctaatttcctgctttcagatcagtaggtgctgctaaaaagatctaaactgtggactcattcatcattcagtcagtattaacctactatgtgccgggcactgcatgaatacacaagaaaatcaggttccagccgtcactgttgaatggattcttcagtccgtttatgtatatttttgacatacaacttttcaaataggtagagtaattcggtgaggtaattcttaaagtcctgtatctaacctcagtccccttccaaaatgtcaaatacattttgttttgtatattaaatctaaatattaagttgcatttgtaaacattgccagatggaaatgtagaatatcaacaagataa

SEQ ID NO: 273506 - DNA, 167 bp, Homo sapiens
gcacagtgaagttcccggcaatgactcattttctgatattggtgcctgaattgcagcttccgtggctgccacttcaggaagataacgtgtgacccggagcaaggttatcagaaactgccgatagaggtttgccacctcccaccatgaatacggacgctgataggagg

SEQ ID NO: 273507 - DNA, 81 bp, Homo sapiens
gcgttgccataattagaagctattgataacatttttgctttacttaaagtaaaattgttttgcatattgttacatatttgc

SEQ ID NO: 273508 - DNA, 282 bp, Homo sapiens
ctccctgcccggctctttgtccagcaatgcctaaggtcgggacagcctggcatccctgctgcaggcgtgccttttcccaacgtgcctgctaaaccccacagccacactaagcacctgcaaacgtggttctcatgacctctttggacccataaaatgtaaacacatttttgagtcaccgtcctatgagcctgggaggtagactacccttaaattccagatgcgctgttggcaccaaacttctgataccaccttctcacctggaaggccctggccacaatcctc

SEQ ID NO: 273509 - DNA, 488 bp, Homo sapiens
tttgtttaggttcccaagttctaaccttgcaagaaaggactgggggaggaagtgaaataatataatagcaatcagtaaagtgaaggatagctttccatttttgcccttgactacatttctcttctacaaacaaaatttacaataatgcaacatcacccagttgtgtagtggtcattgtatgtgtaaggaaagtaactactttcctgtttttgtgattcacaagattggatttctcctattggcatataattgccaatataaatcacttgtaaaatttttagtttctggctgggtgcggtggctcactcccgtaatcccagcactttgggaggccgaggtgggcagatcatgaggtcaagagttcgaaaccagcctggccaacatggtgaaacctcgtctctactaagaatacaaatattagccaggcatggtggtttgtgcctgtaatcccagctactcaggaggctgaggcaggagaattgcttgaa

SEQ ID NO: 273510 - DNA, 438 bp, Homo sapiens
tgctttgaaggcaaatatttgctttccatattaaaaaaaccactttttagagtatgtaaaatgacacactaacatgaactaaattcataatgaagccaaattctttttaaaaatattaaatctataaaattagaaaaccatttcacccttttgtgtaaaatacctatgctaatgccttgctcactcgttttttaaaaaatcaattttaaggagaataaagaattctgctgcaaaaacaagttgaaagtctaaaactcgtttattgcggtagaggctccaagatcacacacgtccattagaggtattcagtgcagggtcactggagggtcggcaagagacagccaattagatgtctgtttttcctttcaaagtcctgtctgtttccttcactctcttcaaaacaccctaagtagacatatatatcatgaagtcaaagcg

SEQ ID NO: 273511 - DNA, 444 bp, Homo sapiens
tcctgcactcacactccaatatgcacctaagttatggggtcatgttgaggttccagactgcagaaggggatcgaattatgtttcattgtattgagtcacaaatatttcaatgtaaagtaaaaattttggaagttttacgtaacagaatataccttacaggaacagtagataggtataaaatgacttcggtttgcataacaaagaaataattgtgatgagtaccagactgtgaagtccctgaggcaaggttatcatttgttttctggcacatgagaggcatacaaatttatttttgctgaataaataaatattgtcttcaaatctttacatttccattctagaaatatgctaaaaaagctaatctgtaatagatatagagttagcacatgacaaagttatagctgctttgtgatttttttaaaataaagaacatgtatttgcatt

SEQ ID NO: 273512 - DNA, 416 bp, Homo sapiens
agaataaccaagttagaaatgggaagaaattatttgtactagtaacaaaataataaaatacttatatccttctcattttttttagttatatgtcagaaatgaagaaaattataaaatcttactcaagtatatcaaacaagggattttgaaaaataccttatttttggatgggaggactaatatcataaaaataccaatttatcccaatttaatatataaatataatgcaatcttaatctgaattggacttggtcaaaataattaataattccattgaaagactaaataaaattcaagattttgaaaaaggaatgactagacatgtgatttaacatttattaaaaatgtaaaaagctcttatattagttttctattattcctgtagtaaattactacaaacttggcttaaaacaaca

SEQ ID NO: 273513 - DNA, 352 bp, Homo sapiens
cgattgcggggcccgccgagcccacgcccaccgggaactcgcgctggcccgcaagcgccgagcgcagccccggttcccgcctgcgcctctccctccacacctccctgcaagctgagggagctggctccggccttggccagcccagaaaggggctcctacagtgcagctgcgggctgaggggctcctcaagcgcggccagagtgggtgccaaggccgaggaggcgccaagagcgagccagggctgcgagggctgccagcaggctgtcacctctcaataggacgtgaaggtcggtcggggtctggttgtagaaggctttaaacaacaagctaataaatttatacttcacactgt

SEQ ID NO: 273514 - DNA, 262 bp, Homo sapiens
ctgctcttcctgcttttggtcaagctgcccagcacgtacgcttcgtgcgccagtggtccgtctttggcaagacattatgccgagctctgccagagctcctgggggtcaccttgggcctggtggtgctcggggtagcctacgcccagctggccatcctggtaggtgctgtgtggccaaccaggacccagggtcccctccccagctcccttgggaaggacacagcagtattggacggtttctagcctctgagatgctaatttat

SEQ ID NO: 273515 - DNA, 316 bp, Homo sapiens
ctgctcttcctgcttttggtcaagctgcccagcacgtacgcttcgtgcgccagtggtccgtctttggcaagacattatgccgagctctgccagagctcctgggggtcaccttgggcctggtggtgctcggggtagcctacgcccagctggccatcctggtaggtctcgtgtcttcctgtgtggactccctctggagcgtggcccaggccctgttggtgctgtgccctgggactgggctctctaccctgtgtcctgccgagtcctgggacctgtaaaccctgctgtgtgtggggctttgggaaacgccgccgggggg

SEQ ID NO: 273516 - DNA, 466 bp, Homo sapiens
aatacagaaagtgataggatggattaaaaagcatgacccaattatatgttgtctataagaaactcacttcaaatgttgtaatataggcaggttacaagatagaatgtatccttcaccataaaacaaatctcaacaattttaaaaataattaaagtcatgcacttgttctttgatcacagtggactcaaactaggttatgaataacagcacaataacagaaaaatctccaaacactaggaaacaaaacaacatacttctaaataatccatgggtgaaagaagaagtctcgggggaaataaaaatactttgaactgaataaaaatgaaaatagaattgttgggatacagctaaagcagttatgagagagaaatgtatgacactaactgcatatgttaacagagatgaaaagtctcaaataagtaacctaagctcccagctcaagaactgaaaaatagaagagcaaaat

SEQ ID NO: 273517 - DNA, 462 bp, Homo sapiens
ttgagacagagccttgctctgttgcccaggctggagtgtagtggcacagtcatggctcactgcagcctccgcctcctggattcaagcaattcttgtgcctcagccacttaagtagctgggatttcaggcatgcaccacctcacctggctaattgttagtagagacatggtttcaccatgttggccaggttagtagtgatgacctttttcatcaccaaggaaaaggtacatggatgtgttttggtcaagcaaattgggatccacaaaacttaatgggtgtggcagacttgtcacacttgcttcttcccgttgccttccctcctttcctcttttcattcccctgtcttgctcctgtttttctatcttaagacattttcccttgctacctgggtacttagccctagagggtttgtagcatccagatcccttggtcatctattaccaagattcagaaaggagaagt

SEQ ID NO: 273518 - DNA, 131 bp, Homo sapiens
gcttttgccacatatgggcagaggtgagtgttgagaggactgggtatgaagttgggaacccaagtctgaatcctggttcagccatcattaaatgtgtgaccttgggcaagttacttaacctctctgagcct

SEQ ID NO: 273519 - DNA, 485 bp, Homo sapiens
atctcagcactttcatgcatcttatgagaagcaacacgcatgataattaagcatttctatgcatgcagagctttggttagcttggtaaagggtatgttcagcaattctggtccctgccctccagaaaaacttgcttaagatgcaccaatatgcattattaaatataataacacatcaagtaaaaactatgcctaacactcgcaggctatcatacagacttagaattattgagatgatttttcagatggtaacatttaatcacagagaagctgaataatttgccgaagtttactttaaaaaaaatcagagctacgataccaatgttcagtacctttctttcttagtataatcccctactttcaaaataacctttatagatatttctagtatctacgctaagaaaaagagtaatggtgaaagactgagagaagacactgctttttaaaggctatagaaatctggtacatggcttctttgaagaaaaa

SEQ ID NO: 273520 - DNA, 482 bp, Homo sapiens
tcagccagacggtgaccagcctgaggttagagaaaaggccagccctccctgtattgaacagtgtcaccccatgtgaggcaggtgagcacccagatgcctgggtgggtttggctagagatgctcagattgccagagagagaaggtagatttgtagaaatatcgacataagtagtctcgtcatcatcaataaatgtttatgatttgccttcagtgtaccaggctctgctacatcgttcataaaattcctcttaaaaagagtcgcattctttccctgcagaaacttaccatctagttagagatcacagaaatgaaacccagacactgtgaagtgactgttgacaaaggcagggagatagcgaggcatggtggttcaggcctgtagtctcagcaacttgggaggctgtggcaggagaattgcttgaggccggtacttcaagaccagtctgaacaacatactgagacccatctctttgaaaaaaaaa

SEQ ID NO: 273521 - DNA, 346 bp, Homo sapiens
cgtgcctgcctgtagttccagttacttgggaggctgaggcagggggatggcttgagcctgggaattcgaggctgcagtgggccaggatggcaccaccacagcccagcctgggcaacagagaaagaccctgtctcaaaaacaaacaaacaaaacataaaacaccaagaaaaagccctctgtccagagatgaaaaaattctcagggagaaaagggaagaggaaaagatattagcttatcactacctagaaaaatctgctatttatagtattagttttttttttttaactaaacatatactgaatactccagtatgctggttctcatcagaacatataatctatttttc

SEQ ID NO: 273522 - DNA, 497 bp, Homo sapiens
ttgccttctggctttatgctgagaataagtaagcacattcctcgcctagtccagccacacccagatgctcctccaaaggtcctgggcagaggcctggttcagcagacccgggacagggtcgctgggctctgcttctagcaggtgtgatcctgccttctacaacgacatatcttccagccccagggcactcctatgagactctggcaaatacttgggttgaaatctgggtcactctgatggtcagaaatccatcaaacagacgtttactaagtgcctacaaagcagggtgctacacgcagcggagacgggacctagttcaaatcccaattctgtttctttccagctgtgcgaccttgccattgtacttctccaaagctagtgtcttcaccgctctgcaaaatatggcaaagtcaacggtagctctcatcaccactggtaggtactgtggtgatgtggtgggaaggggtggatcaaatcatgcacaaaaaacttgaagg

SEQ ID NO: 273523 - DNA, 524 bp, Homo sapiens
ttttgctctctctgtcacccaggctggagtgcggttgtgcgatctaggctcactgcaagctccacctcccgggttcatgccattctcctgcctcagcctcctgagtagctgggactacaggcgcccgcaaccacgcctggctagttttttttgtatttttagtagagacagggtttcaccgtgttagccagatggtcttgatctcctgacctcatgatccgccctcctcagcctcccaaagtgctggaatcacaggtgtgagccaccgcgcccggccctggcattcttgataaacacattatacattctccctagtaaggtgacatttcaagcaaacatgcatcatgatcttacccataaacagtcaggtcacaccccgaacatgttaataagtgagttagatcaaccaattttcaatattaatacaaaatcatctgtggaattctcaaaaatatttttacaaaaattagcagtatgatttaaacgtcgacgcggccgcgaatttagtagtagaaggcaaccgc

SEQ ID NO: 273524 - DNA, 1021 bp, Homo sapiens
gacactgcttttccccaaatcaccagtgagctccatattgccaaatacaaatcaaacttttctgccagttgtcctactcgaactccccttgatgcctgacacagctgaccacttcttcctaaactccagtccccattcacttttgtgatcctactctcatttggatttctctctttattacagtgatgtcctatttatttatttatttttaagaagctcttcatctgcttgaactcccaatgccagtatccttctgagacccattcttaactttatggctttttttctcttctcttgtctcacaatctttgaaggaatctcaggcacgtgaatgatgtttacatctgctcagatgctgcagatacccaagtctttatctccagcttacacatcccaaagctacatatctgtcttctgctcttctcacagaccaaagcccatccatgactacagataacgtatcatctttttcccaagggataacactcttgatctacttggaaaccaaagccataaatctcaattcatttcatgttcctgaaccttgcttcctctccttttctaaacatacaatcgcacagtcctgaagatgttcactttttatcttgctaatatttcaattattctgtatacttctactgaactttagtccagaaacgcacacctcttacttggactattccaatggtctcctaactcccaccatcagccatccatctgttcaatattttcttcacagtattttaaaaagtgattttaaaaatgtaatcatattgtgaaaccgtttaatccacttggaataaaatgtttaatagatggatcgttctggcgggaaaagcattgtgaatattagctaaatgagaaaaagataatatctggaacttcgtacaagttctcaagcttaatttcagtatattaatgaattaaatgtaatttctgaaaattttctaaaataaacgtagttgaaaatttaatatccttgaaatgatgaagaacattttcaattttaacacaaacgagg

SEQ ID NO: 273525 - DNA, 201 bp, Homo sapiens
caggggttaaatgtgggggtaaagagaaaggtactaatctcttctccatttctgtaattttggcaggaggaaggtgggcgtgaatataagaaggcaacaggctgggcacggtggctcacgcctgtaatcccagcactttgggaggctgaagtgggcagatcatttgaggtcaggagttcgagaccagcctggccaacatgg

SEQ ID NO: 273526 - DNA, 358 bp, Homo sapiens
gagttaaaatttttcttttagtaaagacttttctgaatcatttagtactcttttctttttcagttaatatttccattaagaattcctgatgtttctttattctaaagccaaatataaatcattgttattattttagttcatacatgtcttaacatactctactaatgttaatgatcaggagttgactaacttacatttgattaatttaaaatccctcaattccgttcttttgtttgccctttaaaccctgcactgtcaagatctaagaatcccaaatgaaaaatctactgagattttatttatttatctctttgtaattatagttttattgagattaaaaaatttatcatctaaaagt

SEQ ID NO: 273527 - DNA, 518 bp, Homo sapiens
tcttttaaaaccagcagtccagcctctgttgcctgtcaagcaagtctgtgtaggccagattgattcaaaccagatctacttccaggccctgtttcacaccgtttccaataggatatgaatcagacaagataccatcaaccaagcattcagtcaggaaacagggccctggtcagacttttggggtgacctgccttacacggccaggatccagctctagtgacagcatctattataatgctgaggaatgggaacacactaaaaactcacaaagtgtgctttggagccaggcggccggcagccatgggaagcgtgctaagtgtggaaattccttcaagcctttcaagcaactcaaagtcataagctaaggagagatttcaaaactccaaagagaaattccactttccttttcctcagctccagtctttccattccaaacacgagtcctgctggtttgagccacttcatgaatgtgggattgttagggtcgttgcagagacttgccactatttttcttaggt

SEQ ID NO: 273528 - DNA, 305 bp, Homo sapiens
cctacttttaacatatgatgcaaactcctaaaaatctgtaaatacaaggataaaataccttactttttctatcttgaaatagtatttttataacttaccattttcttctatgttatggatttagcttgtaaatatctgttaacaaattggttctacaagatatataaaaatctcatgtgacttttcacatttgctctttattccagtttgtacgatagagaattctctatttcatcatcttttctgcaaatgcaataggaaattcttttgtgtttttggcctttaaattcagtaaaaatgttaaa

SEQ ID NO: 273529 - DNA, 453 bp, Homo sapiens
agtgctataaaatccaaatataatgaaaattccttagtgtgtcaaatgcataagatcattgggataattagtgattagcagtaatatatatgaatcacttggatagtatactgtatgcattatagtaggcatttaatagttaataacaaacatccttgtcactgagtggaatgaaacaagcattaagaactgtttaattttttcagtgtgaggcatttcatttgtaaggcagctaccaagaagagagaaagaaggagatacaaattttgtgatttgttttctatgaaagaaaaaggttaaatgcatgttttcacttttttatgtgtaaacttcatgttttaaagaattattcattagtttcctttggaaaacttgggtcaaatcattcttctgaatgtccattagaattcctgtgattcagaaaaattttagatcctcaactttattttgaaa

SEQ ID NO: 273530 - DNA, 448 bp, Homo sapiens
ctactcttggtggagaagtctgtggttgtgcaactctccagagggatctatgtctgtccagtacaccaaccccagccatgctcatgttcatagggtttgggcatttgtgcattccaattgttgtaacagtttcctatgagtggtcaaagtcatgctctgaagtccagattatgatggagcaggcagccttagagatgtcggggcagtgcaggataaatgagacaaagaggctacacctgccccacctgactcccagcatcccagccagcttcactgtgtgccatcaaccccacgtgaagggcatcccaacctcctccttcaccacttattattatacgatgtaacttataaacaatttaaagcaggggtctcaatcccccagaaacagactaataccagcctgtggactaataggaaccaggccacacaggaggaggtgagcagcagg

SEQ ID NO: 273531 - DNA, 382 bp, Homo sapiens
aggagggagaggcctctgtcttcctcccttccccacccgcctcccctggagagcagggaacggaacaaagcatccctgggaccggcttgcacctgctcagaaggtgaggatgagcttaaagctttccttgaggagattgaacccgagcttgtcctgccgcggtcactgtggggaccctgctgtccacacctctggggacccgtccacgcaggcatctttctctctgttccggggggctgacaccctgggcctctcctctggggtctctcaccacttggaggagagatgggctcgccgcaagctcccatcggccgctgctgttgctgggctgcctgtgccttccctttgaagctacaattcacattcatggtatctgtgtaca

SEQ ID NO: 273532 - DNA, 433 bp, Homo sapiens
gcagtgcgctatgatcgtgccgctgcactccagtctgggcggcagagtgaaagcttaggctaaaaatctttaaaacatgttttcatcctaccatattaatttggaagactggctttaaatatcacgtgggacagtaattatagaacatgtactgtgggctgggcatgatgactagcgcctgtaatcccaacatttttggtggccaaagcggaaggatcgcttgagcccaggagtttgagagcagccagggcaacacagtgagaccaggtctctttaaaaataaaaaattagccatatgcgtggtggtgagcacctgtggtcccagctacttaggaggctgaaggatcacatgagccaaagaaatcaaggctctcgtgagctgtggtcgcaccactgcactccagcctgtatgaaaaaccgagaccctgcctca

SEQ ID NO: 273533 - DNA, 301 bp, Homo sapiens
agcgagggcagctcgcttttgaggcagggattgctgaatgaggggagtggctttccaagttaggcgtttaggggaagaataccaactgtcagggacgaatgagagaacaggccaagcagccctggagggccaagtgaggaggcctctgttggagtgcctgaaatgtctggcttcgggaccttggattctttaaatgatgcaatctcctggcttctgcagagttgaaatcaaggcttagatccccaaaccatctgtgagcctggatacttatgcatggaagttaaagtttacagtgactcta

SEQ ID NO: 273534 - DNA, 500 bp, Homo sapiens
cctgcttggccagcgacagatcctttgctgctctgtctgccggttcttgaggtgaatgtcggaatccattatctttcgggaaagctctctggggcagggtaggttttcttactacatacaagttcttaattagttatcgttttttaaataaccacccctccccctatcgcttatctgattcgtaggtatgctttaattctaactttcttcctgtcctctctggtttttcacacccccagaagagtagcgcgcatcagaatcacctggaggccttgttaaaatactgacttctgccccacaactccggagttgctgatttagtagtgggggagggggcggtggcagcccaggttctcaggtgatcctgaagctgttggtcctgggaccacattttgagaaccactgcccaagaaataagtgatgctcagtaattaatccctgaattaacggaaagttggatttttatctactttgcaatctagaaagggtacgaggtctat

SEQ ID NO: 273535 - DNA, 262 bp, Homo sapiens
ttggcctcccacagtgctgggattacaggcatgagctaccgcacccagcctgagaccaccttttgcatctcaagattgtgaaaccaaggcccattccaccagcctggggactctttttatagatatgatcctcctttttcctgtgactaatgaatttgctgcatgatttctattcttctgaggttagttttctgagtaaggtgaccactcacaaaggcactttctttgtggcattctgagcctagattggggcccatcaatt

SEQ ID NO: 273536 - DNA, 86 bp, Homo sapiens
gggtggggtgacttgaagatgaaggtctggacaacgtaataaccaggtctataaataatacaatcagaaacatttgtttccaaggc

SEQ ID NO: 273537 - DNA, 899 bp, Homo sapiens
gatataaacccatcatacctaagtcaagaagcatttggacttatgatagtttgactcacaattttttgactttacaatgggtttactggggtattaaatgcatatttgacttaaaatattttctttttttttttcaggatgtaacccccattgtaagtcaaggagtattggcatctacaacataataaagtcacaaaatatctccacaaaacaccaaatataaatgagttgggagaaagcataaaaaagtattgggccatagtggtatcagcatctgtgtgagagacagcaaaggaatgtacccaggcttctgatggtccagagaacacaattcactaatgggtaaatgtaaagggccaatctagaatagtagccaaactgggaggggattccacacaatctgatttgcaagtgaaagcaagaggacatcaactcaataaagtctgagatactagagcaatatggctatgctcaaatctaacaaaaaagaactgcttccaacatggaatccaacagtaaagagaaattactgagagtctaatcaaaattgagcagacagaagcaaagaaaagagaaggttgagaaaaagttggacaacggagtcaggaagagagcagaatcgagaatttttttagaagtcattttacaaaaacaagaagagtgggagcactagagccttgaagacagaaatggtatcatgaactatccaccctatttaaaagtacaaaaaaaatcattttacttaaaaaaaatgaacaacagaaaatagcagattcttcctaaagttattgtaagggaataaaagcatacaaagaataaaagatgtccctatgaataatgaaagcatgccagaaagacatgctcacataagatgaaaactgtgacctaatatttcaaag

SEQ ID NO: 273538 - DNA, 290 bp, Homo sapiens
gttggctggaatgccactccctcagggatcacatctgtgtctagaactcccagggacttggtaggttgtaagtaaggtttgaagattattgtttgtgcttgttttaagacaaaaactgtcttcatggcctctgtgaacagcctcccttcattctgttggaatttcctgttgactttttttatcctggcatactgagatcttaaatgatggttgttttagatgttggcctgccttgctagattggggaagttctcctggataatatcctgcagagtgttttccaacttggt

SEQ ID NO: 273539 - DNA, 449 bp, Homo sapiens
acaaagaaataactcaaattatcatctcagggataacacattacaagagggcaattaagcacactacctggcattacacaaaagattgatatctcgttacaagagcacagatgagttcagatttcacaatacaggaaatacactcgtcaccaccgtctctctttgaataaacaaatttcgggtcccacttgccagcgccactgagtaactagtatagggaaagaaaaaacttttcaagaaaaggaaaagattgacatgtggccaatttcttgtagaagagctggagaagaaagagagaaactcaggatcctagagaaaatcaggttgatgttactgaagtgaaagattaggttccctcttagttataaacaagcttagagaaaaacagacatgtacccaataggcccttgagaagagaaagcaaaataaataaaaccatcagagccaaa

SEQ ID NO: 273540 - DNA, 217 bp, Homo sapiens
tgcaaagcacgttcaattggctgaaccgaattggctgcaactccagccccaacgggctctggggaataggatttcaggcttttcaacagctgctggaggaggagggtggactgacgagtatgtgagccagcccctaggacctttccctgttgtaaaattttataatgaatatgtatttaaccagcaaaacacatccagaatgccccatttagggacc

SEQ ID NO: 273541 - DNA, 380 bp, Homo sapiens
ctgcccatcaacagctgtgtgactctcagcatctcacgccacttctttgcacttgagatcacaatcccctctgtgacaactctatcaacttcctgctatgtgctagaaagcacactaggcactaaaatcaagcatgttgggatcactaggtatccatcaaatatgttcatgcaaatgaattaacaaacaagaaaaactatactctgatgctagtcaccatctgttgaaccaaaataatctttaaatgaccagaaatactttcttccctgcaattctgttactatgggttggtctaatgaggttggtttatatccatgagagaaaacagcactccttggtccaatatactgttttaataaactttattaaatttccattga

SEQ ID NO: 273542 - DNA, 218 bp, Homo sapiens
cacattatccgttaaattagattttgaatagtgttgaagtggggaaggatttgagaaaaacatatgcaccaatatttgaagtaaatctatgcttgagaattcctgctgagagtgattcttcagaaaattctaaagagaactttcatgagtctgaccagtgccctgaagagtgtgtgatgtttgaagatgaaatgtcagaaaataaagacaattgtgtc

SEQ ID NO: 273543 - DNA, 285 bp, Homo sapiens
caccatcagccatgttgaagtgcacagttcaggggcacaggcacattcacggccaccactgtcacctccagagcctcctcatcttcccgggctgaagccctgcttgcgttaaacacccactccgagtccctccccagtccttctccttcctggtctgtgggtgtgagggctctggggacctcgagtgagtggggagtggtggatttgtcctgctttatccacgcacctgccaatgggtccttttcaagggtcccagagaactcaggcagcaggcagcccgcgagc

SEQ ID NO: 273544 - DNA, 559 bp, Homo sapiens
agtttattttagccttaaagttatagctacaacaaattgaaccctgtagttattactgaaagagagtgtggatattttaagtatctcctagtataatatgacattgttcatgtggacttattttaatgtttatttgaaaattaattttttaattattttgtatattttgagttagaaaaacacactttatcttagacaccaaagccaaattattccaagtgtatgctatacaccgcagtgcagctctgcttctctcccaacctaccctggggccatttttggcacaatagttgttcaaatgtagatcactatgctgaatgctcatgctggatttgaccagtatgcagtattttagtactttttaaaaaatgtatgcttctttttgaagactataatttacaatttttttaataatgtgcaatttaatatagataaccaaaatctttttaatgaaaagatctttacaattgcttggaggataagattattttactgtggaaaaatgtgatactcttagtaaatgcaataaaaactttttagcaaattcaaaaaaaaattt

SEQ ID NO: 273545 - DNA, 294 bp, Homo sapiens
ccgcgcccagctaatttttgtatttttggtagagatggggtttcaccgtgttggccaggatggtctcgatctcttttgacctcgtgatccgcccacctcggcctcccaaagtgctgggattacaggcgtgagccaccgtgcctggccggggattataacttttagaagaaggtaggattgtctagaaatgtatgtgaggtggctgtgattcaaagggaagttctatgcagttatttttgtttcattattttgtctttcagtgttggggggtacaaatagtccaggaaaagaagt

SEQ ID NO: 273546 - DNA, 437 bp, Homo sapiens
tgctggctgcagactcatgcatacacatcacggtggtttctgggtggttgatgctcatcaccctctgacttcatttcttttttcctttgcaaaatggctattgcccagaggcagcatctcttttctaaaaagtgaacatgccagaagggtttttggaaactgccttgctatctgtaggagccagatgattcacagggatgaaccaatgtacataacaaggatacctgattggattaccaattagccgtctccacctctgcagggtggttggaaagaagagaaaaggcagtgtttagtttgggcaaataccaaaaggactttatcattctcatcaaggcatcagcgtggcacattagacctcttccaagccattccactggaacttctctctccaaatgctccagcaagagtaaacttgttatgcaaacattggatca

SEQ ID NO: 273547 - DNA, 634 bp, Homo sapiens
tacagtagaaagtcagaaggtcacaaagcttgcagggtaagtgacacaacttgaaactgcttggccctctttaaaaagaaataataaaatgggagagaatgaagcaagtttacctaacacgtctttgcaaggtaaaaagatggcctatcagaaggtccatgcagatcaaagagctccaggacactcacagtacttagacaatgatgaccttcaagccactgcccttgacttagagtgggacatggagaaggaactagaggagtctggttttgaccaattccagctagacggtgctgagaatcagaacctagggcattcagagactatagacctcaatcttgattccattcaaccagcaacttcacccaaaggaaggttccagagacttcaagaagaatctgactacattacccattatacacgatctgcaccaaagagcaatcgctgcaacttttgccacgtcttaaaaatactttgcacagccaccattttatttatttttgggattttgataggttattatgtacatacaaattgcccttcagatgctccatcttcaggaacagttgatcctcagttatatcaagagattctcaagacaatccaggcagaagatattaagaagtctttcagg

SEQ ID NO: 273548 - DNA, 519 bp, Homo sapiens
attttcatcctactgctttgccttttatgagatgaggctgaaaatgattttctacttattttctctccttgatcttttctaccacctttcagatcaataaaatatgataacagtgactcacaactttcctacaagagtttgtcagaagagctcttaggaatgattccattctaaataagcgaagctttcacctttgtgcctactcattcgattcatgtgtgttcattcaaccattaattaaatagataacagcatccattgaatgcattgtgccgaggctgtgtcctaagtctctgttccatcaatgctcaggaaactgtcatagactgctatttattaaaatgaaccttagaaaaaataaggcaaacttagttctgtgtgctattattgcttctcaatagagatactcttatgatctaaagttgataaataatctatgattttgtaatgtgtattccacatttcatcttttcccttttgcagctctattttttaataaagcctgtgttatttttaaag

SEQ ID NO: 273549 - DNA, 866 bp, Homo sapiens
agggctgggagataatacagcaaaaagcctgccatgtcctggtgacaggagcccatttcagcggccaaaaaatctttccaacagcttctgttttgctggtaaatgtctgtgtttgtgttggttgtaggaggaaacctgggaaaacaagttgggttctggatgagaaaatgggtgactttgttataggatggagcaaagagaatcacaagaaagctcaatggcatttgaccccaaatggaaaacccaaaatgacacttccattaggatattcctttgttttggaagaacagggtgagaagaagaaagacaggggcaaactttaccagacatgcccttcaccagccaggattagtaactgaagaggaaggagagaatgctgggtgcactccagctgctgggacccttctctttccatctcactgtacctttgcttctggaggaaggaaaatacattcaagtcctaggaagattctgaaggtcaaatgagggaaaggagccctgcccagcaagatgtatcatgtcaagccacctgcttctatcagtcccaaatccaccatcaccttagttcctgactgcaattagcacaactgtgttatcacctgctctaactttagagagagactgcatttaacatcaagaatgagggtgcttttgggaaaatgaaaaaaaaaacaaacaaaaaacagatgaacatcatttcagaaaggaagaggaaaaatgatgatgattctccttgatatgaaataatgaacttcaagctctaaaacagaacattgcatagaacaagaggaggacagaggcagaaaaacttgcctgtgaattgaaagatatgagatagtctggtaccacaatgaaactacctgtgg

SEQ ID NO: 273550 - DNA, 984 bp, Homo sapiens
cgtggatgttcctgctcttgctggggggagcctgggcagcgtgtggaagcctggacctcctcactaagttgtatgcggagaacttgccgtgtgtccatttgaacccacagtggccttcccagccctcgcactgccccagagggtggcgatccaaccctctccctcctgctgcaggacactccagggcacaggaggacaaggtgctggggggtcatgagtgccaaccccattcgcagccttggcaggcggccttgttccagggccagcaactactctgtggcggtgtccttgtaggtggcaactgggtccttacagctgcccactgtaaaaaaccgaaatacacagtacgcctgggagaccacagcctacagaataaagatggcccagagcaagaaatacctgtggttcagtccatcccacacccctgctacaacagcagcgatgtggaggaccacaaccatgatctgatgcttcttcaactgcgtgaccaggcatccctggggtccaaagtgaagcccatcagcctggcagatcattgcacccagcctggccagaagtgcaccgtctcaggctggggcactgtcaccagtccccgagagaattttcctgacactctcaactgtgcagaagtaaaaatctttccccagaagaagtgtgaggatgcttacccggggcagatcacagatggcatggtctgtgcaggcagcagcaaaggggctgacacgtgccagtagagacagggattcaccatgttggcaggctggtctggaacgctgacttcaagtgatctaccgctcggctccaaagtgcgggattgcaggccgattctggaggcccctggtgtgtgatggtgcactccaggcatcacattctggggctaaaacccctgtgggaagtccgacaactgggttatacaacatctggcgtactgactgatcacgaaatctagagcagggcgcatcttggtaagctaattcctaaaat

SEQ ID NO: 273551 - DNA, 168 bp, Homo sapiens
cacacgccctctgcaccctccacagcacccaccagaaccctagtaaccgcgtccacgtgtggctgtgaccacagtccttctgctcctccccaggtggcagcaaccccaagcctgcttcattcacagctgcatcaccgggacccagcaggggcatgccacgtggtgagt

SEQ ID NO: 273552 - DNA, 341 bp, Homo sapiens
tactatgacactaaaagctttttttctagaacaggagacacttcaggtgaaagcattcattctcctactaactatggccttggagccaggttttatctctcactgtaggaaattggccgccccaggtgtgagctatgaagactcctttttgccccagtggctttggggttgaaatgctgtcgaaaagcttttatggctctgtagacccatctttttgaccaagccttgatcacacatggacatccaagggtaatcatggacccccaattgtgggtgaaaggatggatcatttatctacctgattactgagagctttatttgtctccctctgatagcaaaaa

SEQ ID NO: 273553 - DNA, 386 bp, Homo sapiens
ataaaataaattggtattttaactattatgctttttatttcagcactatctcagagtgagacagcatttgtttaaatgtttgttaaatgtttattctcctaaacatttaataacctgatctgtgccataagctggactaggtgttttcaagtatatttcagttatttatgacatatgcaaatataaaataataagcaaaatgatgtaacactgtcatattattattattgttccagctatcagtatagtgcctaccaaagactgtacagatttatctctatgcttcattttgggcttgagcccaggtagagagaaaggtaaattttgctcagaaatgtatactgttacccagcttctttatactacaaatagcttgaaagaaaaaa

SEQ ID NO: 273554 - DNA, 356 bp, Homo sapiens
tgttacctccactgcatatttcaaaccttattctaagaattttattttatcattttttaaagtcaatttctcttcttcgttaacatgatgattaaatactaatcactaagtgcttatgctaacaccaaggatgctttgcttaagcagtgaagaaatcaaaaatacaatgtttccaattctgttctaggactgatgtggaagtcataaaaccagaaacaacacggacctcagctcttcagcggtaaacactctaacctattattaccgctcttttttttttttttttttgagttggagtcttgcactgtcgcccaggctggagttcagtggctcaatctccactcactgcaacctcc

SEQ ID NO: 273555 - DNA, 290 bp, Homo sapiens
aaaaaaatggaggtagaactgaactctgaggatgtttaggatttgaataagagaaggagagagcatcgcagatgaagaaagcaacatgcacagaagtgtcgagtaaggagagtattgcggtgtgcacaaatgacagggaagggtcagacctaaaagaagaggatgttatgaactgaacacagaaaaacatgatggggtaagggagggcagctgtggggccttgggagcaattagaatttggattccgtgtgataggcaagttggttcttgaggaaagctgtgggatgatg

SEQ ID NO: 273556 - DNA, 488 bp, Homo sapiens
agatagggacacttcaacaaatgaaaatattaggcaatagcactattgaacataggtgcatcaataaatattaatactaacaaactaatcccaacaacatgtcaaaaagatcattcatcatgatacagtgcgctttaacgtagggatgcaaagatagttcaacatacagatccataaatgtgaaataccacatcaacagaataaataacaaaatccatatgacacttgataggtacagaaaaagcacttgataaagttcaccatgacttcctgattatgaacgctcaacaaatgaggtatagaaggaatgtagctcatacaataaagaccatatacgataaatccacagttaacatcacacttaatggtgaaatatgaaaaacatttttctaagattaaggacaagacaaggatgctcactctcactacttctattcagtgcattaatggaagttctactcagagcaattaggtaagagaaaaaaaat

SEQ ID NO: 273557 - DNA, 96 bp, Homo sapiens
gaagattctgccctgttcactacagaatcctgagtttggttcctaagtctagttctttctgtctgatatttgtgttacttttaaagcgtcagcatt

SEQ ID NO: 273558 - DNA, 381 bp, Homo sapiens
agggcttcatatttccaaattaaactctgtattaatgacttagaatattctctacttgcccaaacacaaaataaaatgcaacaagaacctttatcacatgtacctgtatcatagacatttccgaaaacaatagtttcatttggtgaatagctgaattacaacataaattgaattcctaccctaaccccacaaggtagattctgttaaagtggaagcattgattgagaaggaatgggattatggaaattgaaataggagatgtgggaagatcctaatgaaggtgggaacactggactcatgaactctgctaagtgtttttgccagtaaaagcagccattctttccttgcttgagtgggttagcccattccacaaggtagttg

SEQ ID NO: 273559 - DNA, 452 bp, Homo sapiens
gagattcaccatctcctttcttctagggacttcccagaggaactgttgttaccagtttagcatgtatccttccaggtcttttctttgaatttgtatgtatccatgtgtatatacatgtgggtacatatacatacttttagaaatgattttgtttgtgtcttattgacatattttaagtaaatggaatcattctgtgtatgattttgcagcttgcttttcttcacttaatggcatttcttagtgaagcttcccatttcagtacagactgagctacctctttttttggtaggggtcagttgtagagtattttgtagaacaaataagtaatagtttatttaaccattcactcagggacaaacttcacaatgtctctaggcttttttctgtttatgctgaatattcttgtatatgccctttttcgatagagtttatagaacagtatgaaaaaatga

SEQ ID NO: 273560 - DNA, 429 bp, Homo sapiens
ctaatccaggatgcgctcaggattccctctccactcaccatgaagaacttcaagtagcggccacactttgcagtgcctctcactcaggctgcgatatcctaagcgtttaccttcattccgtggaaactcttgaaacagcccatgtcaatcatgactcagcagtttttccttaccatgaaaacagcagagcaatgggtttctccatttttagagttaatgcattagctataaatgtaattccatagtagatatgaagtgcaacaaaaaaaagtctgggacaaattctgccacttttcagagggtaacaggagatggttgactcaagatggaatgtaagaaccctcatggcctccctacccttctctttaacctcttcatggttgtgcagaataaacctctaatacttctgatgagtgaggcaaatggcct

SEQ ID NO: 273561 - DNA, 467 bp, Homo sapiens
aattcttcagagaagatctccaccaagaacactcaacccacattcaggcagaatatgcaaggaggcaaactgttgtggactacgcgatctccacatggaagatgtcacatcaaaaaataaaaataggccgggcgcggtggctcacgcctgtatttccagcactttatgaagccgaggcgagtggatcacctgaggtcaggagtttgagaccagcctggctaacatggtgaaaccccatctctgttaaaaacacaaaattagccaggtgtggtggcacatgtctgcaatcccagctactcgggaggctgagacaggagaattgcttgagcccaggaggcagaggctgcagtaagccgagatcgtgccactgcactccagcctgggtaagacagagcgagactctgtcaataataataataataataataataataataataataataaataaacaaacaaaaactctg

SEQ ID NO: 273562 - DNA, 538 bp, Homo sapiens
ctagaactcaacaggaggtcattattatttgttacattaaattataactttcctctgctcttctaaagtatatatgttttttgtctcttagactgtccaagggcagtctatggctacatcttttgtgtcttttcctcagatgactagattaaaaatcaagatgttattcatccttgctaatggtgggaggtcatgataacacatcctttccctcctaaggccctcaagtcagtctcatctatagggagacatttctttagttaaaggcactgtgtttttaccactaacattaaacataagatatttttaaagacattgcataataggaatcttgaaattaaaatatcatgctctactgtctacttcccaagaagaccatcataaggtacggccgcaaccgtcttaatgtctgatgagataattaacctttagaaatattaaactacaaataaatataaaacaacctttagagaactgtatggtatgcactggtttgtggtaatgcattagaaataaaatgggtgcagagaaatcacta

SEQ ID NO: 273563 - DNA, 497 bp, Homo sapiens
ggatgtcagtagggacttgctattatgatgatattgagctgaaatttatatttctgaggaaaatgaaaggctatcagaagtcatttgttaaaatttctttattctgtcttccccatccccatcaatatttctccctcttttaaaagactattgcctagaattttatagaataagccctcctattctgggaaactgtactgtggtcctatttatattttgtttgaagggtaattttcttttaatgtaagactaatgccatgttagaattagattctgtgaaaatatttcttgaagctttgaatatatgttatacctatttatgcaattcaggaatgctttctggtagtgaaatgtaatgttaaaaaataccaaaaaaagcaagtataagtttgagctaaagttaatgactttctaattgacttatttctgtttgggcacgctggttgatgcatgtgatatttgtatagaaataaattgaatggataatattgttaggg

SEQ ID NO: 273564 - DNA, 89 bp, Homo sapiens
cgttggtagcaatttcctcagccaagattcattgttgctgacaaaacaaggagggttccatcccattaaacattcatgaagcctgatca

SEQ ID NO: 273565 - DNA, 338 bp, Homo sapiens
aaaaaaaaagcaaaaaaccccaacccgatttcacttatttcattaattttgaaggttacaggcctggaagattttggttgtcagacattaagatttgttttcagaaaactgtttgttttcagaaaactggtcttttcctttacagcctggaacccttgcaaatatgtgagatgtaggaatttctgtgcttaaattcaggtaccacccaagggtctgccctacctccaccctccaggcctgcccccacaaatcagcccagtgcagcttccggtcaggtttgttgatgagccggatgctggtgctggctctgagcatccttttcagcctgccacctcttc

SEQ ID NO: 273566 - DNA, 544 bp, Homo sapiens
aactctcttgtatatgtgggttaaagaccctcagcctcaagccaagcctcctccatgaggagccatctcactattgactggctagtgccaggtatggccaccagcccaactgaaacgaaatgttgcgttaaaacaagtgtaaatctcatacaacaggcaaatgcagaagcaatgtggtctcgcaagttgtaaagaggacagtcgcaattttgctggacttcaacctgggtagaagacatgagggaactctgtcactgaatcacggcagagttcaaggccacttgtagactatttcatgttacagaaggtagcctttagctactaagcaaaggcctcggtttctcatttctttcctgttcatcttcttggtcatccttcttccgcaagggaaacgagcccaagcaaaaggcagtttcaatattaatttgaccgaggttttgtgcagtttattatcatccaggtaatcaggtgcaacccagtctgcctagcagcccccctctctctgctctgtgttttcatttaataaacattttggtctacttac

SEQ ID NO: 273567 - DNA, 273 bp, Homo sapiens
gtgcaagctaggatgtgagagacaccatccaatttccaaaaaaattcaattaccaaacaaatgaagcttaaatggcaccgggtagagccaactttagaaatgaccaagacagagagctttccctttcaggcagtaaatgccatggttagtcaggcaggggagtctagcaggaggtagagaaggtggaggggtgcagaggggacggtcttcaggagggaggaggaggcgcaccaggtgtgtgagctgggcgcacaccaccaacgccctgcaagg

SEQ ID NO: 273568 - DNA, 447 bp, Homo sapiens
atttcaaaacttactacaaagttacagtgtggtgctggcataaagatagacacgtagaccaagggaatagactagaaatctcagaaacgaacccttacctttatggtcaagtgatcttcaccaagaccattcagtggggaaaggacagtctattcaacaaagggtgttaggaaaacgggacatccacttgtatgaaggtggatcctcccctcacaccatatacaaaaatggacttgaagtggattaaagacctgaacataagaactaaaaccataaaactcctaggagaaaacataattactttacaacattgattttggcaatgatttcttgggtatgacaccaaaagcacaggccacaaaagaaaaaagtagataaattgaacaacataaacactgaatttctgtgtatcaaaggatgccatcaggagagtggaagtcagctcac

SEQ ID NO: 273569 - DNA, 325 bp, Homo sapiens
tttttttttaagtttaatttaaagcaatttgacatggaaaggttattactttagttgccaataaaagctgtacttttaacataagtgtacagtaggccctagggtatgtgactattatcttttctgcaattatgtggtgttctacataaatgtttaaaaaaaacttggaaatatcaaaagtactaacttagatacaatatgaaagttgaataaagagagaacgaaaacccgattattttagacacaacatgggttgaggtttcctcctagaggttatactgggaacaacaccagctggctttgaataaattaattcaaactatat

SEQ ID NO: 273570 - DNA, 497 bp, Homo sapiens
aattatttttaattaatactgaaattttcagtttaggcagttgacactaggttctgccagagttctaggcagaattgcataagatctcaagatgtgtttactccatttattcttcctttttggaaccctttttaagttccaacctcagatagtccttggacatcctaaactgcactttttaatgtggtttatcttcatgccagaatttctagaggtcacaactgtatatttatttttttgtttttgtttgttgtttacttcatgaatgtgtgcatatatgtgtctatattgtgtgtgtacaacttgatgatagagtatgtaagttattaacttgtatgtcagtaaggctcatcttaaagacaatgaacattttaaatgagaacttgttagcccaaatgatcctaatagcatgaaatattttcgagggaggaatatgttatttaaggtatatgttaagcttttataacatattcctcccacccctcaaagaaaaaaaa

SEQ ID NO: 273571 - DNA, 191 bp, Homo sapiens
gggttctagggtggacgatggtgatggccacacatcatagtgaatgcacttaatgccacacaactgtgtacttaaaaatagttaaaaccactcatttcacgttaaagagccttcggtgacagtctcaggtgagctgatgtcatgagcgggagacagtgagggtgtggacgtgtggttcatggtgcagcagg

SEQ ID NO: 273572 - DNA, 426 bp, Homo sapiens
aagtaaataaataaataaataaatattacgtagaatcacagtaagtttctgagaagtttgatcggtcccttggggagtggggccaggctctctggttcttcttggtatgacccaagaggtcatcctccttgaagataaggaaacaactcaccttgccgtcttcagctccttgtcatagaaagtgcttaataaatgacaaaaatatgaaatggggcatgtccatcatctaattactttgctcagagtaacagtgctcagaaaagtgaagatctaagtgtgatgttgcagcaattagacatccataagaaaaaagagcctaactgaagatggatcgtaagccaggcatggtgtcaaatgcctgtagtcctgcctgcttcagaggctgaagcaagaaggtcccttgagcccaggaattcaagtccagcc

SEQ ID NO: 273573 - DNA, 187 bp, Homo sapiens
gggtttgtgaaggcaagataaaactgaagagtttgtttttattcattcaatagatactgagcaccgtgtgctgggaatacagcagtgaacaaaaaagctaaacatctctttctttagagagtgtcagatagtagtaaatactatggcaaaaaagcagggaggattgtgaggaatgctggcggggtgg

SEQ ID NO: 273574 - DNA, 665 bp, Homo sapiens
ctctagtccaaaacagtaatcatgtgactatttaaaattaaaattatataaaatgaaaattgtagttcctgatgtgactgaggaactagcctcatttcaagggctcagtagccacgtggttagtgactaccacatcggtttggatagtggagatattaaacatttccatcactccagaaagttctgtgggacagcactgctctagaatgaagcagtgccgtaggtgtccgaagatgcaagttctgattctaccttctcccttccacacaaacacattctcattctctcttcatccaatctgattctggtgagcaaggaatcccctcagatttaagtttattactctcccaaaggactattcctaaggttctaggctcatagtaaataatgcacatagcttcaagaattctcaagaacccttgtagctgggaactgttttctagataagatcactaccttcaattgtttacaaggtggatttgggcaggcaacagatactttattttatattaagaaaaggtaggggttaaaaataaggcattgatggccaggtgaggtggcacgtgcttgtaatcccagtactttaggaggctgaggcagaaggattactggagcctaggagttaaagaccattctgggtagcatagtgagacctcgtccctgga

SEQ ID NO: 273575 - DNA, 353 bp, Homo sapiens
cgcatgcctgtagttccagctactcgggagcctgaagcatgagaaacacttgaatccgggaggcagaggttgcagtgagccaaatttgagccactgcactccagcctgggtgacagagtgacaccctgtcttaaaataatatataataataataaataactgtcagagagggtcagggttcagaatgaaaactctgagttttgagttcctcactgtccctgatttttatttctgcctattcctgaagctatttatttgggattgcctctctccgtaatgagtcacttatctcccaatcaccacaacttagagcccgtagaatcaccattgatatcaatttgcctctgtcctac

SEQ ID NO: 273576 - DNA, 281 bp, Homo sapiens
attccctcttgcatgggagagagtactttgactaattcaggtcctctgctggaaggttagtttccaacaaaattcctccttcctccacctgtgagttctgattttctacttggaaagaagtgaagaatggggcttccccagcagagggaagccactgatgtctggctacctgtggacaggaagcatctgggattctagtatagttccacaggaagaggcttaaaagggaattccccaccaaaagtctgatgcaggcacttagccgacggggtcaaaaaaaa

SEQ ID NO: 273577 - DNA, 594 bp, Homo sapiens
actcagatgggcaccatcagcgctagacaagaattctattcctcttatccaggcctcccagagccatccaaagtgacatctccagtggtcacctcttccaccataaaagacattgtttctacaaccatacctgcttcctctgagataacaagaattgagatggagtcaacatccacctgacccccacaccaagggagaccagcacctcccaggagatccactcagccacaaagccaagcactgttccttacaaggcactcactagtgccacgattgaggactccatgacacaagtcatgtcctctagcagaggacctagccctgatcagtccacaatgtcacaagacatatccactgaagtgatcaccaggctctctacctcccccatcaagacagaatctacagaaatgaccattaccacccaaacaggttctcctggggctacatcaaggggtacccttaccttggacacttcaacaacttttatgtcagggacccactcaactgcatctcaaggattttcacactcacagatgaccgctcttatgagtagactcctggagatgtgccatggctaagccatccctctgtgga

SEQ ID NO: 273578 - DNA, 572 bp, Homo sapiens
cagtcgacctccagggagctagagactgagatcacagctacatggacaaccactcatgcctacacgatggagtcccagtaagaactctggacactgagacatgggtcagcatccctaactggcaatactttgtgtatatcttcatcacacagtgtgcatgtccacaagtccacagggcgaggacaacagaaattccacacttgaagggacttttccttcactctgctcaggatcctctttccttggctgattttactttgtatcctttatctgtagtaaatgataaccatgaatgtaacagttttcagtgagttctatgagttcttctagagaattctcaaacctgagggtggttttgggaatctcctcaaacttgcacttggtgtgagaagtgaggacaattttgaagactgttctctccagttctcagttggctacctctgttggggtggttaaaatttgcagtggatgacactcataaggataaactttaaatattataaatgtaatattaaaatttattaaaatttaaaatgtaaaatgaaataaaaatcatccatgaccccaaaaaa

SEQ ID NO: 273579 - DNA, 684 bp, Homo sapiens
tggaggtgacttctctaattccctctcccccactgagctctggttctctgctcttcgggagaaccacattagttgactcttactaggtcctagaagttttactccattttctaattacatgctcaggactactccagaagggcttgctattagccccatgtttcagatgagaaaatggaggttgggagaagtcatgtgtccagggacacaattgggacttgggacccagtcccaactgggtcccaagttggaccgggacacccctcccctgccagggcccttgccctgtcttagttgccctgagctacggttcttgtggagggcaacagggtgggcagagggagaactgagctcagccaagaccgccctggcttattttacagcaaatcccagaccaataaggtctttattaataaataaatccgcagtatttctaagaacttttaaaacctaaccatgatactgctgtcatgcctaaaaatacattccaaaatatcaagtatccagggtttaagtgtttctgtattaaattttttttttttccgagacggaatcttgctcttgtcacccaggctggagtgcagtggcacaatctcagctcactgcaaactccatctcccgggttaatgccattctcctgcctcagcctcccgagttgctgggactacaggcggccgcaagctt

SEQ ID NO: 273580 - DNA, 335 bp, Homo sapiens
aactctagttgtggtatgatcaaaaagtacatactattaaaaatgttagggatctaaaatttatatacatattatgtgttaaaattaacatttcaatacaaatacaatagaaaaaggggagcagataaaaaaagaaactggcaatacatagattttttacatgttatcaacatacgaaaataaagtactgaatctgtttaaaatatcaaattctactcatgtgttaaaagcgtgttttgagtagttaggacactcaaaatgctgattacatctccagcacgtagcccgtgctggatatttatatatctgatcctacctatttacaagaaaaataa

SEQ ID NO: 273581 - DNA, 301 bp, Homo sapiens
ggtgggacttgtaaagtgattcatggttatgagtgtagacccgggaatcagataaactgggctcaagtccaactccagcacttactccctgtaaatgatcagtcctttctagaacccagtttccctatctgtaaaaccgaggcaataaaatggagtcatcatctcacagggtccatgtgaagctgagatgtggttaaacatgtgaagtgcttaccctcgtgccctgcatggagcagattctcaatagaaatttgctaatcttggtcaaattctgtccattggccaggagtcccagtcaggc

SEQ ID NO: 273582 - DNA, 329 bp, Homo sapiens
tgtaactaacctgcacaatgtgcacatgtaccctaaaacttaaagtataaaaaaaaaagatataatacccattttgtaaatgagaaaactgaggtctggagaagggacctggacatgtcatttagctgtggattcagactcagagctgcctgagtccagagcccaggcaatctgtacactctactacctccttctattatttttgtaattgagacataacatccgcataacgtacacatgtttacatgtcactatcacccaaatccagggacagaacatttccatagccctagaacccccctgtgggcttccttccaggacagccaccc

SEQ ID NO: 273583 - DNA, 422 bp, Homo sapiens
tggggaaaattgagagagaacaactgtgtcatgaaggcctccgtacagaagtcctgaacagggctaagtggtggtgagatgcttggctggaaaaccacctcctccatcctgcccaccgttctgctgtgctaggaagccagagaaccccaggtgccagggctgcctgccgctccctggaggaagtgctggctgctgcctgtatgtcacatggaaaagtcagtcacaatcagcacattcagccaaaccaccaaacgtcccttctgtccccatggtgcccgtaacaggagcccggctacctgaacctcccgacagtgaggaaagactgactatagacgccaggcgctgaaggccatggcatgtgaaatgtggccgggaggaaggaagagggacttgacatttgtaatgtacttgcacagcagtct

SEQ ID NO: 273584 - DNA, 187 bp, Homo sapiens
gggagaggactacccccaaaatttgatcatccaagagtaatccagtgtatacaaggcccagtggactttaagattccaaaggagaaatatgagagtgggcctgagtgagcctaggatggaactcgaaaagtaaattagaagtcttggccttaaaggatctccagggatcatggaaactgagtggaat

SEQ ID NO: 273585 - DNA, 435 bp, Homo sapiens
tagtctgacgtagtacatgtcacgggtggaagtcttttgggttactagaaacatttaaaaataaaatctcttactaaaattgaatattgtcatttgagataaatcctagctaccagtaaattcacttgaggaattgctggatattttgccgtgctatacctttgatttctatgtatttaaaccaaatttttagagattggctcttaagttttcctttgtgatttgtgaaggtgttaccagatatttttagaaaagcaacaaatatacaattactgtgccatactatagcgtactatactatactatactataccataccatactgtgacatatactacatacaaatgcagttagctctctgttctgcatctgtggattcagccaactgcagattgaaaatattcagggaaagaaactaaaaaataacaatactac

SEQ ID NO: 273586 - DNA, 525 bp, Homo sapiens
cagctaagcatccacaggaggtcacacacaggagacagaccctttcaatgtgatctctgtcggaagcgcttcttgcagccctcagacctccgagttcaccagcgagtccacactggcgagaggccctacatgtgtgacgtctgccaaaagcggttcgcccacgagtccaccttacagggccacaagaggatccacaccggggagaggccgtttaaatgtaaatactgcagcaaagttttcagccacaaggggaacctgaacgttcaccagcgcacccactccggagagaagccctacaaatgtcccacctgtcaaaaggccttccgtcagctggggacattcaagcgtcacctgaaaacacaccgggaaaccacctcccagtgattccagagtcaggtccacatcctccaccccaagagacagtgaatgatggtttttctccaatgttaccagatgacatatacacataaagcacttggtaggaattgcccggatgtttgaataaatatttatcctcccccatga

SEQ ID NO: 273587 - DNA, 576 bp, Homo sapiens
gtatttttagtagagacggggtttcatcatgttggccagtctggtctcgaactcctgaccttgtgatccgcccacctcagcctcccaaagtgctgggattacaggtgtgagccaccgcgcctggccagctttgtgtttttaaaaagttgtccttcattaagggagggaaattgagtaattgtcacaattctaaaagctgggcctctctctgacatgtcttcttttctcttgaaaagagatcttttgtccgatgttcagaatcagaaaagacaatatctagatcataccttagaaatgatatccttttcctaagaaccgaagaaaaaaacgataaaagccccggtgaggttttgcttctttcttttgcctttctttccaatgactttgcaaggcttaagacaaataactattaaatggaaatacatacatttgtaatttaaaaatttaaggaaaactaaacagaaaccataaaatcaagattcaggtaaaggtggaatgaggaaatgtagcttcatacagagtgccttaagtgtgaatacaggtgaataaatatgtaagaatgtatgatgtacttaa

SEQ ID NO: 273588 - DNA, 155 bp, Homo sapiens
taagggtaaaatgtgacattgtgtgtcaggagcttagcacagagctggcagaagaacccaataaatgttaacaagacaacagcagaagcagcttggctaaaatgcagatctagcatagggttattagggcaaaagccaattattatattttatcg

SEQ ID NO: 273589 - DNA, 280 bp, Homo sapiens
gataaatatttagtatcctcctatggtcaataaatttgaattatttcaacagtcattgcaaatacattagcaagtgcctaaagttgtaactccataggttagtaaaaagtttcaagggacaaagtcaatagtagaactgaagtttattcgaagccttggatcaaatatccctttaaaaacttgcattctaataaatgaaatcagtgtaaaatttctacttatgccttttcaggttcttaagttccattctgtcatacataatatccttcctagaaggtca

SEQ ID NO: 273590 - DNA, 466 bp, Homo sapiens
gcccggctctgcgggcagctgggggcggcgcggggcggcgggccggtcagtagtcgagcttgttgtataggttgtagagaggtaaggccgagaggttgcttcccgggtagtagagcggcgcgggaaaggcgagcgagcgcggcaccggcacgcgcagcagcgaactgtcccggaacaccagcggcatgctcaccagagtctgcgccgacgcgtgcgccatgttggccgcctccagctcagccgagagctgccgcttccacttgttgcggcggttctggaaccaagtctttacctgggtctccgtgagctgcaggctggaggcgaggcaggcgcgctccgagctgctcaggtagcgcttcatgtcgaaggtggactcgagctggtacacctggctgcgcgaaaagacggtgcgcgtcttcttcttggccgcgccggcctgccgctcagcgccgccgtcccgcggccg

SEQ ID NO: 273591 - DNA, 136 bp, Homo sapiens
aaaagtactttttcttttataatatgcaacaataactttctgtttagttaattagttttaaagcaagcttaaacttataatttataaagaatcatatttgctccctatcattgttttatagctggggctatactga

SEQ ID NO: 273592 - DNA, 376 bp, Homo sapiens
ggtagaatatgctaatttcctagagattctgttacttttattttcagtactaagccctggtaaggacttaactgagaagtttttttgttttggtttattgaatgctctgtaaaaatccgtcttttagtttttttttttaatcagtccctctaatgttaattgtggaattcacaaattcctgtctctgcagttttcaagacatgtctttccaaaacgtccccgtggattatttaaatcattcttattgtccctttccaggtattcttaacacatttcaggagtgaattatcttactagtttttacttgacaaattatggtttagaactatgctttccagtgtggtggatactagccctgtgtgactttaaattaatc

SEQ ID NO: 273593 - DNA, 587 bp, Homo sapiens
ttatttgatccttacaaaaattctctgaggtagacagaagaggtttcttccctgatcacagaagagaaaacaaaggctcaaggaagttaattattataactattctacagctaataagttggttatgcagtcattaagtctttattgaacatctctagcatccaggcattgggttaaggaaccgggactcaagttcaaatgaatcacacctcagtgttgtttctcttatttggagtagttctttaatgcatcagttttaaaagactgaaagttttaaacttagggtggctttcttacaacttaaaactgtttaatagagaattcttaattcacatagtataatataatatacccagcaacattctgcaacaggcgtaagccaccgtgcctggcctaagtgaatactgcatttatgagtgaattgatataaaacacatgcttcacagtccgagtaaccacaaacatcagtttttaaaaacaatttgaatagttacacagtcttcattctgtcagcttcacttccttagggttaaaagacacagatattttatgaagatcattaaaatagctggtggtgcaattcaacg

SEQ ID NO: 273594 - DNA, 583 bp, Homo sapiens
ctcaacatgctgaattgtttgataaagaccattctgggggtcagagggccctcctgatctcacagctagaaatgcaatgactatgtctgctatcaccactgttactactgagaacatgtctcgatgaaagcaattctggaaaataggggagcaaaagaccctctgtttgatactttgaggggtcttctgtggcataatcttcccaggaagatcacagatttccactgctgctctaatttaacgggattcactctttttctgtacctcctgtgtgccaggcccagagctaggcaccagggatgcagctgtgaacagactttgtcctgtcctcatggagtttataatttggtggggaagacagacaagtcgatgggaaaccacaacatggtaaaaagtgcctgatagcgaatgcacgagcccatggatgtacaaaagaaacacctaaacaaattttagaggtgaagccctggaagaaatagaagatcataccactgcatccagcctgggcaacaaagcaagatcctgtgaaagacagaaagaaagaaaagaaagaaagaaagaaagacagaaagaaagaaagaaa

SEQ ID NO: 273595 - DNA, 186 bp, Homo sapiens
aagttcacattttcatttgtttgtctttgactttcctaggcattgcatttaggatctgagtagggttttgtatgtttcagttgggccctgacactatgtatggaatatatatttcttttacagggatcaacatctgttgctgcaataatgttttaattaaataaaatttgtgggaaattatgactt

SEQ ID NO: 273596 - DNA, 404 bp, Homo sapiens
aagtgctgaaactctccctgtctcctttcctcatttgcaaacttggcttaataatgatagctacctcaaaaagttgttgtgataattaaatgaatgtcaagctcttggaacagtgcaagcgcttaagaaatattatgttggtgcaaaagtaattgtgattttgccattactttcaatggcaaaaaccacaattacttttgcaccaacccagtatttgctattactagtcctggtcagctgagcatggtggctcatgtctataatctcaacactttgggaggccgaggcaggtggatcgcctgaggtcaggagtttgagaccagcctggccaacatggtgaaaccccgtcgcaactaaaaacacaaaaatgtgctgggcatggtggtgagcgcctgtaatcccta

SEQ ID NO: 273597 - DNA, 355 bp, Homo sapiens
gctgggctggagagatcagtggaggatctgggctataatcagcctcagcaggcagaagatgaattgaggccctacaggccaccttctgcaaagtgaggactgagagtacatcccaagaagatctgcagtggggccagcaagtgcttgtcagagacttgggtaaagatgggtaggtgaattcagcagtgctgtttagggagtctcagaaattgtgcctatgctctgatgccccagcaaccagattaaacataactaaaagggactgttaaagtctagaacatcatgtcaaaaaagaagtttggtggctctttttatatgaaatggcctacttaaaaaaacaaacaaacaaaaaaca

SEQ ID NO: 273598 - DNA, 290 bp, Homo sapiens
ttttttggagaaggagtctcactctgtcgcccaggctggtgatgtacagtggcacgatctcagctcactgcctccacctcccaggttcaagcgattctctcgcctcagcttcctgagtagctgggattacaggtgcctgccaccacacccggctaatttttgtcaaataaaaaaatttgtttcaattttttctttgtatttagtttaatgctatctccatttctctctactccctatttcgttaattttctaagatttttctggcttgaagtttcattgcattaaaaacg

SEQ ID NO: 273599 - DNA, 510 bp, Homo sapiens
aatgctcccaagaagcggagagaagtcatgacgttacaagaaaaagttgtattgcttgatttgtaccatagatagaggtcttcagctgcaggtgctgccatttcacaaagaatgacttagcatatcattgtaaaacacataaaaggacagaaaaatctattcatgaagccattgctatagctacaccaacaggcacaaaaactttatactttttgctaaataccttttgcagcctttatgtgggtgcaggatttctataaggaaggcatacctgtagtatccaatgtgatttgaggaaaagaaaagtcattatatgacaacttaaaaggaaagcaaaggatatagcactggagaatttaatggcagcaaacgttagtttgaaaagtttagaaagagatttggctttaaaaatgacaagataacaggagaagtagcttttgacgatcaagaagtagcagtcaagtcaggttcccagatttcattaagaaaatcattgaggagaaaggttat

SEQ ID NO: 273600 - DNA, 466 bp, Homo sapiens
ctgacatttcattgcatttctgaagactgaaatggcattaaataaaagttgtgtgtgaatttgatttacgtgtacttaaaaacttcaaagctgcagttaaacaatccccagtgttcaaaaactattttattgttctgactatattatgaattttatgttaccatttattttattaatgttttctttaaaccattggttttttgacattaaaattttcatttattatactaagttttttatcatgtaagaccaaatccagtagttcattttacaatgtttctttctctcacaatgctgctaaagaaatggctatcattttgaatttacaacatgccaaagaagacatagaagttatatttatttttgttcttgttaaaactctgtgagcaacagttctcaagatatgttaaattactggcattctctgggtaccaaataaaaaggctgcaactttctaacattttta

SEQ ID NO: 273601 - DNA, 481 bp, Homo sapiens
attatctatacaccaaagccccaggacagacaatttacccatgtaacaaacgtgcatacctaccccttaccttcaatctaaaataaaagttggggaaaaaaaaagaatgtttgacagtttgtcagaccataaatccataaaaactgctcattctatattgtttcagttaaattattttcacattaaatttttaaaaatcatttatgaatgctacaaagaaaactattttaaggcccctcaccattcaggtttatcctcaggctgaatagctaaacattgttcttgattacccttctatgctttatttatttaagacagggtcttactctgtcacacaagaaggagtgcagtaggcctggtgcagtggctcacacctgtaatcccagcactttgggaggcagaggcgggtggatcacctgaggtcaggagtttgagaccagcctggccaacatggtgaaaccacatcgctactaaaaatacc

SEQ ID NO: 273602 - DNA, 442 bp, Homo sapiens
tggtctctgagtttccttagtatttattgatcactatctttactatctcggtgagggggatgtggcaggactatagggtaatggtggggagagggtcagcaggaaaacgtgtgagcaaaggtctctgtgtcataaataagtttaaggaaaggtgctgtgccttgatgtcatgtaggccagatttatgtttgagtttacacaaacatctcagtgtagtaaagagcaatattgccaccagcatgtctcacctccagccataaggcggttttctcctatctcagtaaatagaatgtgcgatcgggttttacaccgagacattccatttccagggacgagcagaagacagatgccttcctcttatctcaactgcaaagaggccttcctctttcattaatcctcctcagcacagagtgtgaccctttgcgggtgtcgggctggggga

SEQ ID NO: 273603 - DNA, 430 bp, Homo sapiens
ccattaagaggaataatatttccaacctggctgcctaaagtagctcctctgtaagatctttccggaataagttggttttccccagttctgaacctcaaattagccttagggaacctcgtcttgtgaactttcaaagctagcatttctccatagctttatattctgcataaatatttgttactgttttttcatttgatacactttttaggaccttgtgttcttattcagtggcacatagaaggtatttaatgcatgtttttggatgaatgaattaatgcaaggatagcatactttcgaactgcctttctctacagatttaaactaactttaagtattaacctaagcaatgttttgggaaatgacttttttgaaaacaaacaaacaaaaatactggacaattaaaacagcctgaatatctgagtacaaataa

SEQ ID NO: 273604 - DNA, 519 bp, Homo sapiens
tttttttttccctcaaagagttttatatagttttagctcttaagtctttgattcattttgaattaatttttatatatgctgtgaggtagaggtccaacttcattcttcttgcatgtggatattcagttgtgccagtacaatttgttgaaagactattctttcctccactgaattgttttagtacctttgttgacaatcagctactgatgtatgattagtagtcttttgtatttccctttttaaaactgaatttgtagtttttccttatttcttttaggatattttaatttttcatttataagaatacttaactcccacattatcatttggcttctcagatatttagaggcagcacaggtagtagttgcggtggaaactatttgttgttgtccgccaaatgttatccctttcttcctgggcacatgctgtgggactacacttcctagcctccatacctgctgtgagattgaccacgtgactaattctctctaattcagtgtgaacagaagtaacatttgc

SEQ ID NO: 273605 - DNA, 364 bp, Homo sapiens
tgcaaccatttctgacctttgatattccagaatagctgattgcttttctttggcattttcactttgctaagaggagaatgctagttaagggatagagcagaatagctctaacgacaagagctgccaccagttacccttccttgtgcggcacttagaatccttttaaataaacactgagggttagtctaaagaatattagcttaaaggggtgacaaataattaactggtccacagtacctcagtctgatcttgtttctacttcttagtttctgaaaatatattgttcgtccaggtaaaatgaaaacctcaaagtctccctctcaccatttgcttctaataaatatgaccaatttttaattattga

SEQ ID NO: 273606 - DNA, 920 bp, Homo sapiens
ccctgtctctaaaaaataaaccacagctcagcccactactcacaacatccctgagttgctattttccacaaggcttccctttgccgaggctcagccaggcagctgtgccatatctgaggaccccggggtggctgccatcagctggggtttggccgagaccacaacccctgcccatgggctctcagccctcatcggtctggccccggcttctctccatcacagtggtggccttcctctctccatcacagtggtggccttccaagaggccaggcatggacacaagcacctctccctccacatggtagcagccaaagcaaaccacaggccagcacagctccaggcaagagatgaggacaagccaccaacccggcctgctccaaacgccaagccctgctgtgacccatgtgtgcagtgtgcagtcacagccccgcaggggtgaggggacacttcagcccaggacgtctcagcagggagacagctgagttgagacattctcaactctgagctgagttctcttcttgctgagaactctcctgtctctatctgaatgtggtgctctctctctctctcaatctctctctctctctttccatcctaactttatttctggaaagctgtggtaagaaaatgagcagggccacgcacagtggctcacgcctgtaatcccagcagtttgggaggccaaggcgggcagagcacaaggtcaggagtttgagaccagcctggccaacatggtgaaaccccgtctctactaaaactacaaaaatagccgggcgtggtggcgggcacctgtaatgccagctactcaggaggctgaggcaagagaattgcttaaacccaggaggaggaggaggtcgcagtgagccgagatcatgccactgcactccagcctaggtgacagagcaagactctgtctcgga

SEQ ID NO: 273607 - DNA, 550 bp, Homo sapiens
cagatttttgtgcaggaggtgtttgatgaatggaattgagaggttgactcctctcttgagtgttgaagctccagaaaacatataaaggtgactttctctcatttgcatcaagtattctaaagataataataatattgtctcgtatttactgagtattcactatgcattgggctctcattgaagacttcttctatgtcctactcacttaatccccacaaaaaccctattgttagttaaatgctatgaatagtcttatcatacaaatgagtaaactgaggctgggcacagtggctcacacctgtaattccagcactttgggaggctgaggcaggtgaatctcctgatgccaggagttctagaccagactgaccaacatggcgaaaccccatctctactgaaattacaaaaattagccaggcatggtagtcccagctactagggaggttgaggcacgagaattgcttaaacctggcaaggggaaggttgcagtgagctgagatcgtgccactgcactccagcctgggtgacagagcaagaccctgtctcaaaa

SEQ ID NO: 273608 - DNA, 650 bp, Homo sapiens
taaactcaaatgggaggctttatacaaaagagaatatctagacaccactctggaaagctgcttctaatttcttcagcctcagaactctgcctctgtgctagactgtggaccaagccaaagctagtcagtaatgaaggcagtcatggcacaggacttgtgtcaggtttatcattaagttccttttaagccagctatccagaaataggttcatcccaaagctgggaaaacaaatgtcacacacaataggagtccatttatattcattgaggaagcatcagtcgaagttttagaacattttaaaagaagcatattttgttacttttgttatatgcagtaattttttgaattgccaattaaagtgggcttttaatacttaatacttatttgtaattggctcattattcttcattgaaagtatttgagaacatctggatcttaggtaaattcatggatttataacaacactttttcctgttccttttgtgttttttctgtctcagtgaaaaaccgttgtctttttccaaagccaaaaattcggaagccatccttgatgcgtttttctcccccgtctgccccaaactaattagtcaccaagttccaccaactcttccccagtagaggttcccacacaccccataaacaccataccc

SEQ ID NO: 273609 - DNA, 660 bp, Homo sapiens
acttatatttgcataatgacttttctcttgtttccaaacaactgctgtagagcagatttgaaggcatctttgtttggggttaggcagagccctgtaagtaagggtggaggaactgcactctatctggtatttaaattccaggtaagttaggactgatgcctggtgtagaatgctcaagtgtggcccagatcagtgtggcagtggtgtacatcagttgatgtcaaaagatgagttatacccctggacttcataagcatcagaaagctcttctcccttttgttacatggagggctatgataggaggggcacatttggaggtgactgggtgagatatgaagtttgtaaaaccgttgtgagagttcccctctctgattcaagcaaggatagggacattgcctgactttatggtgttcaccattccatgataaaatctattgaaatctcctctgaaactaagacacctgagggactatgactactgaaaaattgagttctgaaggccaacagttattctcatcactatattgccttaatgttaagataccatcaattataaaatacatcattgattttatcatagcttttcagggggagaagagaaataatacttcattaattaatttttagatcatctgatttcagaaatactgaaatgcaaaa

SEQ ID NO: 273610 - DNA, 373 bp, Homo sapiens
ccagaggaaaggtctccactgactgtcatggtgagtgaaagctgtctctttttgaccaaggatgatgtggagcttggttttaaatgtatcatagagaactagacccataggactcaagtaaaggcaaaacataagtatttcaggaacatgaagggccagtgctctgtgaagctctgcctaaagaccatgcaaggagagggcagcattgctcccctggtgaataggaggaatttccagaagaaatgcagattaggaatatatttaggtttttggtcgcatctctgaacatagatacacacacatgataccagaattgaatatttagcattcttttatcctatgctatggaagagggaaacctgtgtggagagga

SEQ ID NO: 273611 - DNA, 384 bp, Homo sapiens
gctctctgctaaagatagtagaagtccagcctctcccagagtcagactggtcattggtcatctccactcctagaagagtttcaaacatctgtactttcagactggaggaaataaggacccagtggttgtactggagaattttatccctaagccctgcctgacaatacaacgaaactgacatcaaggacgagtgaagaaacaatgaaccagacagtctataaccagcatggaacactattgtaatgcagtctccaaaagggcaggaattttcatctctcttgcttacaaccgaaactccagcatctgaagcaatgtctggggaatatcagccactccgtaaatctttgttgagtgaatgaataaatgagtacgagaaagaaggaa

SEQ ID NO: 273612 - DNA, 543 bp, Homo sapiens
tagtaaaaatggtactttataaggagaagctgaaaaaataggaaaccaaatgcatattggaaataaattatacaactaggacaatggagcaaaataagagattaaagcaaagaatcaggaactatcttgaaaataaatgatgagttcatataaataggaaaaacatttgtcaacaagtggtttgtgggaatctaaaaggttttcatacctcagagcctgagttttttttttttttttttgagaccgagtttcactcttgttgctcaggcagaggttgcagtgagtcgagatcccaccactgcactccagcctgggagacagggcaagacgccgtctcaaaaaaaaaaaaaaaaaagaaagaaagaaagtgcttctgcactccagcctggacaatagagcaagactatctaaaaaaaaaaaaattaaaaatcaatatcaaaataaatgagtattctcataagcaagacaagcctaaagaaatgtgagtactaactgtaatgtggttacatttagagacacatgaaaaaaaataaataaaagaat

SEQ ID NO: 273613 - DNA, 188 bp, Homo sapiens
aaggccatagcatgaacacagttctccacattctctcagtgtaagccactttgttcccagaggaggaaagtgctgctgctgctgcaatagatttgtcccttcagataccatggcatccactcaaatgcaagctgagtttactacatgagaagttctgacaaatattgggacaggagcaactgggaaaa

SEQ ID NO: 273614 - DNA, 565 bp, Homo sapiens
aaaattagctaggtatggtggtgtacatctgcaatcccaactactcagaaggctgtggcaggagaattgcttgaacccggaaggcagaggtagcagtgagccttgcgccgccgcactccagcctggataacagagcaagactctgactcaaaaaaaaaaaaaaaaagaaaaatccagtatccttttagacctttggctccaaggggcatccatcccctgataatgaagtatggattattacaatcctatcagtcccaacgtaacacccccatttttcctgttaataagccaaacggggaatatagatttgttcaggatcttagggcagttaatgaggcattagttccagtcacccaatagttcctaatctttatacaataataactcaagtccctgaagatgcttattggttcatagtattaaatttaaaagatgttttctttcacacacctttacacctggacacccaatacatttttgcatttgaatggactaatccagacactcatgctgcatctcagcttacctggactgtcctgtccccaaggttttaggacaatcccca

SEQ ID NO: 273615 - DNA, 482 bp, Homo sapiens
gaggttataaattagtatcctgtggttggaatctgacccatagatctcttttgtttttgccaatatgttgtttttaaaagtttgatttaattgtccaaacttaaaaaatttaaaaatccggagatgcacacaaaactctgagtatcctctttctttccttctttctctctctctcttttcttttcttttctttctttcacagggtctcactgtgttgcaatcatggctcactgcagccttgaccacctgagctcaagctatcctcccatctcaacctcctgagtagctgagactacaggtgcgtgccaccatgcctggttaatttttgtatttttagcagagatggaatttcaccctgttgcccaggctggtcttgaactcttgggctcaagcgatctgcctgctttggtctctcaaagtgctgagattcaggcatgagattactgtaatcgctctggcctgagtctccagtttcattgcaa

SEQ ID NO: 273616 - DNA, 474 bp, Homo sapiens
tacagattaggaagcagatgagtcagtcagagagataaggcagaaaagatgagagaatatggcagattcaggagtcagagagattccaaaggtgaggaggattggatgcacccatggctaacagccagcaaggaaacaggggcctcagtcctacagctacaaggacctggatacttccaacagcctagattctaccacagagcctccagatcagagcccaagccatcaacccacaccttgattttagtcttgtgagactcagagcagaggaaccagccgagctacccaacttcctacctacagaacaattagatcatacatttgcatggcttgaagccactaagcttgtggggatttctttcagaaataatagaaaatgaatacagaaacctgatcactttcacataaaatattaaatttttggcaaaataacacatacatttggtaaaaaataaaacagtacaaaaagaacta

SEQ ID NO: 273617 - DNA, 131 bp, Homo sapiens
cccgaaaaggaaaagtagacaaaatgtgtttgaacaagaatgcttttgacagacttaaaactgactgattttatatctcttactatggaaaagaccacaagaaataacctacattataaaggaatacataa

SEQ ID NO: 273618 - DNA, 205 bp, Homo sapiens
atgggatacctggacctgggggtgattagtacagggagatagtggcttgatgtatgagttccataaaagaaggttgatgggccagatgcggtggctcacgcctgtaatcccagcactttgggaggccgaggtgggtggatcacaagttcaggagtttgagaccagcctagccaacatagtgaaactctgtctctactaaaagtac

SEQ ID NO: 273619 - DNA, 613 bp, Homo sapiens
ccatcaaaaaatgaatcaccttccatactagttagaagctgaaggagcacgatttcctcatgctggttgggccctgtttttggtttagaaatgatgtttcctttgtattttccctcctccagtgacttggaagtcattccttcagactttaattctcctgggagattttatttctcccatgtgcccagctccacctcaatttcagattaagctcagctctgttgtcagaagaatgggaacccctcttctcctctgcctgaccgcggcccgttaaataaatagcaaggaaagcccatcattctgattatgttttgttgccaccactcccttgcctgtgtcccagtgccaactgctttaacaggagcctgtagctcaccctaagcaggggctaccctctccttttcttttttcattgatttttagagacaaggtcttgctttgtcacccagactggattgcagtggtgcaatcatagctcactgcagcctctaactcctgggctgaggcaggagagttgcttgaatccaggaggcggagcttgcagtgagccaaaatcacgccactgcactccagcctgggcaacagatagataccccgtctcaaaaaaaaaaaa

SEQ ID NO: 273620 - DNA, 274 bp, Homo sapiens
catgcgcacacacacagtacacattcacacaaaagtcacactcagacacacataatacacactcaaaataacacacagtacacactcgcacaaaaatcacacacaaatacacactcacacaaaaatcacacacaacacaccctcgcactcacaaatacacacgcacaaaagtcacacaatacacaaaaatcacacacacatagtacagtcttaccccaaatcacactcacacgcaaatacacaacttgcgcaaaaatcacactcacacacaata

SEQ ID NO: 273621 - DNA, 480 bp, Homo sapiens
ccctcttctcagtcaggtatacctgttatcctgaccttcaggctcagtcccctcgcccacccctagttctaaaatcagccccggccttgaatgcggcaatatgaagaattggaatcaaagtcttactattagttcctgtatctcctgccccaattctgaatctggcctctgggcatgttgggcctggcttcttggctgctgatgtccaggatgagatctgatcagttaaggaaatattttatacctggttcccagctgtgttacccaggcctccagcctggacatctgatgcccctggaatatgatccagcctcacagtgttgacttctgctactccctggttctccttgttcagaataagatctgaatgaatagatttggcctaaaccgaaactgtctacctgcccctccttgcccacgctgagacctcagaacaactttatcccccaaccctgaagagaattgtatggtgatctccac

SEQ ID NO: 273622 - DNA, 436 bp, Homo sapiens
gcgctggcttgaacgccaggaccgagcggaacttcccgcccggcgcgatcggtccgcggctctcagggaagtgcgtacgcgcgtccctcgggaaagcagagtaatttgcctgtttctggcaaatctgaagattggaatgccacacggcccagccattccttttccaggcatatgagaagccctcacacatgagcaagaaagagatgtggccaaagacattcatggagcctgttaaaaaaacaagaaaaagaaattaagaaatacccagcctgggcaacatagggagaccctgtctctactaaaaataaaaatttatacttgggaggctaaggcaggaggatcacttgagctcagaagatcgaagcttgcaatcagctgtgatcgtgtcactgcatgccagcctgggtgacagagagtgagaccctgtatcaataaa

SEQ ID NO: 273623 - DNA, 346 bp, Homo sapiens
tggttaaacctagttttggaagagaaaggatgggaaatcttgctgaaatattttttttaaagttactatataattgtctgtattagagaataaaaattgtactgagttgaagagtgtccctccaaaatccatgtccaatcagaacctaaaaatgtgttcttatctggaaatagggtagttgtagatgtaattggttaagatgaagtcatactagattagtatgggccataaatctaatgactggtgtccctataagaaggctatgcattatggaaaacagtatggagattcctcaaaaatttaaagataaagtaccatatgctccagtaatcccactgctagatat

SEQ ID NO: 273624 - DNA, 500 bp, Homo sapiens
agaggtttgagaaaatggtgggtggctaagtggtagttgaggtggaggaagagggcttcctgtcccagcccaagtccctgttgggatatatgaaatttagggatgtatgactaagcccttaatataaccgtaagaggaaagagatgtgggaacttgagtccaaccctcccaagtagggagtgcagatagttttaaaaaaacagctttctttttggccaggcgcagcttaggcctgtaatcctaaaactttgggaggttgaggcaggtggatcacctgagatcaggagttggagaccagcctggccaacaaggtgaaaccctgtctctactacaaatacaaaaattagctgggcatggtggtgcgcgcctttaatcccagctacttgggaggccgagtcaggagaatcgcgtgaacccatgaacccaggaggcggaggttgcagtgagccgagattgcgccactgcactccagcctgggtgacaaagcgagactttgtctc

SEQ ID NO: 273625 - DNA, 205 bp, Homo sapiens
tcggataccttgggtaacctattacctgaatattaaatatttttgagaactcacaccattgactataaagtgaataatagctaattcaagtctcaaattagtaatgatatgaaacagtagtaataatgcccttagtggtattttttaaaatgtggcatggaagtagggctttttcgttatcagttaaccacttaacgcaaaaaaa

SEQ ID NO: 273626 - DNA, 350 bp, Homo sapiens
aagaatgagggagagaggtctaggatgaagcttgaggagtaggtaggagctatatacatatatatatatatagagagagagaattcacataccatacaattcactcatttaaggtgtacaatgcagtggtttttagtatattcacagatatgtggagccatcatcacagtaaattacagaacattttcatcatcttagagagaaatcctgtaccctgtagctatcccccacaatctccttattccccctaggcctaagcaaccactgatctactttttgtctatagatttgcttattttggacattttatataaatggaataaaaatacaatcttttgtgcctgaaaaaa

SEQ ID NO: 273627 - DNA, 548 bp, Homo sapiens
gctaggatttcttatatggatctgccttagtattttgaatcaggacctcaaatgagatttttggatgttcatgtgtttgtggcacgatgttgaatcttgaaccttcctgtctttctaattgttagaattagattcttcaagctagacttgattgggctagtattactttaggaaatgttttaatttattatttggggaatgttttatttattatttttagtttcttatctaaggaagattaagctgtttgcagaaaatacagttttctttagctaccctgctcacaataccatctacactgtgtctgtacctgtgtgacaaggccaagcactccataactttacccggattgtttggtctttttcaaaatgtttagagtttcaaaaagaaatttgtgaagttgcttctcttaagtagctactactatgtttttaaatgtgttgcagtatttctattagttgatcttgtgtgtagtcattcatatctgtcttttgattctatttcttggtgatcttgctttttaaaatcaccatttaccttaaaaaaaa

SEQ ID NO: 273628 - DNA, 384 bp, Homo sapiens
aagaaaaaaaaagaatgctggtgcaaaacagtgttcaaattaaggtattcttagacaccattaatcgccaatgaatataggaataaattataacacataatagaagaacaatctgatggtatgtagtaaattttgtttaaataaagtactggaattttacatgtagatttaaaatctttcttcacctaaattaagactaaagacaaagaaggccgggtgcagtgtctcacctctgtaatatcagcactttgggaggccgaggtgggtgttatcacgaggtcaggagtttgggaccagcctggccaacatggtgaaatgccgtctctactaaaaatacaaaaaattagccaggcgtggtggcacgcgcctgtgatcccaactact

SEQ ID NO: 273629 - DNA, 305 bp, Homo sapiens
ttaacataactatttaatataatttatcagagcattttattgtataacattttaacaattcattgaaaagaataagccaaagcaataagttaactaatatgcaaatacctaaattactaataaatgctcgtactatattgaaaactaactctgtctgctttaaaatacatgattttatatttgtggcaaactcctctgtaataacgttgtactttagctcagaattgggcctgatagcaagacatactgtgtggtgggccacaaaaatagctttggacatagataaatatatcagcataacctga

SEQ ID NO: 273630 - DNA, 328 bp, Homo sapiens
cagtttctcgcaacttccattcattctttcctcccagaacatggaaacggagcaaggggagggacaggagctctcagtcctgccttcaggagcgcccagagacacgcttcacagaactgggtcggggtgctagggatccaggtcaggagggcctcgcagatgcccagaaggttcggaggaagcagctgcagtttccggaatgtgccaggctccctggtgcttctgagcgtctgcaagtgtggcccccctgcctgaaacacccccaccctcctgctggtctggccacctcccagtcagccttgtccagttaccttttcctgcctcactt

SEQ ID NO: 273631 - DNA, 392 bp, Homo sapiens
tcctcaaatgcgtccagctgcaccttgacccaagcatgcttcccccatagggtgctggagatgatggggtgcctcttctcacccttctcccagtgagctccagcccctgccacaatgtttgctggtgttcacctatagcctttgcatgacacccagtgacacattagcccttccagtcctttcctgtggttgtttttcactgaatacattatgactatctttctacataagtaaccattacataggaaaacattgtcttttaagaaatgactgcatagacatactagaaggtaatcaaccaatccctactgactagttgtttccaacttaggtcctttcaatttttcacaattaaaaacaatacagttggcagtaaataatgtacaaacatc

SEQ ID NO: 273632 - DNA, 360 bp, Homo sapiens
ttaaaaacataaacagggctttgattgctttgcagaacacaggggaacagaaactggattctataatttgaggtgatactcataattatctatactctggaagaaaagatgaactagaagtaaactaaaaagatgaactagaagtaaactaactttcaaaaggactgaaactcagcttaaaatcctctcattactgaattggattaatgggatcctaggttgctaatgccccagctatcatccagatgcacagataaatcctttctgaagacatggtaacattcttctaacttttaattttttctactatttttcataaccaatttcaggcacttatgcaaaaataaccaggcatatgag

SEQ ID NO: 273633 - DNA, 291 bp, Homo sapiens
ccgggattctgtgattccaacaggcctggcttgtctctggtccacgacatgtggggcctcagctgggaagacatggagtcttaagtgtgatcagtgggagggggctggaatcatttagaggcatcttcattcacaaaaccaggagctgatactggctgtcagccaggacttcaactgacctatgtagaacctgtccatgtggcccctccttgcagtctccccatttgggctggtttgggcttcatcacagtccggcagcttacttctaagggcaagcattccacgacaaca

SEQ ID NO: 273634 - DNA, 423 bp, Homo sapiens
ttggatccagttttccttaaatatcttttactgtgacttgtttgaagtacagtgccactgtcagagtaacaaccttcgttgatcatgagcctcatcatttgggaaaagcatgtgtgttgtctgggagagaagctttgggagtttacagttgacaatgagggagaactgtggggcccttctatcaacactaaagggaaatgggaggagagacatagctagattgttcttatattctttttttttctttttttttttttttttttggagatgatgtctcactctgtcacccaggctggagtgcagtgaagtatgaagtgatcacagctcactgcagcctggatctcctgggctccagtgatccttccacctcagccttgggagtagcttagactgcaggcacataccaccacaaacagctaattt

SEQ ID NO: 273635 - DNA, 477 bp, Homo sapiens
cacctcactcagcctttgttgcatattattaaggcaaactcatatgattgatatggggagaatcatctaattattataccaaaattagcattattaaataattgtattcatttattaccaagtttatttattgtaggcttttgggaaaataaatccaaagaaaattatgttcttacatccagttttttaaaaatacggaaaagtcatttcttatatattcctgaggttatggtgccaaattggtgggtaaaattggctaataccctttttttaaataaacatttttagcttgagaaatatgtgagggaaaaagggaagggaaagaaaaaggggaaattaatatttgtcgttcttgttcagaaatatcaaaactttttatgaacgttgtagactaaaaatagttatttactcttataatgttgaagggttgggataagcagatcgttttcagtttaaagttctgtgccaaaaaacaaa

SEQ ID NO: 273636 - DNA, 301 bp, Homo sapiens
gcagtgaagtcttcatacatggttactgcccaggaacctttaaaactcggcttggttttgcttctaactcatgggggacttcagtagcttctgagtgcagctgaacacttgcctcttgatttcccctgtgagctggtgcctgcccacctccatcctcaaccacctgcatcctcatctcccatttgctttagtcacacaggcctgcttctgttctttgaacacactcagtggtctcccagttcagagcctttgtggcttttttccctctttctacaatgatctttccccagatagttgtatt

SEQ ID NO: 273637 - DNA, 914 bp, Homo sapiens
gaaaaaaatacattttatcatccaaggaaatgttatcagtaaaaagaatagctctatctccaaattaaatattgatatctttattacccatcttaaagaaattttttaaaatcctgagactcagaaaattaagtcatttaaggtttcacaccttgttactgttaacctagaccatgttacaaagtagttgatttctagtctaatttaacttttgctattatatctcccccaccaaaaaccagagaggcatgctgctttcattagtgatccacagatattcttccccaccagcttccctggatcccactcatccccaaatactctgatctcacaggttagagatctgtcactgggtgcaaaagaacaagaaaaggcactgtaaggtaaacattgatgatttcttgaaactaccagtaagtagcttatattttctgactttctttgtcttactgttgtgaaatcaactgatctagttttaaatgtaatgaaaagcaaagcaatagattctcccctagagcctgcagatggaatgcagccttgttaacatcttgatttaagcttcacagacttctgatttccaaaactgtaagataataagcttctgttgttttaagccacaaaattagtaataatttgttatagcagcaataggaaacaagtacaaaatctttattagttaatactatgaatagttattcataccagctaagagatatttggaatttattatggatcactttattatggtcactgtagtaattcacctgttgttcataaaaaccttataaacatttagtattgttttatggcaattgttattttaaacaatattatcaatgtatgttagtgttatcattattaaagttattattgttaaagcattgaaattaaataaattaaggtcagtaccacaa

SEQ ID NO: 273638 - DNA, 410 bp, Homo sapiens
gaatggaatgcaagactagaggcattggatatatgtccagcctctgcagggtgctggttaagctggttagcttcagtaggaaagatccattagctaatttatttattcatttcactcactgagaaaacatttgctaggtgcttcctctggggtatccacatcagcagaggaaaagctagggaaggctatgactttgcaaactctgtagaaacctctgatggaatcacccctctactgtccactgtagtcctctttcgaggaaaagaaaaaactcagggcagctggagaaaaaacagagctcagactcgagaaaaaacagagctcagacttgagacacgggcttccctctataggggtcaaaaaccagggcggagagagataaccattgttagaacttgaacctccttaac

SEQ ID NO: 273639 - DNA, 263 bp, Homo sapiens
tctcactgaaaattatgacaaatgacaaatctgatttatgaaaataggtcctagtagtggatcataggattctgagttcccctttgtccaatcctacttcagaacactttcgggaacttgagagagagattatgagctgtgaatgaagtatcacttgaacttgagatgtgccccaaagcatctcagggtgtaaaacagtgaatcagccaaaagttcatgcttcacaaattaatcagggtgcctctaatcccctatgaattagt

SEQ ID NO: 273640 - DNA, 435 bp, Homo sapiens
  misc_feature (387)..(387): n is a, c, g, or t
ttccagaaacgttaaactctcactcatggagcctagtgcatcaagtttaggtccattgtaacagcactttaggttgtttctgattatttttttcaagacagggtctcactttgtccctcaggctagagtgcagtggcacagtcatggctcactgcaacctcaaccccctgggtgtagatgatcctctgacctcagcttcccaggtagctgagactacaggtgtgcaccgccacagccagctggagtgcagtggtgcaatcttggcttactgcaacctctgcctcccgggttcaagcgattttcctacctcaacttcccagttactcgggaggctcaggcaggagaactgcttgaagccgggagatggaggttgcattgagctgacantcgtgccactgcactccagtctgaatgatagaccgagactccatctca

SEQ ID NO: 273641 - DNA, 304 bp, Homo sapiens
tacgtggcagagtatttacaaatgcagcagcaggcagaaggtagagagagtgggggcacattccctcttatttactgaaaataagaccaaatccctgcaaaggggggcaaggatcccttgtctcttgcagtgagtcagtggcagaaaaagatgagaacttgtcaccaggtgcaaaccccaaatcttgccactggctcaagctacctctgcatggctctgaagttggtttttctggcttccttagccggacacttttgctggtcagtttccctgcagtttcttagtgtgtctggtggtcagattc

SEQ ID NO: 273642 - DNA, 389 bp, Homo sapiens
ttttctttttttgttttgagacagggtctcactctgtcgcccagactggagtgcagtggcgcgatctcagctcaatgcagcctccacctcccagattcaagcgattctcctgcctcagcctcccaagtagctgggattacaggcacatgccaccatgcctggctaatttttgtatttttagctgagacggggtttcaccatgttggccaagctggtcttgaactcctgacctcaaatgatccacctgcctcggtgtcgcaagtgctgggattacaggcatcagctattgcgcacagcctgaaagcgtttatttttgggggctgaatatcatgaaaacataggaacactgaaacccagctactatacataaaaaagaaggtgcattaagc

SEQ ID NO: 273643 - DNA, 289 bp, Homo sapiens
ggtgaaggggggattatcttggggctgacatctttccagcaggaagggggttatctcggggctggcatcttcccagctggaggggggcagctagcatgtctctggttgcagaggaatttggaatgtttctggtcggagatttttttttgtttatgatcatgctgatcttagccatttaggctgatgccctttggatttaggcagtttttgattaatgtgaattggaaaataacagtgcttgtgcaagatggtgatactcctgctctgtcatatttcagcctctcaaagc

SEQ ID NO: 273644 - DNA, 366 bp, Homo sapiens
tttttgagacagagtcttgctctgttgcccaggctggagtgcagtggcacaatctcggctcactgcaacctctgccttctgggttcaagcaattctcctgcctcagcctcccaagtagctgggattacaggtgcctgccaccatgcctggctaatttttgtatttttactagagacagggtttcaccatgttggccaggttggtcttgaacttctgaccttgtgatccacctgcctcgtcacaggccaccacacccagctatttttatttgtactttgtagagacaaggtcttgctatttcccaggccatcacatttttaaatgattggaaaatgtgaaaagaagaatgatattttatgacacata

SEQ ID NO: 273645 - DNA, 390 bp, Homo sapiens
aagctggctgcatatcagaatctccaggaaaactgatttgaaaagtggattctctggccccactatctcctgggggttctgatgactctactgcaaacagaatccaggcaccccatgattccccacaacaccccacgtgatctgaccccaattctccaacacattccccttctgtcaaccacaactgtttcttctatcagggacactctccctggatcttcccaaggctggctttttgatgtcatcctggtctcagcttaaaggtcaggggcagtggttcacacctataattccagcactttgggaagctgaggtaggtgaattgcttgaggccagaagttcaagacccagcctgggcaacatggcaaaatgccatctctactaaaaaaa

SEQ ID NO: 273646 - DNA, 526 bp, Homo sapiens
gccaggctggtctcaaactcctgacctcaagtgattgacctgcttggcctcccaaagtgctgggattacaggcgtgagccaccacacctggaccactgtcattttaaatatgcatgaggctggccatatttggagatatctgtggctcctgtggtgggctgaattgtgtctcctaaaaagaaaaattggagttttaactcctaggatatatgaatgtgacagtatttggaaattgggtgtttacaggtgtaagtagctaagatgagggcacgctggatcagggaaggccctaaatccaatgattggcatccttataagaaggtcattagacacagacatacagagaaaagaatgacatgtgaaggtggagaaagagactggagtgatctgtctacaaccaaaaacatcaggactgctggcggttaccagccacaagaaggatcacagagcagattgtccctccaaacctcaagaaggaaccagcctgctgccaccttggttcttctagcctccagaactatgagag

SEQ ID NO: 273647 - DNA, 451 bp, Homo sapiens
tttaaattctcttgttattgtctaagtcaaataatgttacaatctgagttattttactttccattttctttacaccacccctagcatggtttttccccagccccttaacctgaaaaagaaaattgggacccacacatgctcggaatgaaagtatttgagccttttaaagatactactataccttgccatgagagaatgcattggactgttatccaaaaactgtggtttgaggtgtttttttgttttttgctgtattggacaggtcaatgatgttatctgcctcactctcaatcacaaggaaagaaaaaaatgcctcccctacaatctccatggaaaaaacatgttatattccacatgacctgcctttgtcctcccacatcatagctaattgtctgcaaaagcagccagcccttgggctaacctatggagtggccagacataaaaaaaaaaa

SEQ ID NO: 273648 - DNA, 480 bp, Homo sapiens
aggtcattctcaggttttatatatatatactttcagaaatcaaagacaaaattctgagacctcccaaccatctgaaaggacacctcctctaggccaaaggcattccaaagttaagctgaaaaactgtttcaggctgtgatggaagtgggggtcagacatgcctcattatgccctcctcttttttggaattcaggaagagccgaccggcactaacatcaacacagacctaaggcctgataagaaacatttaccatatctttcctgttcctcaccctgatcacgcttcatttactgatggcagctccaccaggcctaatcgccacacaccagcaaaggcaggctatgctatagtacaagccactagcccgcctttcagaacctctcatttcctttccatcatggaaatctatcctcaaggaaataatttctcagtgttccatctgctattctactattcctcagggattattcaggccccct

SEQ ID NO: 273649 - DNA, 477 bp, Homo sapiens
caggctgacaacgcaagcctcagtaccaacgggctcggcagcagcccgggcagtgccgggcacatgaacggattaagccacagcccggggaacccgtcgaccattcccatgaaggaccacgatgccatcaagctgttcattgggcagatcccccgcaacctggatgagaaggacctcaagcccctcttcgaggagtttggcaaaatctacgagcttacggttctgaaggacaggttcacaggcatgcacaaagatgcaaggaggctggtactatcatcatcctcattttacagatgaggacaccgaggcacagagcacctgagcgacttgcccagtaaatccccaatttgagaccctggttcttaatcctttagtacccacctccacctgggtcatcctaccctagagcctccatcctctgggaaagtagcaatttggggtaaaaaaataataataaaggaatgagctaagagtaga

SEQ ID NO: 273650 - DNA, 369 bp, Homo sapiens
gagacagggtctcactctgttgcccaggctggagtgcagtggcatggtcagctcactgcaacctccacctcccaggttcaaacacttctcatgcctcagttttctgactagctgggattacaggcgtgcaccaccatgcctggctaatttttgtatttttagtagagacaaggtttcaccatgttggccaggctggtcttgaactcctgacctcaagtgatccgcccacctcagcctcccaatgtgttggaattacaggcatgagccaccatgcctggccctcttgttcttttcaatagcaacacacttgatacatttatagaaactactacttctaagttttgtttcactccatgaaaaaataagaat

SEQ ID NO: 273651 - DNA, 425 bp, Homo sapiens
ggttctgttcagaccggtggttatagaagttcttttttatgccctcaaaaattatgttttttaattaaagttatattgtcaggaaaacatcagcatactgtggttaagttatgagggtcggctgggtgctgtggctcacgtctgtaatcccgacacattgggaggcttaggcaggaggattgcttgagcccaggagtttcagcccagccagggcaacatagcaagaccccatctctacaaagaatgaacttttaaaaattagccaggcatgatggtacacgcctgtagttctcccagctacttagaaggctgaggcagaggatcgtttgagcccaggagttggaggctgcagtgagccatgattgtaccactgtactccagcctgggcaacagagtgagaccttgtctccaattaaaaaaaaaaa

SEQ ID NO: 273652 - DNA, 423 bp, Homo sapiens
actgcacttcagcctggatgatagagcaagactgtgtctcaaaaaaaaataattctagatatttgaaaaataagatagggtgatgaatgtttatcaccggatattagggtgtactcaatggtaagtataaagggaaaccagcaatgggtaggctagttcaaaagatgtattatatttccagatattctgataacagtgataaagacttgatggtgaataggtatgtcgatagcagtactgcagatgctcagtttgagtaagtcacccacactaccaaaagatgaatattctttttgagaacagaagaattctagtaatcatgagctaaggatgctggaaattcattcctgaaaatgtatatgtaccaagtagttgttttctgttctcccattcttcattaaacctgtccttatcaagaacaaa

SEQ ID NO: 273653 - DNA, 848 bp, Homo sapiens
aaaccccatctcagccaaacatgcaaaaatcagccgggtgtggtggcacatgcctgtgatcccagctactcaggaggctgaggcaggagaatcacttgaaccagaggcagaggttacagtgagccaagattgcacccctgtattccagcccaggtgactgagcgagagtcctataagctacacagctctggcagcctcatgtcataccctctcctgtcctacctacaagaggggagggaattcagagcacatatcctgataggcaaaatgcagtgattcccacccctgtcacccctgaagcagcgagggtgtgcatttgaaatgcttgcaggtgaggactctggcatctcaccccccagctgggagccagccaagctacattccctgcagacagtcctgctgtctccctgggagcagagcgatccttggggctgggcttattgtccccgaaggtgggctgtccagatgaacgtggagacgatgcccaccaccttgggtatttccgaatgtgggagcccatgagagcagcaggcaccaaactagtaaggaggcaggcagggtggcaggcctggggcgagaacgccctgggtggggcctgcagaaactggagctctctccttcgaactcatttagaggtgcaggcaggggtcagggagtagaccaggggccgaggtgcccggaggccagccatgtagggccgtgaggctggtgaggtttgagagtcagggaccctgaccttcacgccctttctcagggccctgggagggaccccagaaatgtacttgcagagtcatgtgacataatttacataccttaaataaatacacatatctctacatttctctcca

SEQ ID NO: 273654 - DNA, 410 bp, Homo sapiens
aacaaagatgatagttcaatagaataaaatagagagttgagaagtagaccattcatgtgtgggtttgttgattttcaaccaagtaacaagtcaattcaatgaaaaatttagtattttctacaaatgatgcagcaattggatattcaaatgagaaaaacatgaaacttagcttctgccttatgctgtactccaaaaagttttgaaaacaagtcatagacctaaatataaaagctaaaattacaaaacttttagaagagtgggattacaggcgtagtgagccaccacacccagccagggttttcatatagattaggtaaggtagtagatgtgacaaacattttataaaattttaatgctatacaaatgctatttttagctattacacttaaggtgggtgctgaaaatgtaaa

SEQ ID NO: 273655 - DNA, 228 bp, Homo sapiens
ctgccaccgaataagtgaaacagctgaaaatgagagccagggctgatccctgtggcttgccaaactttgatgtccatggaattggcagcttcccccagtctcccagctgaaaataggtcagtgattaagagggtagaacttcagggtagaacttcaggaattgtaagatggattgatgggagcatttggaaaacttgatttatcccaaatcaccaaccctacctaatc

SEQ ID NO: 273656 - DNA, 355 bp, Homo sapiens
gccaaatgtggcaagggatgagctgggagtcctggcttctcagacaaaggggacagggataaacgccacacagatccctgccaacaggctcaggatggacagtggagtttgtgtctactcatcttgtctactggtgggtagaggccacggatgctgctgaacatcatacggtgcagctagagagtgttacagggtcttaccagcaaccagcgtatttccagcccctctttactctcattgaatgatgctgtggaagtgagggaagcctccacacatggtgtaaatacaacgaaacccacccacccagaacctcccacccaggctaggaagctggggacgcgcacgggttgtaacc

SEQ ID NO: 273657 - DNA, 368 bp, Homo sapiens
ccataggtgaactgggaggaaccagaggttaactgactcttactaaaattagaacgcagcccagacccagctcaatgcctgactagattgagatgataagtgtttcaccctttgtaaagagagcaagggcacccctgtctggtgccctttatcttctggagcttctacctttcttttatacataatgtccagtatacaaacaaacaaaatactagttatgcaaaaaggcaggaagatgtgactgacagtcaaaagaaaaaatacataaatataacaataacagcagacccacagatgacctaaatattgaagttaactgaaaaggactttacaataactataattaatatattaaatagaaaaaaaga

SEQ ID NO: 273658 - DNA, 466 bp, Homo sapiens
aaaatattgccatgtccatagggatatatatgcccagtgataaatctctaaagaagacacgaagaaataagagaagggcaagatgagagacaagacaccaactcccaaagaaaattgccgagtttctcaacccttcaagggccatttgagagcaacttggtgttgtgcaagtcactgtatgcagtatgcagagcagacagaatttgctgcgggatatgaagctcaccaagcgaccaagggatctaactggaaccggcagagaagagccctttagaagtagaagtgagagaatgttcctaactgattcacagacacagcacttcccagcactcccggtgagagccagaaaacccgggggtccaaacctaaaagacaggggacatcaacaaggctgagatgatccattttgcccaaagatttgtaatctctttatgtgggctacccatacaatgtctgaaacgtgttt

SEQ ID NO: 273659 - DNA, 427 bp, Homo sapiens
ccacatggctggggaagcctcacaatcatggtggaaggcaaaggaggagcaaagatacgccttaggtggcagcaggcaagagaatgtgtgcaggggaactgccctttataaaaccatcagatttcgtgagacttattcattgtcatgagaacagcacaggaaaaacctgcccctgtgattcaattacctcccactgggtccctcccacaacacggaattatgggagctacaattcaagataagacttgggtggggacacagccaaaccgcatcaatgaattagattgaaccataggaaattgccattattagactgtttttgacctgcaaccaatggaaatgacagtggaatgacaaccacatccatttggttccacctaatatttgcttgaagatgcataaaatctctctgaaattgtacactata

SEQ ID NO: 273660 - DNA, 523 bp, Homo sapiens
ttctttttttcatgagtcaaaaagcatctctcactttagttacacctgtattaggagagttatgatcaattacagcagttgtagtttctgagaacttggataaatacaaacctgaattacacagaatttatgtaaatccagatattcaaaaatgagaaataatgtaatatatgaccaaagtaatatcaagacaacatacaattaaatcactcaacaattactgggaatatgtatcaaggcaagaattgtaaaattctacctggtacttctgaaatgaacaaggcaatgagaaataacagtttatcttgtctattactgagtatcaatgaaagcaataaggtgaacggaaaagtccatgaaaactccattttcagaataatgaggagacagatttaattcacagatccaaatgtttctcaccggctgacaaaactgtgttaagtcagggtgaagcatggcggaggaacagggaggaagtgcagagtgagaaaacataaagaagtcaggaagtgccagaggagta

SEQ ID NO: 273661 - DNA, 459 bp, Homo sapiens
ccctcaaactagaacagcagcaccagctgcttcctggacttccagctcaatgactctcacacttcaatggcagcaatggctccacccccaggctccagctccaacaccctcagatctgagcagcggcagcaccagctcctttctgggtcttctgtttcacgatccttaaattagaacagcagcaccatcttctccctgggtctccagctccacgaaactcaagctagaatagcagcaccggctcctctgggatcttcagctccacgaccctaagacatcagtggcagcaccggctcctcccctgggctccagctccaggaccctcaaacttgaacagaaacaccagctcctccccaggcctccagctccttgaccctcataaacaatcccttcttatgaaatgtagcagtcaggaaaactgtagaggaagtaaataaataaatggtttcctttcaaatt

SEQ ID NO: 273662 - DNA, 791 bp, Homo sapiens
ctaccggacccttgaattacaacaaaattgctcctccctgggtctgcagctccacgaccttcacaccagaacaagacctctcctccctgggtcgccagcttccggaccctccaattacaacaacattgctcctccctggttcggcagctccacgaccctcaaactagaacaagacctctcctccctgggtctccagcttccagaccctcgaattacaacaaaattgctcctccatgggtctgcagctccacgaccctcaaactagaacaagacctctcctccctgggtcgccagcttcctgaccctcgaactgcaacaaaattgctcctccctggtcggcagctccacgagcctcaaactcgaacaagacttctcctccccaggttgccagctaccacaccctcgaattacaacaacattgctcctccctgggtctgcagctccatgaccctcagaccagaacaagacctctcctccactgggtcgccagcttcctgatcctcgaattacaacaaaattgctcctccctgggtctccagctccacgaaactcaagctagaatagcagcaccggctcctctgggatcttcagctccacgaccctaagacatcagtggcagcaccggctcctcccctgggctccagctccaggaccctcaaacttgaacagaaacaccagctcctccccaggcctccagctccttgaccctcataaacaatcccttcttatgaaatgtagcagtcaggaaaactgtagaggaagtaaataaataaatggtttcctttcaaatt

SEQ ID NO: 273663 - DNA, 378 bp, Homo sapiens
accccagagtgccagtacccacctggtcccctccctccccaccacacccacagacagatgcacaagcagacacattggttgcaagccgggagcacctttatggcaaagcatggctcagctctaggggcccaggaaagcagagcccttactaaggctacgggaggcacccaggaggaagggcaggcggataatatggaaacacccagggcagagtgtgcattttccagcttagccagaggaggcaaatggagatttggagagagaggtctcttgagccccgatgaaggggtcaggtctgggagggaggaataaaatgggccgacagctcttggattcccaggctggggatcccagaatgcagtcacagcgggtgggggt

SEQ ID NO: 273664 - DNA, 536 bp, Homo sapiens
cacctggtttcagctagtgcattagttttatcttgttttttaccgctgggcaaaccttgctggaacaacaactgacttcatgatttgcacatttggagggcttaacgtctttgcaaatgaaaaatccactgtacaataacaagctcaaaggaactcggagcctttttagaagaaatcgtgctgaattataatgtggcttactgcaataatgtttctttgatcaggatggaaaggaaaatactgagtttagcagaaaacgatgtctaaatgtatttgtaatgatacaattgtttataaatgttttactattaggttgaaccataagaaattgccagtgtacaatttcatctacaaaatgactggcttaacctaaattctgcattttatactccaagaataagctcttcgtggcagctttctaagtgtgaaatgatggaactttctatttgccagaatgacctacacttctctaatagtttatctcatattgttagccaaacgctgattaaaatgcaaatttcaaactaaagagtttt

SEQ ID NO: 273665 - DNA, 458 bp, Homo sapiens
tcattaaaatagcccagatacaactaaaggacagttagacagtgattaaatatctcattagaaattttgtaagtcaaacctcttttgtctactgtgaaatttttgttttttaatttgtatggtagccttaaaaatcattgcaaggactgcttgctgagacagagttttgtacaaaaatcatttaaactgatcaccctgattgttcctgacagcttcatcatgagtttagatttttatggcgtgtctttattcagagaaaactgcaaacctattaaatacattgaaccagcaccagctataaggtaaccttcctattaacagctttgagagagcagcactcttaaccaatagcttttggctctgcatgcttataatatttttgatacaattaaatgctggctacactgaaattctgtacatatgcttttgttgacaacgatggaccggccgaatatatt

SEQ ID NO: 273666 - DNA, 666 bp, Homo sapiens
tcattaaaatagcccagatacaactaaaggacagttagacagtgattaaatatctcattagaaattttgtaagtcaaacctcttttgtctactgtgaaatttttgttttttaatttgtatggtagccttaaaaatcattgcaaggactgcttgctgagacagagttttgtacaaaaatcatttaaactgatcaccctgattgttcctgacagcttcatcatgagtttagatttttatggcgtgtctttattcagagaaaactgcaaacctattaaatacattgaaccagcaccagctataaggtaaccttcctattaacagctttgagagagcagcactcttaaccaatagcttttggctctgcatgcttataatatttttgatacaattaaatgctggctacaacctataatcccagcactttgggaggccaaagttggaggatcacttgagctcaggagttcaagaccaggctgggcaacatggtgagaccttgtctccacaaaaaagtacaaaattagccaagcgtggtggcacgggcctgtggtcccagctgctcgggaagctgaggtgggagaatcgcttgagtctgggaggtcgaggctgcagtgagccgagattgtaccactgcacttagcctaggcgacagagtgagaccctgtctca

SEQ ID NO: 273667 - DNA, 418 bp, Homo sapiens
agctctgggcaaatttttcagtataattacgtaaatgcaagtttttatctattcatatatgtgtatatgtatacacacacacacctctgtgtgggtgtatatataaaaaccaaaataaaacttaaaagttagttggggccaggtgtggtggctaacacctataatcccagcactttgggaggccaaagttggaggatcacttgagctcaggagttcaagaccaggctgggcaacatggtgagaccttgtctccacaaaaaagtacaaaattagccaagcgtggtggcacgggcctgtggtcccagctgctcgggaagctgaggtgggagaatcgcttgagtctgggaggtcgaggctgcagtgagccgagattgtaccactgcacttagcctaggcgacagagtgagaccctgtctca

SEQ ID NO: 273668 - DNA, 423 bp, Homo sapiens
acgaaactctgtttcaaaaaaaaaaaaaagaaaagaaaagaaaaagaaagaaagaacaagtattctctttttatcgagtacttacctgtgccaggacaattataagtagattatggctctcatttaatcttcgtaacaacatttttaagttggttatattcttcattccattttacaaagggggaaattgaggcttggctaaagtcactagccaccaggttgcacagtggataggtgggtggtagagctgagattaaacctccctagggagcctaacaccagagcctgagctcctaacctctttgtagtactgcttcacagtgtttgcaaactgaaaccttaacaggcaggagtctgacccaagcaaaagattattaattactgtacttctcagcccaaattaccttacctttcagttcaact

SEQ ID NO: 273669 - DNA, 187 bp, Homo sapiens
aaatctccctcttcttaggaggacaccagtcatattggacttaaggcctacgctaatccagtatgacctctgcatacctctgcaaaggcccaaaaaggttccaaataaggtcatattcccagggttccaggtggatataaatttgggggaacattattcaactcaatacaccatgtgtaatcttctt

SEQ ID NO: 273670 - DNA, 444 bp, Homo sapiens
aacatcaggaccagaaagagaactcaggtgtgtctgacccaaaagccctgtctcctgaccacaatgccttattgtttctcgtgctatgaggcctaaataaagcaacagccccctcacagtggtgaaaatagctgccacaaaacttatgcttgtgtcctagtaggcagacactcatgtttgaggcaggcaaggcagagcacagagagatgaggatttggagtatgcagccctgagttaggctccaggatctgcccttgccagcctcagttttctcatctccaaaatggggataatagctcctgtttcaaatacagggtctaactctgatgaggtaatgcaggcatcacgggatcatgaagatcccgtgagctctgtgtgtgaatggtaaggttctgaattcacactagttattatcctgaataaataatgcctaagctcaaaaag

SEQ ID NO: 273671 - DNA, 446 bp, Homo sapiens
agcctcccgagtagtcgggattacaggcgcccaccactaggcccagccaatttttgtatttttactagatacggggtttcacgatgttggccaggctggtctcaaactcctgaccttgtgattcacctgtctcggcctcccgcctcagtcccccaagtagctgggactacaagcgcgggtcaccacacccagctaatttttgtatattttgtagagagaggggtttgccatgttgcctgtgctggtctcaaactcctgacctcgggcagtcctcctgcctggcctcccaaagtcctggggttacaggcatgagccattgggcctggcctaccctgattcttaagaaagcattttctttctttcatattataaagtagttatgtgtaggtttatttagttaggaattccagctgttcagagatggcaaaacaaaaaaaaaaagcaag

SEQ ID NO: 273672 - DNA, 410 bp, Homo sapiens
tacaggtgtgggcagagactctgaggcctgagagacctggcctggattcccagctctaccacccagtggtcaaatgacctggggcaaattgcttcacctctccagtcttcggcttccttgcctctaaacagtaatagtaataaaccaccctccagagttgtgagcattcagtgagattacatgcataaataatttgctcatggtaaggagttggagttcctggaaaacatgacaaaggcaccttcacagctgaggtggccgtctgagtcaatgactccaattctgagtccattgcttctggcctgtgctgtcggggtgctttttctctgcaggagcagtttatttctgaaccaaggtcataaattagttcattttgcagttcttgaactgaaaatttttattcaatatct

SEQ ID NO: 273673 - DNA, 486 bp, Homo sapiens
ctccctaggtcctgccttattttagcacaaactttggtggtggtttgtcattggtaaatcagtgcctactgaggacctgacatattgaaggtactgagcagactcatactgaacttctctgggaagaatttactaccacacttaagatctggttataatatttttgaactcataacacagtcctatggcatggaccttgaggatactgcaacagtgggtctcaagaacaactgtatttttaaaataaccaaattaagaggagtatggcaatggtcaatggtggctcgaggattttttgctttctataaagttcatgacaaccaggaaaagacttgccattatatcttatacacagacactgaagattaggctgtttctataggtttatattatatctatatctgttattttgtataaaaggtgtgttaaaccagaagaaaaaaggacaattgtcatagtatttaggaagatcctaaaaagaaaaaa

SEQ ID NO: 273674 - DNA, 355 bp, Homo sapiens
ttttttttcttttctgacttctcccaaagcttttcaattcccactacttcgagccctgggatgtttgctgatacagagtagcaagcatttccaaaaaaaaaaaaaaaacgagataacatataaatacctgtagaattctagggaataaaacatgtaatgtacattttaagtatgtgttaatagttttcatgtctgcaaagcaattgatatttctgcctttttaggctgggattaatatacttttttttttttttgacggagtttcactgttgtcgcccaggctggagtgcaatggcgcaatctcggctctctgcaacctccgactcctgggttcaagtgattctcctgcctcagt

SEQ ID NO: 273675 - DNA, 280 bp, Homo sapiens
ctttatggaagacccgagtcttccttctgcaggatccacacttgaactgtgcaaagcaccaacatatcattgcctcccaaatcctggagatcagaccttccccactcaccccatctcctgccccaccatctgtcgggagctcctcacctttaaccttccccactccatgcgagtgtcccacatcctggggacacaaatcaagctttcaggcagtctccttgaagcctccctcacttgactttaggagtggagattcaccctctctgctccccatggctag

SEQ ID NO: 273676 - DNA, 448 bp, Homo sapiens
tttatagggataaattaattgctactatacttttaatggttttaaagttacttaggccacttctagaaatatgtaaaattgtatgatcctaacttaatgtttcatttctccctcagtttttatgtgatttgataatataatgaagggaactataaaaatttgatattgttggggcctttttagaaaattgagatacatttttctttgtatcattgttgctaaaagaggttaaatattgctacttattacctaggagaaagaacagcattttgtggcaaaataagtaggttataccgaatttgacagacttctctcctgaccgattttggagcacatatcttcatgtgccttgtaaaactagagatgcattcagttttcaatgttcccagatatattttaccactctatttttcccatatagcatctcaataaactgctgtttcataaa

SEQ ID NO: 273677 - DNA, 815 bp, Homo sapiens
  misc_feature (655)..(655): n is a, c, g, or t
  misc_feature (662)..(663): n is a, c, g, or t
cctacacaacttggggcccctctcctctccagcccttctcctgtgtgcctgcctcctgctgcccccaccatgaccaccaccatccgccagttcacctcctccagctccatcaagggctcctccggcctggggggcggctcgtcccgcacctcctgccggctgtctggcggcctgggtgccggctcctgcaggctgggatctgctggcggcctgggcagcaccctcgggggtagcagctactccagctgctacagctttggctctggtggtggctatggcagcagctttgggggtgttgatgggctgctggctggaggtgagaaggccaccatgcagaacctcaatgaccgcctggcctcctacctggacaaggtgcgtgccctggaggaggccaacactgagctggaggtgaagatccgtgactggtaccagaggcaggccccggggcccgcccgtgactacagccagtactacaggacaattgaggagctgcagaacaagatcctcacagccaccgtggacaatgccaacatcctgctacagattgacaatgcccgtctggctgctggatgacttccgcaccaagtttgagacagagcagggcctgcgcctgagtgtggaggccgacatcaatggcctgcgccagggtgccggnaagatgnncctggcagaagcgggaccgggagatgcgaaatgggagaacccaaggggagccggctacggaagaaaaccccgggggggataaaccctgaagccagggggcggggacaccgcgggatggcccccccaagggggcggagccaaccagatagggg

SEQ ID NO: 273678 - DNA, 401 bp, Homo sapiens
ccctgtctcaaaaaataaaataaaaaataaagctagaaatgccttaccatttggatattgtgccagtgggagtttatattcatgcatgtccctggtcaaacttttaaagaacatatctgagtaggaaaagatttcctgagttataaaaatgttttactgagaaggtagctcttttattctctttttttttttttttttttttaaagagacaaagtcttgctctgttgcccaggctggagtgcagtggcacaatcatagctcactataacctcaaactcctggcctcaggtgatcctcccacctccacctcccaaagttctgggattacaggcttgagccaccatgctctgccaattttttctctttttaaagtttggcatgtagcttaaatgttgctcaat

SEQ ID NO: 273679 - DNA, 452 bp, Homo sapiens
gacatttcatataaatgcagtcatatactatgtggcctttggtatctgatgcttttcacttcagagaatgtttctaaggttcagccccttgcagcctgtatcagtacttcattcctttttttttttttaagtacttcgttcctttttatggctgcataatattctattatgtggatataccacattctatccatttgtcagctgatggatgtttgggttgtttctaacttttgactattatgaataatactgctatgaacattcatgtacaggtctttggacatacattttcagttctctcaggtatatttctaggagtggaatgattgggtcgtaaggtaactttaggtttcacctttaaatatttttttaatttattttattatttatttattttgtagagataggggtcccactatgttgcccaggctggtcttgaactcctggtctca

SEQ ID NO: 273680 - DNA, 367 bp, Homo sapiens
aaacatacctccttttagaagagaggagtcagttgagacactgcatttttgtatgtgatgaaaacagttttctaagggtttgggaaactttatatggttggggataagaattgaatgcaaattaatgaactagatttgcatttatggagttacctcatcatggagttaccttggtctgtcccacgtcaattaatcttgattccttattttcatagaccatcctctagaacagtgttttcacactgtgtatcgtgatcctataatgcaggggtgtccaagcttttgtcttcccttggctacactggtagaagaattgtcttgggccacacataaaatatactaacactaatgatagctgataagctaa

SEQ ID NO: 273681 - DNA, 1051 bp, Homo sapiens
gagagatagagtcttgctatgataatcaagctggtcttgcattcctgggctcaagcaatcctctcgccttggcctcccaaagtgtttggattacaggcgtgagcttctgtgctggccaaaacagaatgttggagacacacactgaatttacttggaaggctgattgttttcccacgccctccctaggagggtgagctgggtgttgggaccttaactctgcccataagatgttcaggccaggagagatgccctttaccccttgggttacaagggtttccactccctttctgcttgattgaggcttgccctcagttctttgtatccctgctctgctctgcttgtttcaaacaacacatttttgcactgtgtcatgaacagctcatcttcagagagtctgtttttgctggtgttttccgggatctgcatgtgcctcttcccatgtaactttggtaggccttgtgcaggtcttggagtttccagtgtctttttgtcttctagtttcgttgaatatgggatttctgcctcattcccccgctcaccaccatatctccctatcactttgcataatttctaggaggaggaaggggacaattcagtcaaatattgccacagttcttatactataatcatatcgctttgtaatataaatttctcccactttttccattataagattaaaaatagctcacaccaaaatcccatcgcttgaacccagaaggcagagattgtagtgtgttgagattgcaccacggaactccagcctggacagagacagagccagaccctgtcccaaaaaaataaaaataaataagtaaataaatgaataatgtttccttttttatatagatatatagacatagatatataaccatatatcatacctggatatagacacacatagagatttctttgttcaaaaatggctcaaacgatatatacgttcttcaacttcctttattcatgtgaacatatcatgggcatatttccatggtatgacttattttgaatgccaatgtttatattaaatcacatttcaaactgtgttcactgt

SEQ ID NO: 273682 - DNA, 450 bp, Homo sapiens
ctcagagctaagctagggatagctttgctgtaagttacattgacagcatctgttaccatgtaattggtgcctgagctgaagcatctttcaggcattactggccatttgtacctttgcctgacgttatctcttgaaatgtctacactggcctcgctttacccgtgggaaaccagaagcccagaggagcagtgccttgcccaaggtcacacgatgaccatgaaagcagagtggagatcactctccactccttaaagggaatgggatcaagaggattgaaatgctgtatccactgagcagggcggcacatgcctgtagtcccagctactcgggaggctgaggcaagaggattgcttgaacacaggaggcgggggttgcagtgagctgggatcacaccactgcactccagcctgggtgacagagtgagatgctgtctctcaaaaaaaaaaagtc

SEQ ID NO: 273683 - DNA, 291 bp, Homo sapiens
ctccctgggagttcactcattcagtctggaatgccaaagtagcacctacaggacttatacctgctgactgactttattgatgcaggtatctgcctgctctgacatccatgtcttacctaacccagattctccatcactgagctgtttctgccagccagagtgctgagcacctgttcctgttcctcttcctcactgcagcagtttgcccggaagctgagctcagactgtcttaactttgaaaagaataatcacctgccatattaagctcccttttcagcacctggaactggg

SEQ ID NO: 273684 - DNA, 421 bp, Homo sapiens
tccctctatagcagaaagctgaattcttcactggcatggaggccagaaactgtggttcatgaaaggaatgctgatggacttaggcccttatacaaacttacttcaactatttacattaatgatgatgatataataatatttgacattttgctatcacattttggtcatcagaagctattttgtcctttcaccattactttttatattcttgaaaacatttgtcctgaatttcccagcactaagaaataaagacggctgtcttccaaggaactagaggttacaatctagggatgggcgtgctcatgagattggtggtgggcaaaagtgctgctgccactgctgctgtcaggccacttgtgtattatttaacatgagtttatatatatttttctaataaaaaggataaatcagactttctaag

SEQ ID NO: 273685 - DNA, 246 bp, Homo sapiens
gtccccgaggaggtcacagactctgacctgggaggcagcgtcgtagcactgcctagtcagtttaagaaataaaaaggtacatcccatttaaaatgttcatcagactgcagtggaaaaggcgactgcgttttacagtgatgtccactggggatgatatgagggaaagcttcgttacatagtgtcgtaggcttccctcatgaggcaggttaatttccacgggacactcattccccgcactgtgggagg

SEQ ID NO: 273686 - DNA, 327 bp, Homo sapiens
gggctgatacatagatgacacgacgctggctttacacaccacatcacggtgagactgactccagcaagcttacatcactcagacggcaaatatttcaaagaaaaaatccatagtgtttagtaagccacagaagaacattttaaagtaaggagtaacaaatctgtatggaagaatttccaaaattcacaaagcgtagaaagaagattgttaaaaagtatgtccagtgattgacttggagtgggtacggaggcatgggcagtggccctggactgctgcctctgctggcaccagctcttattaccaccgcttgaagaacatggtacattt

SEQ ID NO: 273687 - DNA, 182 bp, Homo sapiens
cagaaattggagaagtgttaaagggtcaggttgaatgaggactgtctaacctggagctggcatcagaaacaactaccagaaatccctgtaacctgcttctcctttggggtctgtgaaccgcaggactaagacactcccacattctgaccctggcaccagcaacagactacttgccatcggat

SEQ ID NO: 273688 - DNA, 292 bp, Homo sapiens
cccacagtacattaatgttcatcatgacatgatgcctggagaacattaaggctcctattaacacatgaggggccctgaagacccacctcctgagctaacgtccaacaagagttcaaaagacacacctcatgcagaactcttattcaacagaatttgaagaactattttgaagaattatttttgtaactcattcaaaaaaagtgatcagaggcaaaagcagcatgcagggtcaggcacttctattagtgaatgtatctatttgatataatccacagggccagtatttgcttca

SEQ ID NO: 273689 - DNA, 276 bp, Homo sapiens
attgactttaggactgatcctcaaatgtgaagttgactgcatttggaacagactaataaaccgtgtgtaaaaacttgactcagaacaatggcagtggctcacatctgtaatcccagcactttgggaggctaaggcaggaggatcacttgatcccaggggttcgagaccagcctgggccacatacagagactccatctttacaaaaataataaaaataatattagccaggcatggtggtatgcacctgtgggcctacctagggaggctgaggtgggg

SEQ ID NO: 273690 - DNA, 571 bp, Homo sapiens
aggaaaaccctgaggcagttgttaaaattttgtccaacatcagtgagtttatattgaagaaaaacctgcaaatataataaatttggaaaaacattttttcaaaaactacaaattataaaacaccaaagagtttatactaaaatatatttttgcaggtgcagtaaatatgaaagatatttaatccaaaattgtctatgtaaatatcagaataatccacagtagaaatatctagggccactcaatgtttagacactactgtaaatcagagtgctgcgtataaaaaacaatacaaaactaaagatagcataaacattatttgtatataactttaaaagaagtagaatattttttggagagttataattacattcaaattatactttttatgaaaatacaggtttttttcgaagtgaataataatgaagttaaactcttaaattacttcatgctcttccatcattcctggtttattcaaatgtgaaagcatgtgactaattgttgctggacaaaatatatgagagattcttgtttattaggtaagcattacttatgaccttttctatggaaaggt

SEQ ID NO: 273691 - DNA, 343 bp, Homo sapiens
gctgccactactgtcactgtgatgcttatttcactataaaatccctcaaactgcaggcatcaacaatggtagaagggaatcccagtgagggtgatggccctcttgaacacctgtgacacaaggattgggaggtcccacagaagggttaggacacatttgacttgcaacacttggatgtgcttctgcaggactgtgctttagtagatttcaataatctatggcaaaagagttggacaatccaaccagaagtatcttgaggtcaatgatctttgtataaggagaatgatatgctaggcttctgctgaagaattgcagaccaagcaaggtatcagaaagtgtagtg

SEQ ID NO: 273692 - DNA, 252 bp, Homo sapiens
caaagcactaagcacctgaatttattgccaggtcctagctcagactggcccacagaataccccttccaagactgtttgaaatgtggaaagagaaatgttctaggaattggaaaaaataaattttggcttcagcactgcaattatttagcgattatttggcctctgcactgtgaattgctccctggttcccttttctgtgtggtgaatatgatgatacttaataaactcagaagattgttgtgaggtatggta

SEQ ID NO: 273693 - DNA, 318 bp, Homo sapiens
tctcagattctttgctactttcttcctgtctctccctctctcctaacggaaaacaaacacttcagccaggcattgttttaagcactttatacatattaactcaaccctaactcaacacaaaccaaccagtatatgtcagagaatatgaactcaagatcttacctgaggcatctctgctttgtctttttcacccctcaaacactgagctatccttaagataacaagagagtttctatagggacaaacccaaggcatttagtttttgtagggacaagcccaggattatttgcgagaaggccaaaaaaaacccacacaaga

SEQ ID NO: 273694 - DNA, 239 bp, Homo sapiens
gtgcctgtaatcccagctactcgggaggctgaggcaggagaatcgcttgaatccggcaggtggaggttgcagtgagccgagatcatgcccctgcactccagcctgggtgacagagcgagactccatctcaaaaaaaaaaaaaaaagaaactcatgaatggcttctccaatctcctctcccaccttccttacttcctaaaaaccattagtgtcctcacaaagagaaccacagtagaagta

SEQ ID NO: 273695 - DNA, 456 bp, Homo sapiens
gagacctacctggcagacccaacttgctgtgaccaggacctcagaggcagggatgctgcagctgagctgggtgccaggaggaaagacagcccctgtctcatgccagcacactggaaataaataaatacatgtgcagggaagggaaaactgactaaaccactaaatggaaaggggagaaaaggagaggccatcagaagaactgaaagacagaaacaaagctgcctgagccaggggcctctgaagactgtccctggccctgccagcctgctctctcctcctgggtgaatggtggcagggacagctgtccctattgtgaccagagatgctgcacagaggagagctctctcatccttttactcgccattggccacttttgctttattttcctctaagattttgctttcccttatatgtattttttctatttttctccaataaaggattggaataatagga

SEQ ID NO: 273696 - DNA, 403 bp, Homo sapiens
tgttgaggtacgggggtgtttctttttgtttttatttccaaaaaaaaattaaatctaaaactatcattaggtcattaatgtgtcataattcagacagatggcagtgtgtaaattcatgcttcgagaacttaaaaacagcagactcacagaaaaatctcatatttctttttataattctcagttatgtccagacacaatctattgctgctttcaagtagttttcaaaaatgtaataatgtaatagaagtcattttacatttccaaatactacattcgagtcagtgtttttaaggcgtaagtcattttaaagcagtacacaaaaatgattaggtaccacctatttttagtacctaaaaattattgaatagctcaattttcaagctttagatgatatttgggtgat

SEQ ID NO: 273697 - DNA, 237 bp, Homo sapiens
ggaggagcagcagccatgcctggcagccctcgctgaccttcacagcctactggctgcctcccctctgctactttccaagtcttttctctgcagcccactgccaatggcgggagatgggaattttgggaaatgtagttatagcttaactaagttaccacactttaaaatcacaatgaggaacagaaaaggggccagtgtggccagattgcagtgagtgtgggggaaagtatatagcaa

SEQ ID NO: 273698 - DNA, 396 bp, Homo sapiens
gatgaaaggtcacaaattaaatttaatgtgaactatgctaatatagttcatattaagaatataatttaagcatattacatcatgtcatcacttcatattgcttttggagccatcttggagtagaggggcaatgtttgctgttccttataacagaggctttaatgatttattaaaaacaaataattactaggttatgtacattgtaaaagtacatttcccatggtgtggataaagagaaacgaataaaaatagggcagaatagaaaagccaagataaggtgcttgtcactgctactagaattccctctctccaaaaaattttctaaatattttccaaacattttgactttacaccattcatacagtttcttctatattagtgaaactctactagtaa

SEQ ID NO: 273699 - DNA, 530 bp, Homo sapiens
atccatgaacatgaaatatctttccattcacttgtgtcttcttcaatttctttcatcaatgttttatagttttcattgtgcagatctttcacttacctggttaaatttattcctacaatttcattctttttgatattagggtaaattgaattattttcttgatttctataaattatttattatcatactcatacttgtcaggcctctgggcccaagcctgcatgtatacatccagatggcctgaaataactgaagaatcacaaaagaagtgaaaatggccagttcctgccttaactggtgacattaccttgtgaaattccttctcctggctcagaagctcccccgctgagcaccttgtgacccccgtccctgcccaccagagaacaaccccctttgactgtaattgtccactacccacccaaatcctataaaacagccccacccctgtctcccttcactgactcctttttcagactcagcctgcctgcacccaggtgaaataaacagccttgttgctcacaaaaaacctg

SEQ ID NO: 273700 - DNA, 399 bp, Homo sapiens
ctgggtgatttggaggtggtcaggatttgattcaagcacagacttcactctatgttcaaagctgtctgggctgtgaccaactttgtctgtgtgggctataagagtagggggttcttggctggacatggtggcttacgcctgtaatcccagcattttgggaggctgaggtgggcggatcacgaggtcaagagatcgagaccatccttggccaacatggtgaaaccccatctctactgaaaatacaaaaactagccaggcgtagtggtgggcacttgtaatcccagctacttgggaggctgaggcagggagaatcgcttgaacccgggaggcggaggttgcagtgagccgagatcatgccactgcactccagcgtgggcaacagagcgagactccatctca

SEQ ID NO: 273701 - DNA, 108 bp, Homo sapiens
cccccacatctaatacagtaggctgtcttgttgggtctatctaatgtctacgggtctcctaaatctgacttctcactttttccatgctatcactctagtctgggttgc

SEQ ID NO: 273702 - DNA, 617 bp, Homo sapiens
tgagatggagtctcactgtcgcccaggctggagtgcagtggtgcgatctcggctcactgcaacttctgtctcccatgttcaagcgattctcctgcctcagctccccgagtagccgggattacaggcgtgtgccaccatgccccgctaattttgtatttttagtagagatggggtttcgccatgttggccaggctggtctccaacccctgacctcaggtgatccacccacctcagcctcccaaagtgctgggattacaagtgtgagccaccgtgcccggccccatttctgtctttgcgagcaagagacaaggctgcatctcctcctccagggccgccatgcccagcacagggcttggtacgaggtctgtaatcagtgtgaccttaatgaatgtgctgtagaatgattcccatttcacagacgggaaaaccgaagcttagttgggttaaaggagttagctgcctggggtctgccgagccggggctgaactgcctctatgggttgggggctttctgaaggcaggggggacttgtagcatacgccccatgactcagcatttccattctgagacatccaccctttacagatatgtaacgggagacacagacaagaggatccg

SEQ ID NO: 273703 - DNA, 394 bp, Homo sapiens
actgcaaggaccaccttgatttttgtgaccagcagacttcacgaacaacgtcagtgaggactgtacattaccacacctacagtaagcctatgagaagctatgcattggaatattaaattagcactaaaatatatttaaagaactatttttaaaaatgagatcctcaagaacagctattatcaatatttcaaaaagccaactagatttcatacacatacccatgtacttgcacaaggtaattaaatcacctttgcttttggctcaatttatataaaatcatttgatttaaatgttcatctagtgcacttcaaaaaatgataactgccaggtacatgttgtctattagtaaaagtaaaaaaaaaattgcaatgttttattatgcaaagtagttatg

SEQ ID NO: 273704 - DNA, 163 bp, Homo sapiens
aaagttcttttcctccttttttcttcttttaggcagaaaccactaatactagcctcttgcaggtgcaactggaatgcagtttacataataaagtgtgtcagcaattaaaggtaaaataaaatgtgtagtgttttctctctgctttcctcctgcctctttgctt

SEQ ID NO: 273705 - DNA, 385 bp, Homo sapiens
cctctccaggagcccacacggggtagggcccatcataggctttcaggaaatgctaaagctaaatgcagaggcgagagtaaatcacttaaactgaatggcagctgctgttagcaaaagagagtgacttgctagagtcctccaggatagcactggatgaaagtgccagctgtgcctgggcctctgttgtgatcgtcagaccgtagaccagaggcacgtcgacctactcctgggcacaaatggtttccatctgtttagaacctttgtcaattaaacgaaggtacataggatcatgaccaggggcatctgcctgtgcaaaatgattttaaaatctgtgtgtattaaatagaaagataaagttgatatttttatatcttttcttcaaatg

SEQ ID NO: 273706 - DNA, 448 bp, Homo sapiens
acgcgtgggcaaaacaaggcccaacactctttaaaagacaagaagcgtgagtcaccgcacccggccatgaattactcctgctttctaacagcacccagtccagagcaaaactactttctttcaccctctcccaaaatacccaaaacaaacgctactacaagcccctcctaacaccctcttactgagacattccgtggttcccaatggtgtgtggtttctgaagtctccctttttacaacaagtcattaaacctagctttgaactatagatgtgtttctgatggtctttggctgatgaacatcaacaagtgtttattaaagctaagtactttttaaacactatcttatttaaatcttgtaatggttttatgtggcagatgttataatcagccctgttttacagatgagaaaacaggcttagagaagttaaatgtgtcatgatcaagatc

SEQ ID NO: 273707 - DNA, 336 bp, Homo sapiens
ccagcagaaaaatgtatttccggcctttcttcctcaccctctgccactgttttaggattgctcagtttcatcaaggtttgaaggataggcaggctctcactaagagagaggtagggagaggggaggtagagacctatgaatgggctcagaggctggactgccagagtctgaaccccagcatctcttctcattagcttgtcatcttggacaaggtactttacttctctgtgccctagttcccccagctgtaaaaatgagacaaaaatgatattgaccacatgcagtcttgttgtaatgattaaaggaggtaatttttataaagcacttcaaacagcg

SEQ ID NO: 273708 - DNA, 998 bp, Homo sapiens
ttgatatatttgttattaatttgttttttctatgaattacttgcttctatactttgccatttatagaatgggtttctgacttttacttacagatttgcagaagtttcctatatattctaattatgaattctttgtcagtttgagatgttgaaagtatcttctccctctcaactttgactatggattcctttgttgaatagaaacctgtaatattaatgaaatcaaatctacatatttttttaccttgtggtttatgatttttaggtcttgtttaagaaaatttccacctttaggtcacaaatattttcctacatttttagtttcactgtttatgtatagattcttactcttgctgaagttcattgtatattatatcaggtaaggatgcagttttatttttctccatattatgggagcttttccccactataacctactaaacagtcagttttttcctgtttcttcgtaattcccttatattcatgagtctctgagctctttttggttctgttggtctgttggtctactcttgagccaataccatgattaaaaaaatttccatggctttatagtgtaacttaatatttgatgggaccagtctcacttctttgtccttctttctgaaaaatgatttcaccatttgtgaacccatttttcatatgttttagaataaattcattaacccctaaaaaattctggttgggattttgattgggattggaattataaaaaacatttgaggaggatggatatctttacaatgttaagccatactatcaaagagcacggtttttttatttatttattcatatatttcattacattatggtctcagaacatggtctgtatgctttcaattctttagaatttgagacttcttttaaaatcattatttggtcagtttatgtgaatgttatatgtacacaatatacacatgcattctttggtttgtggagggttatatacaaatatgagtttattaaatgtcttatttagat

SEQ ID NO: 273709 - DNA, 298 bp, Homo sapiens
taaaaaagctgggcatgatggtgcatacctgtagtcctagctactcaggaggatgaggcaggaggatcacttgaacccaggagttaagaggctgcagtgagccatgattgcaccaccgcacctccaacctgggtgacagagcaagacactgtctctttaaaaaaaaaaaaaaaaaaggtgttcttgagagcaagaggccagaaggaagcaggagcaagcaatggagaaatggtgagaaggtaagcttccactgagcccaggagaacaggagctgaaacagccattcacacttgtccag

SEQ ID NO: 273710 - DNA, 402 bp, Homo sapiens
ggagatgagagcttaggggatcatgtgtgctctgctatgtctccatttgtgagatttttcccaataaaacctattctgtgtgtaacatggtgctcacaagtagtatgtgcatgagactcctttattctcaattgtctcctagaacttctgcactcaaatgtttttttttctcctaccatgatggcactcccttaatgattttgtccagatctcataggttccatctgtaggctagacctctctattgactatgagagggcataaatgaagctactgggatgctgaagatgttctaaatccagatctagatgatggctaaaaggcatgtaagaacaaattgaattatacacatttgctcacatatctctatgtatgttatccttcaataaaaccttacccaaa

SEQ ID NO: 273711 - DNA, 390 bp, Homo sapiens
acgccccagctggtccatagggcagtgagacttgaatcacagagacgcttctctggtgtccagaaaaatccggctctttctagtggcgcttccaagggggaagagattggagagctctccagcaaacccaggcctgagctttgcagaggtctgagctgaggactgagtgtccaaggggctgaggatgtggactgtctttgtgaggtggggtacagccagtgaaggagccagtgttaatttcctgaagctgctgtaacacgggccacacagacttcgtgccttaaagcaacagaaatttcaggccgagtgcggtggctcatgcctgtaatcccagcactttggaaggctaaagtgggcagatcatgaggtcaggagttcaagaccattctg

SEQ ID NO: 273712 - DNA, 445 bp, Homo sapiens
catgtaatgagcagtgagggcaaccagagcttgctttcatcaccatcttggttttagctggctttgcttggtttctttaatgcatcctattttgattggtggagttgtgaccaatactcagaaaacaagtcctgctgattgcctccctcacctggaagggtccaaatctgctcaggtaattgttcagtttggtagtatctattatagagacagcatagcaacatggtgaagcatgcagacatacattgggttcaaatccttgttctactacttaatctccatgtaatcttcagcagattccttaatctgtcttgcctcggtttccatatttttattaaaaatacttaacctccctatgtcagacagtttccctgtctgtaaaatggagaaataacagcctacctcacattcataagacagctaagtacatacgtaagtgctacat

SEQ ID NO: 273713 - DNA, 535 bp, Homo sapiens
acaagttatttggataagaaaatgggcattaagaaaatagcagacttgagatttaggttcactaggaccacttagtgtaagtgtattactggcaaattcaatagccttagagaggtcatcatggttagccttcttcaatccctctgcctagaatactgcaaggtatcaataaatgcttacttaatgaaggaatgccacatttgacatttggctttcccttcacttagcttccgtgaaacttttctgactgcctcgaaaatcacaggctatcacttggaattcagttatctgctattcttaaacaaatgtggacttttttattccttctgtggttcaactcagacactgcaactttgaactgaaataaatgattcactctctagtctaaatgtattcaactggttactgagaaaatttcagatttatactgcttcttccaacttgattacagtactttaatacctgcattccaaatgttaaactacctctaatcctttacatttgtaataaaaacaaatactttacatatttaaaa

SEQ ID NO: 273714 - DNA, 176 bp, Homo sapiens
ttttttttttttttttacaattgcttgaagccctttactttccccttctccacgtctttggctgactttcattcattcttcaggctttgtcacgtctatcacttattttctgactacttccctgaccccaatcctggattagttgccccttctgtcgtcttctatccatccattta

SEQ ID NO: 273715 - DNA, 104 bp, Homo sapiens
tcatttggaaatgaccactcagtctgcatgttactgaggtgtgggataaaatacaaccgtaaatttcaaattgagtgtgatgaacgaggtgagagtgggtgaac

SEQ ID NO: 273716 - DNA, 385 bp, Homo sapiens
tgagacggagtctcaacctgtcacccaggctggagtgcagtggcacaatctcggctcactgcaacctccacctcctgcgttcaagagattctcctgcctcagcctcctgagtagctgggattacaggtgcgcaccatcacgcccggctaatttttgtatttttagtaagacagggtttcaccatgttggtcaggctggtctcgaactcctgacctcgtgatctgtccgcctcggcctcccaaagtgctggaattacaggcgtgagccacccaccgtgcccggccttcccttctttatttacaaccatttcctttcttttggaattaaaaaatgattttgaatgaaaaccacgccaaggctgcccctgacaaactgcctgctattt

SEQ ID NO: 273717 - DNA, 254 bp, Homo sapiens
gcaagcctctgcgtcctgggctcaagccatcctcccacctcagcctcccaagtagctgggactacaggtgtgcgccaccacagcaggctgatttttgtatgcacaaaaaatgtttcataccgatgcagttactaactagcaaagaactggaaacaacctgtcctacagcggggtgatacttagtaaatgagctgtgatacctcaggaggatggaacattatgcatctgctacaaatagtaactgactgctgggg

SEQ ID NO: 273718 - DNA, 449 bp, Homo sapiens
gaatgagcaaacccttcatgatatatggggcagtgtaaagcaactgaatattcaaatcatcagtgtccccaagggtgaagagagaatgaaagattagaaatcctatttaatgaaatattagatcaaaacttcccaaatataacaacaaacctagacatccagatgcaggaggcccaaaggtccccaaacagatacaatgcaaaatcatcttctccacagcacgttataatcaaaccacttaaagtcaaagcaaaagcaaatatactaaaaagagcaaaagaaaatcttctaattacccataaaggaaccaccattagactaacagtggatttctcagcagacaccttacaggccaggagagaaggggatgacattttcaaagtgctgaaagaaaaatactgccacccaaggagaccatgtccagcaaaactattcttcataaaaaaaaa

SEQ ID NO: 273719 - DNA, 365 bp, Homo sapiens
aatgttataaaatgccatcatcaagcagatctgtgctcagccctgtgctgggctttgaggaagatctagagctggtaccaggccagagagggaatgctctttatcaagttcttactatgctttacccacctgatatcaaggtagaggagcatattcccttttcactgctgacaacacttaatgaaattcagagtgtctgaggtcaccaagctcatgaatcactcaacacacacatttgttggccaggcacggtggctcacgcctgtaatccctacactttgggaggctgaggtgggtggatcatgaggtcaggagatcgagaccatcctggccaacatggtgaaaccccgtctctgctaaaaaaa

SEQ ID NO: 273720 - DNA, 279 bp, Homo sapiens
ccacatgcccttctgcagcaccggccacagataagtgtcatccatgctggtggtgatttgactcatgtctcacctgccacacaacagaggcccaggaggcacagcagcctgtggtctctgctcatgattgaaggagcccctaaaacagggccggaaggcccaaaatagccactcaacaaacatctgtcgcataaatggaagtcacgtgcctcattccaagtctttgctgttcttcaaaaaataatggtactccaaaaaataatgatactccagattaca

SEQ ID NO: 273721 - DNA, 551 bp, Homo sapiens
gcccaccaagctgagtttggcattttttctcataatatttacattgggattaggattttagggaacacaccctggaagtgcaggaccctgtgacatcaatgtctaggcactggttatcacttatcacttgattagtgtcatctgtgttggctttctctactgtttttccctttccctactattttcttgggaaacatccagcacatactcaaggtgggagggcagtaagcttgatggtggctagatgtttctgaagacaagagtagggtggccaggtgtggtggctcaagtgtacaataccagcactttgggaggcagaggcaggaggatcccttgggcccaggagttcaaggccagcctgggcaacatagtgagaccctgtctcttaaaaaataacaaaattagcagagtgtggtggactgtggtcccagctacttgggaggctgaggcaggaggattgcttgagagcctgggaggttgagactgcagtgagctatgatcacgcaattgcattccagcctgggtgacagaggaagaccctgtctctaaaa

SEQ ID NO: 273722 - DNA, 622 bp, Homo sapiens
acattgagacaggcagaaaaagtgagagagaaggttgccttcactgagcaagatgagcctcaaagcagcagtgacgagaacataaggtgagggtcacagaagaacggcccaggagctgctctggaaagtacaggggcccactagtcatccctacatcccctcgctgcaggccaaaaaccccaccagtttagaaggtgagtcactgttagggattgggaatcgtgtccccccaaaaatccagatgtcaaaatcctaacctacagtgtctcagaatgtggccctatttggacctacggtcatcggcatatggacttagttaagatgaggttgcggccgggcgcggtggctcacacctgtaatcccagcgcttcgggaggctgaggtgggtggatcacaaggtcaagagatcgagaccatcctggctaacacggtgaagccccatctctactaaaaatacaaaaaattagccagaagtgatggcacacccctgtagtcccagctactcaggaggctgtggcaggagaatcaggagactcacttgaacccgggaggcggaggttgcagtgagccaagatcgcgccactgcactccagcctgggtgacagagtgagactccatctca

SEQ ID NO: 273723 - DNA, 483 bp, Homo sapiens
aaccacaaacaatttttagcaaaagtgtgtcccaaatattaaaagaatgggacagacagtactgaaacattatttgtgatttatctgaaattccagtttaactgggcatcctgcatttcatctagtagccctctcagttttaggcaattagttggtcctggttagtagaaagtttttgtgtcacagaggaactggtcaagtttagcaaagaacaggataaccaaccaccaagagccagaagtgaacgatacccattcaaataccacacagagggaagagccttggcaatgcagatgtaagcattatggtgtccttggagaggctgtcactcagttgggaagaaatgcttctcagtatggtaactaattgtcattagtttgattcccacgtaccaagtcccatgtacatggcacgtgggtctctgctgatacgaacatttctgtctgcttgacctctataaaattgttattctgtattatgtga

SEQ ID NO: 273724 - DNA, 458 bp, Homo sapiens
atctctagtgctcttttcctgattcattttcatcactaccacgtgacatcctatatacatcagaggtccccagttcctgatactggtccgtggcctgttaggaatggggctgcacagcgggaggtgagcagcggggcgagcattacggcctgagcccctcctcctgtcagatcagcagtggtgttagattcccatagaagcacggaccctactgtgaactgcgtcagtgagggatataggttgtgagctccttatgagaatctaatgcctgatgacctgtcactgtctcccatcacccccagatgggaccatccagttgcaggaaaacaagctcagggctgccactgattctacattatgctcatgagaattcgtccagctttgctctcagctatcaacctggggcctagagactggcacattataggagctcaataaatatttgctgagtgaacaaa

SEQ ID NO: 273725 - DNA, 448 bp, Homo sapiens
tagagatgatttaaaacatatgggaggatgtgtgtaggttacatgcaaatacaatttgttttatattagagtgttgagcatccatggattttggtatcttggcaggagggtggtcctggaattagccgccaccatgcccagctaataccccatggatactgagggatttctgtccttgtaccatatacatgagaatctcatttttaaaaatgtctacatgtgattctgttaaactttttacccaatttctgattggtggacatacatgtttttctagtgttctccctcataacaattgaacattatttatacgtaaatcattgcccacatttgccactatttctgggtatacacatttatgtgtctgaattggtctccaaaaaattgaattaattttgcatcaccctttatttgaatcgaagcaagcagtgctttaaaacctgaaaga

SEQ ID NO: 273726 - DNA, 431 bp, Homo sapiens
  misc_feature (138)..(138): n is a, c, g, or t
gtagttcatcagtttttggattgtcaacagatcaacacctctggctgttcaaataattgcctggcccaagaggctgaataaattagaaaagttaaaaagaagtaaaaagtaacgctgacaagttcctgcaaacaaaantacgtttcaggcttactgatatgacaaactgagcctatgaagagcagcaaaattaaaaatcaaactgcagatttaaaacagaatattttgttttaaaagtctccacaataagctttttagaaaagataactttagagttataaaagagttgcaaaaatagcacagacttcccttctgccctttatgcagttttcccttatgttaatatcgtacataataataaaataataatattttacatattgtacataataataaaataaacgaaggaattatccttggtatgatactcc

SEQ ID NO: 273727 - DNA, 136 bp, Homo sapiens
gggtttgtggggagaggaaggccgagggaggagaggaagagattggatccggcgccctgctatgggtgtctccatctgggctgctgctagaaggggcagttgttctcttttttttcttttttagacggagtttttt

SEQ ID NO: 273728 - DNA, 491 bp, Homo sapiens
tttttttaacataattcagtttcttccccaaaaccacaggctttagaatacaacaaatctagattcaaattctgatagcaccacttaatactagttatttactccttctgaccctcagttcccttatctgtaatatagggtgaataccacttacctagcaagctattctgatgattaaatggctcaatatatgtatagcccccactgcagtatctggtaaatggtaggtggccaaccaaagcttattttcctcctgagttctgcatcactcttggtctccccagttggacagtaaagttgtctaggacagagactgtgtgccacgctactttttattccccacacagtgctttgtcagaagcaacagctcaataagtacactacttgttcatttgatctttgcagagagcactaagcttcacgcggtgataaactagaaattgttgtggattgagttgtgtctgtcaaaaagatattttgtagtcctaaac

SEQ ID NO: 273729 - DNA, 351 bp, Homo sapiens
cttttcttctcccatttaccacaatattgtggtgacttgattacttttctcatactggaatagtaaaattaatcccttatctctgaagcaacaacttgtaataattaagagtaattccggttagtgatagcataaaggcggaagcctctagaaatgatcctgttgtgtgctctttgctaagaatattggattacagttttaaggggagtgtgcctaaagatgagtcaattagtttaggattaggcatttaaaatttaactttgacagagagaaggtcatcattaattttaataggagcaaatttcaacaaagtagtaggggcaaaaatcaggttacaggaagaaaggaata

SEQ ID NO: 273730 - DNA, 199 bp, Homo sapiens
tgagagagacagagagagagacccacccgctgagtggccaaggagtcctcatgaagccaaatctgaggccacagccacccacagctgctcagtgagtttcgttatttttctcaaattgtgataagacatacataacaaaatttaccatcttagccatttttaagtgtacagtgctgtagcatcaagtacattcactttt

SEQ ID NO: 273731 - DNA, 346 bp, Homo sapiens
ggggagataagtaagacaaatagtgacgttgcaaagatctgaaacagctctgctacagggccatttgaacaaaagaatgaacacattctagcctgactctgccttgctactctgaaatggttggaagtggagagagaagtgctttgagatttcatcgtagaaagatcgttggtgaatagaccagacatttaggttagctatgcatttcttatgctgttgaatttattttctatggtgagaatctctttgtctgatggcacccatagcctaagataattgatgcacaatacacatgcaggttctgagttcatttggatagtatagtgggaaggaataaaatatttat

SEQ ID NO: 273732 - DNA, 258 bp, Homo sapiens
ctcacagctggactacatctcctaggctgtgtttcagccaatggactatggccaaaagcagggaatgccccttccaggcctggcctataaaaatcccccatgtgctcctctgttctctctttgtccacctgccagctggacattgatgctcaaggcaaccttggaggtcatgtgttgaagatggcagtgtctttgccaaccccactgccagtggactttatgtgaacacaaaataaacttctatgatgtgaatccact

SEQ ID NO: 273733 - DNA, 433 bp, Homo sapiens
ttaaagacggagtctcgctctgttgcccaggctggagtgcagtggcacaatcttggctctcttggctcactgcaagctctgcctcccgggttcacgccattctcctgcctcagcctcccgagtagctgagactacaggcgcttgccaccacgcccagctaattttttgtatttttagtagagacggggtttcaccgtgttagccaggatggtctcgatctcctgacctcgtgatccgcccgcctcggcctcccaaagtgctaggattacaggcatgagctgtactatgcctggctcatttctatacttttaaatcatatcctagaagaagaaccaaacagaaacacagcaacatgactgtcatagtcacagaaattccctcaacctgtttaaaagaaaatactctttcaatctgaatttcatatattcagctt

SEQ ID NO: 273734 - DNA, 155 bp, Homo sapiens
acaatgtgatgcaccaccagaaacatccacatttatcatttgcctgtcttaaattatttttggaatatgctaaattaatacaatgcataggccaggcgcagtggctcacacctgtaatcccagtactttgggagggcgaggcgggcggatcactt

SEQ ID NO: 273735 - DNA, 407 bp, Homo sapiens
tttttttttttgagatggagtcttgctggagtatagtggcactatctcagctcactgcaaactctgcctcctgggttcaagcaattctcctgcctcagcctcccaaatagctgggactacaggcatgcaccaccacgcccagctaatttttgtatttttagtagagacggagttttaccacgttgggcaggatggtctctgtcttgacctcgtgttccgcctggctcggcctcccaaaatgctgggcttacaggcatgagccactgtgcccggccaggacaaatattcctacaagaggcttgattggaatagggttattaagaactaatttcattttttcagtattgtccttcaaaaaagcatgcttctctccatgataggttaataatgtatattggggattaatt

SEQ ID NO: 273736 - DNA, 182 bp, Homo sapiens
ccctccccaggccctgtcctccagaaggatttggatggggtcatcggagagagagagctcgtcctacatggcagcaagtggctcttttcacaaactgtccctgcccctagctgggcatagtggcacgcacctgtagtcccagctactggggaggctgagatgggaggatcacttgagcccag

SEQ ID NO: 273737 - DNA, 532 bp, Homo sapiens
cagacgctcctgtccgggtcgcagtgggacgccatggagcgctccctgcaccgcgtctccctcgggagccggcgtgcccacccggacttgtccttctacctcaccacctttggtcagctgaggctgtccattgatgcccaggaccgggttctgctgcttcacattatagaaggtaaaggcctgatcagcaaacagcctggcacctgtgatccgtatgtgaagatttctttgatccctgaagatagtagactacgccaccagaagacgcagaccgttccagactgcagagacccggctttccacgagcacttcttctttcctgtccaagaggaggatgatcagaagcgtctcttggttactgtgtggaacagggccagccagtccagacagagtggactcattggctgcatgagctttggggtgaagtctctcctgactccagacaaggagatcagtggttggtactacctcctaggggagcacctgggccggaccaagcacttgaaggtggccaggcggcgactgcggccgc

SEQ ID NO: 273738 - DNA, 430 bp, Homo sapiens
cgtggctgcctttttggtaccacccaccatgaggccctgtcctggcatctgcctccaatgtctcttgccctgggctccttgttcccttgcagcatctgacaggggactctattctgtcctctgcagaggctgacttgaaggaccctgggaagcctttaacttggagatgtgcagagtcagctgctgggcttaggtgggccatgagatccgctaatcatgcttccttttttccaattcaagatttctttgatccctgaagatagtagactacgccaccagaagacgcagaccgttccagactgcagagacccggctttccacgagcacttcttcttgtaagagtctggtgcagctgggccctagaaaggagagggaaggagtgtttatctggaaacagctctgtttgccaaatctagaactagatctatgc

SEQ ID NO: 273739 - DNA, 390 bp, Homo sapiens
gagatccgctaatcatgcttccttttttccaattcaagatttctttgatccctgaagatagtagactacgccaccagaagacgcagaccgttccagactgcagagacccggctttccacgagcacttcttcttgtaagagtctggtgcagctgggccctagaaaggagagggaaggagtgtttatctggaaacagctctgtttgccaaatctagaactagatctatgcaaaaaaaaaaaaaaaaaaaaaaccaaaacaaaaaaaaccagtgccttctaaaggatgtctttgttttctcactcacttgtgtccttgcatccctggcaccaggcccagcagcgaggtccacagtgataaggtatcacttggctagctctcataactaaaatg

SEQ ID NO: 273740 - DNA, 487 bp, Homo sapiens
gactcccgatgtggtgggcggggctgaaccctgtggcttctgaggtccctgccagccagagacttgtgtcagctgaggctgtccattgatgcccaggaccgggttctgctgcttcacattatagaaggtaaaggcctgatcagcaaacagcctggcacctgtgatccgtatgtgaagatttctttgatccctgaagatagtagactacgccaccagaagacgcagaccgttccagactgcagagacccggctttccacgagcacttcttctttcctgtccaagaggaggatgatcagaagcgtctcttggttactgtgtggaacagggccagccagtccagacagagtggactcattggctgcatgagctttggggtgaagtctctcctgactccagacaaggagatcagtggttggtactacctcctaggggagcacctgggccggaccaagcacttgaaggtggccaggcggcgactgcggccgc

SEQ ID NO: 273741 - DNA, 449 bp, Homo sapiens
ttgaaagtgctgaaaattgctgcgagtctgggcccctcttacagtggcagcctgttgctctttgatgccctgagagggcatttctgctgtattcggctgcggagctgcaggctcgactgtgcagcttgcgggaaatggcccactgtgactcatctgctggactatgaagccttctgtggctcctcagccaccgataaatgccgctccctgcagttactgggcccagaggatcgtgtttctgtcactgactataagcgacttctggattctggggcaccccatctgttgctggacatcaggcctaagatggaggttatgaagagaagatggctatctgcaaacctgggagcaggctctaaccagacactacatcttccagtgccttgaacttggacttccctccccacagaactgtgagaaataaatatttgttgtttaaaccacccaat

SEQ ID NO: 273742 - DNA, 287 bp, Homo sapiens
gcccttctgtaaatagcagtgtctgctgccctcggagaaggggaaggagcagctggtgcccgcccccgccccactccaccgcttagtcccagcagagcccactaattttgctgctggcagagggcagcgttcctgcagggtcactgggcccttcccctcctttgtgtcatgcaaaggtgggggcatttgtgggtattcaggagtcattcccatgggagggcagctcctaccatgctaagaacttggttgagtttcccaaatgtgtctggtcccaggagacaggctcc

SEQ ID NO: 273743 - DNA, 526 bp, Homo sapiens
ttaagaaaagctactgtatttcattcatgatagccctccacaaaccagcacagcttggtgcaataaagaaaaaatgcccaaaacacagcttctgtcttgggagagagaaagaaaggggaacacacatccaatgttctggcttttcatggggctgcctgaggaattggtttctgtctcacctgactcagagcagtgatggagatatagcatactttggatgcctaggggtcactaagaacaaaggagagctctggagtttgtggaagcaccagagaaaccacagtaccacagataggtgctagaagaagcaagttattacaagattctgaaaaaggaccaaacatacatctctaattggaaatttatatgcacaattccagagaaaatgcatgcccccaaaaagtttgaaaggtacccagaataattagctgggatgataggtgaaagtcttctcttgtatgaaaccagtccatgaagactgggagagatggctactttatcaaatacccaaatctcagaaaaaaaa

SEQ ID NO: 273744 - DNA, 421 bp, Homo sapiens
ggctatgaagttggagcgtggcatgttctagaagcagaaagaaggctggtgaggtagggacacagcaggtagggagtagagtgaggccaagccccaggtcagggctggacctcagggcctaggtccaggtgaaagcactgggcatgatgctgagggcagtagatgctgtgggaggattttaagcagggtgacaagatcaggcttgtactagatgagaacgttggctgtgtaaagatagattgacagtaagcaagagtgaatccagaaaaaaataatctagaaacctgttgcagtgatacaggtgagggatactttgcctttattggatttgaaagtataaaaaaaaaatgaacatctgttgtttagagtaaaagccctgtaaggtatggtataaaatgaaacattttcaaaaatgcccatg

SEQ ID NO: 273745 - DNA, 609 bp, Homo sapiens
ctgggttaagatggcacggtctcggctcaatgaacccatcagcagccaggttctaggacttctccggctttagtgttccaagtagctgggattacagacgcctgccatcacgcccagctcaaatcattttatgaatgcatatttccatctgggtgaaaaaaaaatcacaagcctctctctcttcctactgagcacctgtgaacagtgacctgcagtttgtggctgcagccagtcctcttgcagcctggtgttcttacatttcattctgaggctcacattctcagtcaccatgcagaagaacacccgccccatcctgggtcattacagagtgggtcaatccatctgctgcatctgaagagctgggtccagcttctacagtgaatccatatatttctgtatttcctggataaggaagagcaaaggagctgagctggtggaggaagaagaactaatattaactgactccttattttgtgctagtactgtgctagttacatattttatctcatgtaattcttaccaaactgtaagggggtttcggagtgatggagacaatattgatgttatctccattttagggtgagaaaataaaggctcagaaatgttata

SEQ ID NO: 273746 - DNA, 899 bp, Homo sapiens
ccttggtggcccccacgctgccccacacttgatgtagtgtaaacacctgacttggggcattactttttgtgaatatgttggccaggcttccagaggccagagtgaggggccaggtacccttcgtggtggtccaaacacatccccagccctttcttcagaggccccagcaccatgtggctcatccagggctcacctactccagtaccagggcaaggtgtacagccccaggacccaaaatgcctcccttaaagctgattggttgatttctttattcttatcacatggtagcccacgatcagatctgactctcctgtcctttctttgtgggtctgaaaaataagaactgctgtaatcaaatgtgatctggaggcatcagaacagagcaatctgatgcttcttttcttgcccaggctggagtgcagggcgtgatctcggctcactgcaacctctgcctcccaggttcaagcgattctcctgcctcagactgccgagtggctgggattacaggcatgtgccaccatgcccagcgagtttttttgtatttttagtagagatgggatttcagcatattggccaggctggtcttgagctcctgatcttgtgatctgcctgtcttggccttccaaagtgctgggattgcaggtgtgagtcaccgcgcccggccagagcaacctaatatttcaaaaaaaaaaaaaaaaaaaaacaaaaaagaagcgcgcggagaaaaagggcgggcggcggcctctcgggggaagagccacccacgtcccacttgggggagcggcgcgcgggggggggggagagaggagagcagccggggaacaccggagagacatgtgcaggggggcacacgggtggggggggaaggggtaacccaggaggccaggctggtgtgctgc

SEQ ID NO: 273747 - DNA, 158 bp, Homo sapiens
tggatcatgcttttggtatttcaaccccctaacctcaaaaaaatctctggataatctttgatccttaatttcttagttcacgccttctccacatcttatgagttgtgaagcctaacctcaagatgtctctccaatctatccccttctttctgttccac

SEQ ID NO: 273748 - DNA, 442 bp, Homo sapiens
tgagacggagtctcgctgtgtcacccaggctggagtgcagtagcgcgatctcggctcactgcaagctccgcctcccaggttcacgcccttttcctgcctcagcctcccgagcagctgggactacaggcacccgccacaacgcccggctaattttttgtatttttagtaaagacagggtttcaccgtgttagccaggatggtctcaatctcctgatctcgtgatccacccgacctggcctcccaaagtgctgggattacaggaatgagccaccatacccagcctctagtgtacttaaagttccatcatttaagcttgattttgtttgatccttctggtttgtactcctgccatatcataagctccacaagaatcaggtaatcagacaagaatcatacagtacagactaaaaatatttggcaattaccaaataagtatagtcag

SEQ ID NO: 273749 - DNA, 360 bp, Homo sapiens
ttcctcctgggactgaaataccctcacaaagagaagcaaatcagtgactgaaggtcaatagagaccatcaaggtatgaaaaggaaggaatcggattttccatactggaaacggtggagaaagtgcaaatagtgcctctgtagatcctggatgcggcgatgccctgtgctcttcctcctctcacagtcctacagggtcttgaaatcggaaatggaatagcattctgcccagttttcacatcgtctacccttttggaaaagtatgcaggtgtcatatctttgaaggagctacatttttattactcatctaagatgttgtttaattgttcctatttataataaatatttgtgaaatattaaaa

SEQ ID NO: 273750 - DNA, 418 bp, Homo sapiens
aaagtttgcggcatggaaaggcaattacccaaatgactttttaaaagtatgagaatttgcctggctgaacgttttttaattaatgccgtgagttaacattaataactattcatagcttagtgagctgggcttgaggtgggtttaggaaacatttggtatctctggcagggacagatgttgacctggccggtcggcagcttttacaaacctaaggacttcagggtccggttgcgcatgaggaccggggaggacagagctgtttgcaataggtgtgggcttttatagcattgtgagcatttcacgttagcgtaagtgttgctgctgtgcaggtggtctctggggcttacaatcttccccaatgttcttccccacccctcccaccattctggtgaacaagcctcttgggattctttgaaaa

SEQ ID NO: 273751 - DNA, 275 bp, Homo sapiens
gactaagaagggctggaatgtgtcttcctcacgcagacaggtaaagcacacacaacaataaaagcatggagagaaggaagcaagggcgatgggtgagcgcaaagcgaggaggcaaaacaaaaggcatcctccccggctcctcaggacagttgcagaagagactggataatcctccaggttacagaatgggggtgaaggcacgtgctgtgctgcgccaactccagagctgtgtgcaaccgtgagcatccgtaaacctccctgctgactgtgaccct

SEQ ID NO: 273752 - DNA, 329 bp, Homo sapiens
tcacgcctataatcccagcactttgggaggccgaggtgggcagatcacctgaggtcaggactcacaaattgctaagattacaggtgtgagccactgcacccggccttaaacataacttatatatgcactgggaaaccaaaaaccttgtgtgattcactttgttgcaatattcactttactgaagtggtctagaactgaacctgcaatatttccaaggtatgcctgtagttgtgagatgtcagtgttttacttgaagtgttaaaacattgattttaagttgactgttaaaattaggtatgtgtattattatccctagatcaacagctaaa

SEQ ID NO: 273753 - DNA, 459 bp, Homo sapiens
aacgtgacaaacgggaaccatcctgaatggaaaagctccaaggtgacagaaggcatctctgcccctgcttctcccccagcccctttctgttagaagtcaccaccaggagaagagggacccctgctgcatgaactccaggctgttctgctggaaggaaaggtcaggagaaaggactgtcacctgccagacctcagcatcagagaagggagtcatggactcctctctgttcgtacttcactgaaccgttgaacctcagggttgaagaaaatgacctagtccaactacccatctgatgtaagaatcacatgttcattcattcatgaattcactcattcatttatccatcagttttttgtttgattgattggcttattcattctttcaacatctaatgagtagctactctggcccaggcaatgcacagaagttgaataaaaggcacagaaccttatcacttga

SEQ ID NO: 273754 - DNA, 236 bp, Homo sapiens
aaagactggtaatatgtatgctagctggagaagccacctttcagtcccatctctgcgtatagttgatcgtcgaggaactcgatggtgcagggggaaaggcgtagctttgcagtcagaccttagctaacttcttggccctgctgcttgcttgctgtgtgactttaggctagctaccttgcctctctgttcctctgcttgctcatttggacaacaggaccagacctaggaagattagg

SEQ ID NO: 273755 - DNA, 370 bp, Homo sapiens
aatttttttgtagagaaaaggtctcactccattgctagggctggtctcaaactcctgggctcaaacaatcctcccaccttggcctccagaagtgctaggattaaggcatgagccacagtgccagcaaacgctccatcatcttcagagtttatttaatttttatttttttaaagaaagttgctctgtcgcccaggctggagtgcagtggcacgatctcggctcattgcaagctccgcctcccaggttcacgccattctcctgaacctgggagacagaggttgaggtgaaccaaaatcacaccactgcactccagcctgggcaatggagtgagacttcatctcaaaaaagaaaaaagaaaagaaaagagaat

SEQ ID NO: 273756 - DNA, 293 bp, Homo sapiens
tcccaatggaggacgtggaggaaggagagcaagttcaagagcttattttatttgcttcattgttctatttgtttttgtgcttatttaatcagccaaggtgttgtgattgtatgtatatatgtatgtatgcatgtaagtatatctgcattaacaatatgtttgagactgaggatggtgtataggcagtctggtggttgcatgtgtgtgtgtgtgtgtgtttcacacctacttgcacacttgtgtcccctcatgtcttcaggtctgtcatggaagtgaggaggggagaaagggag

SEQ ID NO: 273757 - DNA, 192 bp, Homo sapiens
ttttttttttggtgtttccataataatctcattttacctacaaaccatgaacacatgatagcaggctcatgcatttcaattgtctgtcatttgtagtataaataattacgtgctataggtaagattttctctgtgttgatgtgaaatagttaatgtcctttatgtggctagaatgagttatcaactagtatt

SEQ ID NO: 273758 - DNA, 414 bp, Homo sapiens
ttcctttaaagtctcaaatatctatcagtgtagaagagtgggaagacaccaaagactccaaagaacaagggcaccaccgcagcaaccaccgcaactcaacatccagtgatcagtcggaccatcccttgctgcggagaaaaagcatgcagtgggcccgaagactgagcagaaaaggcccaaaacactctggtaaaacagctgaaaaaataacccagcagcgactgaacctctacaggaggtcagaaagacaagagcttgctgaacttgtgaaaaatagaatgaaacacttgggtctttctacagtgggatatggtatgctctttaaaaactactgtatatatggactcgtgatttcttgccattagtagtaatatagttggttctaatttaataaagaattgaatttttgcttca

SEQ ID NO: 273759 - DNA, 821 bp, Homo sapiens
tctagtggggccaaaagagctgtttggataagctctttgccgaagaataacgtgagaaggaattatgtctctgaatactttcttaccccatcaaatatgagcaggtaacctgtgctgctgcagccagagggattgctctaaaagcaacctttcaagcaagatgttgttcacgtaaaccttcaatgctcagacactgaagaacatctcctagcactaacaccatccaggaaaacatgacctcacctcaccaattgaactaaataaggcatcaaggaccaattctggaaaaacagagatatgtgaactttcagacagagaattcaaattagtggttttgaaaaaactcagagaaattcaagacaatgcagagaaggaatttagaattttgtcagataaatttaaaaaagattacaataataaaaaagaatcaggtagaaattctggagctaaaaaatgcaattggcatactgaagaatgcattagagtcttttaatagcagaattgatcaagcagaatgaattagtgagcttgaagacaggctatttgaaagtacacagtcagaggagacaaaagaaaaaacaataaaaagcaataaagtacacctacaggagctggaaaatagcctcaaaagggcaaatctaacaattactggcctcaaagaggaggtaaagaaagagataggagtagatagtttattccaaggaataataacacagaacttcccaagagaaagatgccaatatccaggtacaagaaggttattaaacaccaagcagattaacccaaagaaaagtacctcaaggactttaataattaaactc

SEQ ID NO: 273760 - DNA, 263 bp, Homo sapiens
tctagtggggccaaaagagctgtttggataagctctttgccgaagaataacgtgagaaggaattatgtctctgaatactttcttaccccatcaaatatgagcagattgggatttataccaccagctttcctggttctccaccttgcagaaagaagatcctgggacttctagctcagcttctataaccataactaccaacacttttcaaatttaaatcctacaaacaagctgaatttgattaagtattcttcaggtggctctat

SEQ ID NO: 273761 - DNA, 472 bp, Homo sapiens
ggcagcagctgttcctcgttcttaatttctccaatgcctagcatgtgccagactctagaaaaacacttcaaggatgagtaatcatcagttctgttctagaagcacatgtggaacactaaacaagaaatgattgtaaatattagactatctttgccatttttatttgactattatgcttctgctctgatgacttccatgactagactgatcaggccagtggcaggtgtgcaaatcacaacttggcctcccaaactaaggtacaaagttgtgagtcacacgtctgccactggactgatgcgaaggctcagttaagctcatgcactttgcctgaattagcatgtctgatatttctttaaataaacgttgccttccttccttttgcaaaatgaatttccctttctttgggggaagtcatttttcactgaggcctgacttatcaaagctgatggcagagtcgcctggaaggcaacag

SEQ ID NO: 273762 - DNA, 705 bp, Homo sapiens
gcccagtgggcccagagcaaaactcaggcaaaggtgccactagactggccaggaaagcgacaccctaaagatcccataatgctgatatgttaattctattctataagcaccacacagaagtgatagcttttatttcttattttgtctagcctggagacagagctaaggattccttgaactgcaaagtcttttccagttcttagtttatacaatccatactcaccttctgcctaactaagcattgtcatttttgtgccaaatgaagagtaggactcctacgattgtcctcagactctcttggctcaatcctcctgctttaacctttcctacttcaaaaactcctgaagttttgcttccccttctatagaatggaaatatatgtcgcaatacttactgcaaagaaaattatatattttaaaaatagactaaagagatgttgtgagacatcagacatcaatcagatgttgtgagaactgatttctgcatcagaatatctccttgactttacagctatcctttaatcctggctcaaagttccagaagaaagatgatccaatataatactcctatttggactttgagtcatacacattccttcttctgagaaaacgtgcttctgcatgaatcctcccttcattattttcagctcatctattattgaatctgaaaccccaggttaactgactgatcactctcatcagtggc

SEQ ID NO: 273763 - DNA, 521 bp, Homo sapiens
attgaggatgatccactagtgtcgataaacactttatacttgcaagtttgagctcaagcaccattaattcaggagaagaaggccaggcagctgcatcaatatcagcttggctggttttacatgcaagggccccaacatctatagcccctacacaaccagaaaagaagacaatgtgggacacagaagaatgagacttcaatgagaagggcactgacttattttctcccctcttcccaataaatggcaagttgtctctgtttcttctttaatttatccttttatttgatgacttagacctgcattgtccaatcagtacatgtggctactgagcacttgaaatgtgctgaaaaaagtctgaactgagatgtgctgtaagtgtaaaatacacattggagtttgaacagttagtaaaaagaaagaatgtaaaaatatctcattcatccatatatttatattcattacatgttgaaatgataacattttggatgtactgtggtaaaaaaaatatattattaaaagta

SEQ ID NO: 273764 - DNA, 141 bp, Homo sapiens
cctggttgtctataacaaatatgtaatttttaaattagcaacagcgttagactacttcggggaaacctggctctgtgtgccacgaagcagggaagggcttgttcccaggcgcagcagcacttgggcatcccgtggtgaagt

SEQ ID NO: 273765 - DNA, 443 bp, Homo sapiens
gttttgcatggctcggggatgaggtggcgggagcgaaggccagaggccagatcaggagttgtattctgaaggttgtagggagcccttgaggatttgactaagaagatcattattggttctgtttcaagacattcatggcaacagtgaaaaatggacgagaaaacgcatggtagagacaggagaaccatgaagacattgaactgttacacatgagaaataatgagaactgcaagatgggctccaggcagcagggaggtgtgaggaggagacagggcagatgccctgatctgttggctctggaatctgtagggtttgttgttgttgttgttggtttttttaatgtacagttcaaggttgggtgcagtggctcaggcctgtaatcccagcactttctggaggccgagtcaggcggatcacttgaggccaggagttcgagaccaccc

SEQ ID NO: 273766 - DNA, 346 bp, Homo sapiens
agagcctagagcagacctccccattgtcagacgcaaaaggcaagacacctgggtgtttatttgccatctccacaatagtagagagctaagggggcattgacttcctggcctgccccacgcatgaggagctgttgcactcctcaccaacaaagaccctcaggcagagagctacaggagcagtaggaagccatagggtctgtgtgcacctgaaggcaagtgctaaggggaaatgggtggagtacaggcaacacgtttttcaaagaccctacatgatctgacttccctcctaccccaggcacccctgcgacctcaccttctgcaactccccagcccctcacactccagc

SEQ ID NO: 273767 - DNA, 261 bp, Homo sapiens
atttctgatacgactttctatttcacaagactgggtttgggagaaggcatctgtgtgtcaccactggctggcgttcctccctctggtaaaatggctgtctgccaccttgagcccagaacaatgtattgaagtcatgaaataatttgtcagtgttccttttaacactgtagtcatgtattccatgattattaaacttgtacatacctgattagcaaactccaaccaaaaaaagataagcaaacaaaacaaaacaaatacaaa

SEQ ID NO: 273768 - DNA, 400 bp, Homo sapiens
gggccccacgaaccccaaccaccacctgcctggactcagcctgcctctgctgctcaaatcctcacctgcctcagcaccccaagacagacacctcgggccccgcatgggttggagacatttattggcagtcctcatgcacttctctgaccttggagggctcttttggtttaagactgaagcccaggacggagcaaaaggagatggagctgagaaaatgggatcatcctgtgtctatcctgggattctgggcttttctgtccattaattcaccgaaggaggaaacttagctccctgatcattcaaaacacttgtgccttttcccctcaactcctcattttcttttcctgaccaacctccagtcgtctgataaataaatcagtgtgacttgtcaatagcgaaa

SEQ ID NO: 273769 - DNA, 971 bp, Homo sapiens
ttccttacccattcaagttttatcttgagccatgctctcactgcagcactccagtctgggcaacacagcaggatcctatctcaaaaacaaaacttgggtcactttcctggtcattcatggacaaacatatgctcaagagtggcaaaaatttgagttgcccacctggcacattcccagctgagttgaaacaaggtgacaacgctgccttcttgtttcaactctcccactgcaaacaaatgttctttacaaaatctatttagtgccacattgttcctattttgtgcgtttgggtggtgattttgcctgtgaaatggcccccaagcatggtgcttgaagggcgatctagtgtttcaagtacaagaaagttgcaatgtgccttacagagaaaatatgtgtgtgagataagcttcatttgggtgtgagagtgctgttggccaggagttcatgaatgaacaacatatattaaccaagatgtctttaaacagaactacctgtaaaacaagagttaatgaatgaacaacatgtattaaataagtgtctttaaacagaaccacacataagacaaggctacgtattgatcagtttacaaaaatattgggacagaggctctcaggattctaaccctgtatttctcctgtgagcaaattcagtgatcacagtgaccttatgaaacacgactactggccaggtgccatgactcacacctgtaatcccagcactttgggaggccgagatgggcggatcacctgaggtcaggagttcgagaccagcctggccaacatggtgaaacctcgtctcaactaaaaatacaaaaatttgccaggcgtcgtggtggcacatgcctgtaatcccagctactcaggaggctgaggcaggagaattgcttgagcccgggaggcgggggatgcactgagccgagatcatgccactgtactccagcctgggtgacagattgagacactgtctcaaaa

SEQ ID NO: 273770 - DNA, 146 bp, Homo sapiens
aaaaaacccaacaaaagtcagcatctttatccacctgtcccggttccacaaagtgctttgttttacttcattattcgggagcctctggctgctccctgcagacggggtttcccctgctggacctcacagcctgtcatgggagccca

SEQ ID NO: 273771 - DNA, 541 bp, Homo sapiens
gaggacagggaggtggaagaaagaaagggagaagtgtgaggggcgttttgtctgccctgagctctctcatacccacagcccagggcaggcagggctgggcttggagggtggaatggtctgggcagaggtcagtccgaaacttcagccctggagggagctggagctggggctttatcttgctctctttccttattttaacttaatcttgtctttattagttttatagagatagggtctcactatgttgcccaggctggtcttgaactcctgggctcaggaaatcctttcacctcagcctcacaaagtgctgtgattacaggtatgagccactgcacccagctctttcctccttttaaaaacaagaaacctggccaggcacggtggctcatgcctataatctcaataccttgggaagctgaggcaggctgatcacttgaggccaggagttcgagaccagcctggccaacatggtgaaaccctgtctctactaaaaattcaaaaattagctgggcatagtggcacatgcctgtaatcacagcta

SEQ ID NO: 273772 - DNA, 428 bp, Homo sapiens
tctttttgtagttaattgtgtatatattctgggattcttcagtggtataaaagtatactgttgcttttctagatggttttatttttatatagctaccaactacaaatgagcacatcattttttcagtgtggttgaccaaatccttcccatttccatcaccttctccaatataatttatattcttcttctttacccaaatgttcatctattctaactcttcttcacagtccttccgaatacgactttttccaagaatgtggggaaagtatgattttaatgcaaaatgaagaagaacccaatattccctgtctattagagttagtgtaatttttgcccttaaacaaaaaagagtattgtcttattggagagacttaagtagaataaacatacttttctgtcattaataaataatctgatcatcttgtaaa

SEQ ID NO: 273773 - DNA, 478 bp, Homo sapiens
tttctctttttaaactttgggaaagtcaattcttaaatctgaagataaaagccttaaggtccactaacccccttctcccccctggcaatttatatttaaaaagacttcagatcacacataggttggctcatatttagatgcagagaatggctcatatttagaggttgagaaacactcaaagtgaaacaacccacaatcatatcattgttcccttgcacggcggggagagtttagagaaatcaagtcctctctagcaggttgtaacaaaaagaatgttacaagtctcagttaaatttaaaacatttctttggacagaagtttctctttacaggaacattgaattgtcttttcccccttttatgtctctagaatattttgtccactttggtaatcttccattctggttgtttgcgtttacctgtggggaagtcagaaggactagtattttgcaaaccacttaaaactgccgtttaaatgg

SEQ ID NO: 273774 - DNA, 337 bp, Homo sapiens
gatagtaacctaaagaatgccagggtggctatactgagacaaaagagactttaagtcaaaaattgttacaagagcaaaacattacatattgattaaaaaaaaaaaaggtcagtctacaaaggagacatagtaacagaaatagaaataaatcatcctgaagttaacatggaatttcaaggtatctcaactagccaaaatgatcttgaaaacccatgcatgtatggtaaaatgattttcaacaaagttgtcaagaacagtcaataaggaaaggacaatttttctaacagatagtgttggaaaaactggatagccacatgaaaaacaaaactaaaaaaaa

SEQ ID NO: 273775 - DNA, 1067 bp, Homo sapiens
cactagactttcttggttccttctccagaaattccagtctagcctgctcgggtggctctgtccttttcttctcagttgactctctttgtgtctcctctggagtctctggtttggtcatctttggtggctgaagatctgtctcttcaagtgattctcctagtttctcacttggaaaatcttgtttggtctgctctggaggctctagacctgtctcttcatgttgcactctaagtgattcctctggaacccccggttcagtctcctcctctagtaattctaaatttctctctctgactgtggcccccgaaacctcagacatggtttccgttggtggcactggatctggatctgtttccatagctgactctaggaacacatcctctgtaacatttggtttagcctcctctggtggctctaggtctgactctttatgcgtttcatccataggggcctccaaatctttgaaaaactctcccatctctctggatgtttccgactttacctcttggtgtatccctggttcagtttcgcttggtacgtctctcttggactccttggcaattccttcctgggacgtcccgccaggtttcagctgcacgttcttagcactgtctggctccccctctttgaagtcctcttcctcggtctctggctgtggctcttggtaaatctctgctggtagcttcgagtctgcctttgccatggtgtctggttcggcattttcatacaatttatgaagtccaggcagttcaggcctctcaggctccagctctccatcttcatctgggccggaatcataatcctccgggacttcagccatttgcagcttagcagacgcgccgcggcttcctagcaaccccaacttccgatagcgtctctatggataccacgatttccggcagtgtcttcctgactcttccccaggttttgtttgttctttcaagccctgactttaaaaatcgtctgtcacaagcacgcagtaaccctccctgcggcctcatcgccagcctcagcgggccagagctcctgtggccgcccctgggtcagctagcttttcaagcggccgc

SEQ ID NO: 273776 - DNA, 324 bp, Homo sapiens
tttttgtgtttttagtagagatggggtttcaccatgttggccaggctggtctcaaactcctgacctcaggggatctacctgccttggcctcccaaagtgctggtattacaggcctgcgccactgcgcctggcagatatagaacatttctgttaccacagaaagttctgttggacaacactgtcgtaaatcccagggtgctgaggattagaattctgtctctggcccactgaggaaagcaggtctcaggcctagctcctgatgaacccctggatgaaccactgtgaagtgtgtggaataagtctactctgctgaaacagtgggac

SEQ ID NO: 273777 - DNA, 464 bp, Homo sapiens
tacaatacttaaattacttaaaaaatttttttttctcacttcaaattttattattagtatgacaaacatgggctaggatcaaaaactttgtttattccttattatcagagaactctagatcttgaattcattgctaaggttatttgcaagtaaataatctgctgttgtgttctttgattggtggtaagctgcacagcacctaaaactgtcgtataataatttggccaggtgcagtggcaaatgattttaatgccagtgctttgggaggcccaggcaggatcacttgaggccaagagtttgaggccaagaaacatttttatttttttgtttccatgaaaaatagaaataaaaactcatctgggcatggtggcgtgcacctgtagtcctagctacaaggaaggctgaggcgggagtttgaggctgctgagctatgatcgcactactgctctgcagcctgtctctaa

SEQ ID NO: 273778 - DNA, 415 bp, Homo sapiens
actgaagtaaaatgacaaaggatttttttttttaattatactttaagttttagggtacaaatgcacaacgtgcaggtttgttacatacgtatgcatgtgccatgttggtgtgctgcacccattaactcgtcatttagacaaaggatgttaaacaaactggaccctagtgtgcccccaacagtccttcaatcattcacaccaactacacccagccctctgccggcacttttcctgcaatatggctaatatggaaccacttctagtcccacataaacctgatcccactcaagcagttcctctcacagaatgccaccccaccaacccagtttctaaagcgagaaaactagaaaccattactcattctcattcttgccactcccactcagtatcaccccatcccatcaatctagtctgc

SEQ ID NO: 273779 - DNA, 569 bp, Homo sapiens
tgctgcaagatctccgacagaccataccctggaggttgcaagggtttcatttggcctattttggcagcatgttgagcatctaaagtttggattctttagttcttctcaaatatgaacttaccattattatggttatgatcctggtagctaattttttttaacccttcatacctactgttaatcattgttttttcctggaataaattttaaaatatattcaggtaaactatattcatgcataagatgactgtggtgagtatttagtgtaaaagacattttcttttgaaactgcagtattttggataaattacatgtgaacctcaagtcgcctgtgacccaagtgagattgttagtgttctgaatactagtatcatttttagcctttgtgtatctttttatatgaagtgtctacttctcaagctgattataggatgaatgtgcttaaggttgtgtgcatcagtatgcttaacaaatatcattttagtctctggaagaaagcttgctaaatgtaaaggtgaatctcaagtatataaatttttgcattatagtgtatttaaaaatatatgcca

SEQ ID NO: 273780 - DNA, 230 bp, Homo sapiens
ggatgcagcctgtcaccagctggcccaggtggtgacctctgagactgaggcaggcaagccctctccagtaggatctctcaccacgttcccccaccccaacatcttatttacatccagcatctcatgctgtcatattcacttaggcgtcagctgacaatgggacacaccacttgtttttttggaagaaccaccacctcgacccagcacagtggctcatgtctgtaatccca

SEQ ID NO: 273781 - DNA, 402 bp, Homo sapiens
ggcatttttctacttaatcctttacaggcaagtgggagattcccacgtgcctgtctctatcttgctgctgaagaagtggaaggccagagaggaggaagccacgcgcccgaggccgtctggctgttgagaagaccagaggagagcctgaggaggccaggttcgagctcgtgtgtctcagcccagagcctgcagaattttgtgtctgtcgcgacggggtctgaaaacctattctggccgggcaggctggaacccgggcttgttgtgggccgcagaccagctcagtgcagctcgcagccctgccagacggaaagggggaactaggcgcgcagaaagggtacgtgcggaaaaaactcttgcctctgcgctagaacgtccggcagggcccttctgtgaacaagcggc

SEQ ID NO: 273782 - DNA, 494 bp, Homo sapiens
tggatgccggctatagctgcagcccccaaagtcgaagctaccagaacaggttggatgaggatggcccaaagattatggagttgctggccccaaagcaagtcagacactatgggaagtttgcatgaatcatgcccttggatagacaacctaaatcatacctcatcgagcatggatcctggtcagcataccaagtcaaggcaagtaaagactgaagaaatatcacctggtctgcagctccccccagaacgaagtctgctactgatggcagaagcatagatagaccaagggtatcactatgtaatgatggaagaaggaaaaaccccatgcattcactcatgtcttgaatcacctagagaagagagggaatctgccaaagtggacacaatagaaattcagttctaaatttggaggaaatgagacccactctcagataagatgaaaagtaaaagccctaggatccaatggggtattaaacaaatatttaaaagtaaaaa

SEQ ID NO: 273783 - DNA, 204 bp, Homo sapiens
gttacagatggggtctcactatattgcccagggttgtctcgaaattgtgggctcaagcgatgcccccatcttggcctcacaaagtgctgagactacaagcacaaaccactgcacctggccgtcttggtaattgaaatatttagcccttttatatttacataatattgatataattaggtttgaatcatctttttcttcttttaa

SEQ ID NO: 273784 - DNA, 490 bp, Homo sapiens
gctaggagaaagagatggagatgggagtgcctcctacagtagcagcggtgcaaaggacctaaaggcaaatcagaaagtcattctgtgatgtactaaaggtcaaactaagagaaaaataatgtgaatatggcttaagcaaaacgaagcgagccaagaggtaacgcttggttatactgaaatcaaaaaggcatagaattaaaaaacaggtcaaaagtgataaagtggaggaacagtacggccaacttctgtaaatgtaaagccagcatctttatgtgatcttataaatgcctctgatatacgtgggtccatggtttggggccaaagacatagctgtcattcaattgatagctaaaaacttcctgtcactggaaatcaagtcccttctgaggatctttttccatatttatcaagtttctgaaatggtgtggattaaatgtcctcatcagccatttgattttctataaacttaagcctctttgccaatatcatt

SEQ ID NO: 273785 - DNA, 419 bp, Homo sapiens
tgcttttttcccctaataaaaattgtgaacatcattatgactaaattggtcacttataacttgtcaaggaaaaattttctgaaatacatcatcctcaattggctccttcttcgggaatatgacttgttatcatggtatgggtaaaggatggtagagaatcaagaactacaaataatgtacaaatgtgagatctctatctctatcaattgcacttatttaattggccagagaaaatcatagtccgtgtgtatgttcgagtgtgaaagtgtaaccttcccttaagcctgaaagtagagggaaactgggtactagtgaacaatataagaactattacatggtccagaaagaaaagaaagaaggaaagaaagaaaaaaagaaagaaagaaagaaagaaagaaagaaagatagaaagaaagaaa

SEQ ID NO: 273786 - DNA, 429 bp, Homo sapiens
agtctgttccttttctgaacccccttctctatgatttaggtaactacagttgtgcctcacttggcagggatatgttctgaaaaatccattgttaggcaattttgtcattgtgcaaacatcttaagagtgtacttacacaaacctaaatggtatagcctatgtaatatatatatatatatacacacacctaggctatagagtatatatacctaggctatagagtatatatacctaggctatagggtatatatacctaggctatagagtatatatacctaggctatagagtgtatatacctaggctatagagtatatatacctaggctatagagtatagcctgccgctcctaggcaacgaacctgcacaggatgttactgtactgaatgctgtaggcaagtgcaacataatggtaagtatttgtgcaacta

SEQ ID NO: 273787 - DNA, 204 bp, Homo sapiens
ggagacttcaggaggttaggactactgcagcgactatggtcctttggtcaaggaacccaaggatgacattgagatagagataccaaccagatcagcagttctcaaatgagagaggcaacctcacatcaccctcaaccccaatagacttctcctatccctgctgttagccaagtcttcccttctgcccagagagctctcagcctt

SEQ ID NO: 273788 - DNA, 232 bp, Homo sapiens
ttttttttttgcttacgattgctttggctattcagcttcttctttggttgcatatggcttttagaatgttttttttctaattctgtgaaaaataacaatgaatatataaacatttatatattgaatagcatttaatctataaattgctttgggcaatatggccattttaagaacattgaatcttcttatccatgagcatggaatgtttttccatttgtttatgtcatctccg

SEQ ID NO: 273789 - DNA, 149 bp, Homo sapiens
actttatcttaagtctaattcccctggtaacccaacattgctggttttagaatttaatagtcttcagaaattttttaagataaatttgctattttctttattatcttttaattacttttataacatggggtttttgttgtgtgtatata

SEQ ID NO: 273790 - DNA, 512 bp, Homo sapiens
cccagggcccacattaaggctggtgtttctctcatggacggtggagggttgcccccaggcctcagtgtctaggggcttccaagggagaaatttgttgctatatgagcacaatttgttgctgtaaggatggctgctcagagaaaggccattgataatctcactgaaatggacgtggagaaatgttttttaatgatcaactttaaaagttagatttgttagaactaattcagttcaatggagaaaacacaggcctgggtgctggagacctggatggagtttcggctctgattctacctgtgtaacttgaaaaagtctcttgacctgtgagatgccgggcttactatgtcacacagagtatcttccagctctaaacacttgacagtctttcccagctcacgatgctggaattctatgactattctttctaaaatcttgtcaaacgtgcttcttaatatctactctgatttgttacctctaagcactcattaaaagctgaatccaaaccctgacct

SEQ ID NO: 273791 - DNA, 543 bp, Homo sapiens
tgagcgctcctactgcagagccagccgcgccaaataatgtctctatgatactcgagaactttcatttttttccaggctcgttcggatttggggtggtttttggttttgttcccctccccaactcttaccctcaccttttttttttttaaatttttttactggtgttatatctttgattctccttcagccctccccgttctcatttttcttgatcaacatcttttcttgcttctgtccccttctctcaccatatctcttagctcccctccaacctggggggcagtggtgtggagaagctgcaggcctgagattccatctgctctccttcctggagcccagagtggggcaggagaagggggtggcatcttcagctcctcagcactgaggaagaatggggctcttctcatttcacccctccctttctcccctgcccccaggactgggccacttctgggtggggcagtgggtaacagatcggctcacactgaaaatgtaagaactacaaacaaaatttctattaaatcaagttttgtgtctccagaa

SEQ ID NO: 273792 - DNA, 265 bp, Homo sapiens
aactggaatctcagaatgtaactttatttggcataagaatctttgtagatgtaattaaggttagcatcttaatttgaggtcatgctggattgagataagcacgaaatccaccaatgagtgtccttataagagacagaaaaggagaatacaaagaaacgtagggaataatgacatatgaagacaaaagtagagactggagttgaacatatctttggggagccactgttgaacctactatgcctaacagctcaggcctgtcccaagg

SEQ ID NO: 273793 - DNA, 405 bp, Homo sapiens
agcttactcggaataaagttctttgcagatgtaatcagggtaataatctcaacatgagattatcctggattaaattgggccttaaatccaatgactagtatccttataagagccagaaagaaaaaggcaaagagacacacagaaaaggccacatgaagatgaaggcagggattagaatggtgttgtcacaagcccagagaacctggagtctgcagagctggaaagggaaaggaagatcccccaaccagtgtctttggagggggtgcagccctgcccacaccttgatgttgaacttctggcacccaggactgtggaacatacatttctagtgttttaagccaccaagctcgtggtaatttgttatggcagccatgggaaacgaatacaggtctcgatgaagtaaca

SEQ ID NO: 273794 - DNA, 397 bp, Homo sapiens
tacttgggaggctgaggcaggagcattgcttgaacctgggaagcagaggttgcagtgggccgggatcatgccactgcactccagtctaggcaataaagtgagaccctgtctcaaaaaaaaaaaaataggattatgtagagaaaaatatatttgcattcttaacatcacctacaagagtggactttaggtccatgctgtccacagcagcagccacccagccatgtgtggctactgagatgtagccaaaccaagtgtgtcatgactctgaaacaccaggtatgaagcatggaagaggacaacaactttaaataccttaatttttatattgattatgtgttgaaataatattttagatatattgggtttcaaaagtatcattaaagtgaatttcaactat

SEQ ID NO: 273795 - DNA, 328 bp, Homo sapiens
gggaggcagggcgagccccactcctttcctctgccccaggagaggggcagacggggttggggcggagtggagaaactcgatgtccttgggcgggggcgctggcatagctgagaggggaagatgccctgcagaggaaactcacagtggctgagggagcccctggccgcctttgctttcctaacttaggtcgtgaggttcctaccggtccttttgacatctggaaaatgtccccattcactactaacggaggaagggctagaagagaagggtggggaaagggttcccaaaacttggaatgctaactaaagtgctgggaaattgaatagtt

SEQ ID NO: 273796 - DNA, 210 bp, Homo sapiens
caaccaaaaatggtatagaaaaggacaaatggggctgcagcacagcggaacagcgcatcttggggggccgtgtctgggggttcatgctattgttcctgcttctatgtaaaaattaaaataaaacacgatggtacatgttcctttcctttagaaaacttataaaagggccgggtgcggtggctcatatctcctgcaatcccagccttttgg

SEQ ID NO: 273797 - DNA, 533 bp, Homo sapiens
gcaccaagttttgacggttcttgaactttctataaatggaatcatattgtatatactcttgtgtctggcttccttcactgcacattagctgtgagatacatctttgttgctgcatatcatcataatttattcattatcattgtataattttttgttttgttaatatacccagtttattcttctgaagatgagtatttggatagtttccagtttttagctgtctgaataatgccactatgtacactttttaaatgccttttggtgaacaaatatatgcatttcttctggatatatacatacaagtagacttgttttatcagaggatagatacatactcacttttggtagatagtgccaaagaggtttctagagtcattgtaccaattacattcctagcagcagagtatgtgcgttctagttgttccacatgcttgtcaacacttaatattgcttgttttcattttagccatccttttgaggtgtgtgatgtcttttattttttaagaaataaaaatattacatattcagttaaa

SEQ ID NO: 273798 - DNA, 513 bp, Homo sapiens
cttttgctcatattccattggccaagacttagtcacatagatagacacacctggctgtaagtaactctgggaaaaagtctccagctgagaggccatatgccttcttaaaactcagttttggggaaagctttctactactgaaaggaaaacctggatattgggatcaactagtatctgctttaagggaagtcatgttggtctcagacatgactgaacaggtttacagaggccaggtgaggtggctcatgcctaaaatcctagcactttgggaggcagaagcctgcggatcgcttgaggccagaagtttgagaccagcttgggcaacatagcgagaccctaatgaaaatcatcagctgggtgtggtagtgcatgcctgtagtcctagctacttggaagactgatgtgggaggatcccttgcccaggagctcggggctgcagtgagctatgattgtgccactgtgctctgggctgggtgaaagagcaagaccctgtctctatttaaaaaaaaaaaa

SEQ ID NO: 273799 - DNA, 2191 bp, Homo sapiens
agcggaggcggttacctggcaaccgagagatgcggagcgcaaccacctagcggtcggaaagtgcatttttcagagccctaggaatccgagctgacggatccctgacaggggcgactgactcctagttatccccctaacccctaggggccttcagccccaaccccatcatgacatctcctctgtgcagggcggcctccgccaacgccctgcctcctcaggaccaggcttcgacgccctcttccagggtcaagggcagggaggcttcgggcaaacccagccacctccgaggcaagggcacagcccaggcgtggaccccaggccgttccaagggaggatccttccacagaggtgcagggaagccctctgtgcactctcaggtggctgagttacataaaaagatacaactgttagagggtgaccggaaggctttttttgagagctctcagtggaacatcaagaagaaccaggagaccatcagtcagctccgcaaggagactaaggcactggaactaaagctgctggacctgctcaagggagatgagaaagtggtccaggcagtgattcgcgaatggaagtgggagaagccatacctgaagaacaggacaggacaggccctggagcacctagaccaccggctgagggagaaggtgaagcagcagaacgccctgcggcaccaggtggtgttgcggcagaggcggctggaggagctccagctgcagcacagcctgcgccttctggagatggcggaggcgcaaaacagacacacggaggtggccaagaccatgcggaacctggagaaccgcctggagaaggcccagatgaaggcgcaggaggccgagcacattaccagcgtgtacctgcagctcaaggcctatctaatggacgagagcctcaacttggagaaccggctggactccatggaggctgaggtggtgaggaccaaacatgagctggaggcactgcacgtggtgaaccaagaggccctcaatgcccgggacattgccaagaaccagctgcagtacctagaggagaccttggttcgagagcgcaagaagcgggaacgctacataagtgagtgcaagaagcgcgccgaggagaagaaactggagaacgagcgcatggagcgcaagacccaccgcgagcacctgctgctacagtccgacgacaccatccaggacagcctgcatgccaaggaggaggagctgcggcagcgctggagcatgtaccagatggaggtgatctttggcaaggtcaaggacgccactggcactgacgagacgcactcgttggtgcggcggttcctggcccagggcgacaccttcgcgcagttggagacgctcaagagcgagaacgagcagacgttggtgaggctgaagcaggagaagcaacaactgcagcgggagctggaagacctcaagtactcgggggaggccacgctggtgagccagcagaaactgcaagccgaggcgcaggagcgtctcaagaaggaggagcggcggcacgccgaggccaaggaccagctggagcgcgccttgcgggcgatgcaagtggccaaggacagcctggagcacctggccagcaagctgatccacatcactgtggaggacggccgcttcgcgggaaaggagctggatccccaggcagataactatgtgccaaacctgctgggcctcgtggaggaaaagctgctgaaactgcaggcgcagctccagggccacgacgtgcaggagatgctgtgccacatcgctaaccgcgagttcctcgccagcttagagggaaggctgcccgaatacaacacccgcatcgccctgccccttgccacttccaaggacaagttttttgacgaagagagtgaggaggaggacaacgaggtagtgacccgcgcatcactcaagatccgttcccagaaattaatcgaaagtcacaagaagcaccgtcgctctcggaggtcctagactcgtcctgacacccaccaggcggcccccttcggagcccccgatccctccgggtctagcgcaggccccacggggccccttcaggggctgaacgcggcccggaccgggaacggaggcggccagcggcgcccggaggggaggaaggggccgggccagacgttcccacagtaaatctccccagctgggtccgccccggcctcagagttgcgcaataaatgttaccgaccatgaaaaaa

SEQ ID NO: 273800 - DNA, 2463 bp, Homo sapiens
agcggaggcggttacctggcaaccgagagatgcggagcgcaaccacctagcggtcggaaagtgcatttttcagagccctaggaatccgagctgacggatccctgacaggggcgactgactcctagttatccccctaacccctaggggccttcagccccaaccccatcatgacatctcctctgtgcagggcggcctccgccaacgccctgcctcctcaggaccaggcttcgacgccctcttccagggtcaagggcagggaggcttcgggcaaacccagccacctccgaggcaagggcacagcccaggcgtggaccccaggccgttccaagggaggatccttccacagaggtgcagggaagccctctgtgcactctcaggtggctgagttacataaaaagatacaactgttagaatctcgctctgttgccaggtgggagtgcagtggagcgatttcggctcactgcagcctccgcctcccgagaatctcttgaacccgggaggcggaggctgtggtgagccgagattgcaccattgcactgcagcctgggcaacaagagtgaaactccatctcaaaaaacaaaaaaaacgttggatgatggcaaacaagggtctttcctctggggatgttgcacccatgcacccacccagtaactgtgtgtctgtccacctcacctgcctgccagagggtgaccggaaggctttttttgagagctctcagtggaacatcaagaagaaccaggagaccatcagtcagctccgcaaggagactaaggcactggaactaaagctgctggacctgctcaagggagatgagaaagtggtccaggcagtgattcgcgaatggaagtgggagaagccatacctgaagaacaggacaggacaggccctggagcacctagaccaccggctgagggagaaggtgaagcagcagaacgccctgcggcaccaggtggtgttgcggcagaggcggctggaggagctccagctgcagcacagcctgcgccttctggagatggcggaggcgcaaaacagacacacggaggtggccaagaccatgcggaacctggagaaccgcctggagaaggcccagatgaaggcgcaggaggccgagcacattaccagcgtgtacctgcagctcaaggcctatctaatggacgagagcctcaacttggagaaccggctggactccatggaggctgaggtggtgaggaccaaacatgagctggaggcactgcacgtggtgaaccaagaggccctcaatgcccgggacattgccaagaaccagctgcagtacctagaggagaccttggttcgagagcgcaagaagcgggaacgctacataagtgagtgcaagaagcgcgccgaggagaagaaactggagaacgagcgcatggagcgcaagacccaccgcgagcacctgctgctacagtccgacgacaccatccaggacagcctgcatgccaaggaggaggagctgcggcagcgctggagcatgtaccagatggaggtgatctttggcaaggtcaaggacgccactggcactgacgagacgcactcgttggtgcggcggttcctggcccagggcgacaccttcgcgcagttggagacgctcaagagcgagaacgagcagacgttggtgaggctgaagcaggagaagcaacaactgcagcgggagctggaagacctcaagtactcgggggaggccacgctggtgagccagcagaaactgcaagccgaggcgcaggagcgtctcaagaaggaggagcggcggcacgccgaggccaaggaccagctggagcgcgccttgcgggcgatgcaagtggccaaggacagcctggagcacctggccagcaagctgatccacatcactgtggaggacggccgcttcgcgggaaaggagctggatccccaggcagataactatgtgccaaacctgctgggcctcgtggaggaaaagctgctgaaactgcaggcgcagctccagggccacgacgtgcaggagatgctgtgccacatcgctaaccgcgagttcctcgccagcttagagggaaggctgcccgaatacaacacccgcatcgccctgccccttgccacttccaaggacaagttttttgacgaagagagtgaggaggaggacaacgaggtagtgacccgcgcatcactcaagatccgttcccagaaattaatcgaaagtcacaagaagcaccgtcgctctcggaggtcctagactcgtcctgacacccaccaggcggcccccttcggagcccccgatccctccgggtctagcgcaggccccacggggccccttcaggggctgaacgcggcccggaccgggaacggaggcggccagcggcgcccggaggggaggaaggggccgggccagacgttcccacagtaaatctccccagctgggtccgccccggcctcagagttgcgcaataaatgttaccgaccatgaaaaaa

SEQ ID NO: 273801 - DNA, 754 bp, Homo sapiens
agcggaggcggttacctggcaaccgagagatgcggagcgcaaccacctagcggtcggaaagtgcatttttcagagccctaggaatccgagctgacggatccctgacaggggcgactgactcctagttatccccctaacccctaggggccttcagccccaaccccatcatgacatctcctctgtgcagggcggcctccgccaacgccctgcctcctcaggaccaggcttcgacgccctcttccagggtcaagggcagggaggcttcgggcaaacccagccacctccgaggcaagggcacagcccaggcgtggaccccaggccgttccaagggaggatccttccacagaggtgcagggaagccctctgtgcactctcaggtggctgagttacataaaaagatacaactgttagagggtgaccggaaggctttttttgagagctctcagtggaacatcaagaagaaccaggagaccatcagtcagctccgcaaggagactaaggcactggaactaaagctgctggacctgctcaagggagatgagaaagtggtccaggcagtgattcgcgaatggaagtgggagaagccatacctgaagaacaggacaggacaggtttgcccaccctcgccccacctcctccttcatttccagcctgggtcccctcaccactggactccaggctcaccctctccaatccttcctgcacactagctgccattcatgtgctcattcaattaaatctttattactcactt

SEQ ID NO: 273802 - DNA, 550 bp, Homo sapiens
caggagatatggtttgcaaatattttctccaagcctgcagctttgtctttccattctctcttaacaagagtcttacacagaacaaataaggcccaatttatcaatctttccttctatggatcatgctttcagtgtcaagtctaagaactgattgcctagccctagatcctaaagattttaacctatttttttctaaaagttgtatactttcatattttgtatttaagccaatgatccattttgagctaatttttgtagaaggtatgaggtttaggtcaaggttcattattttacctgtgaatgtccagtttctccagcatcatttgttgaaatttctaaccttcctccattgaactatttggctcctttgtcaaaaattaagttggccacatctgtgtaggctatttctgtgtttcatatactatgccattgatctatgtgtctatccctccaccaataacacattgtcttgaatactatagctatacagtaggtcttatcaaaatggtttttaaatgtaaattacgccatgtcagtttcatgctttaaa

SEQ ID NO: 273803 - DNA, 423 bp, Homo sapiens
ttttctggaaacagagtcttgctctgtcacccaggctggagtgcagtggcgcgatctcggctaactgcaaggtccacctccccagttcaagccattctcctgcctcagcctcccgagtagctgggactacaggcgcccgccaccacacctggctgattttttgtatttttagtagagatggggtttcaccattttagccaggatggtcttgatctcctgacctcgtgatccgcccaactcagcctcccagagggctgggattacaggcgtgagccaccatgcccagccagtacctggttttaacttcatgtcactgaaagaagcactgaggagggcttgaatcactgacaccacctttccaccccccaatagtggctgtgcagtgtggaaagtctgtgtacttggggaagagagagcacagtg

SEQ ID NO: 273804 - DNA, 1208 bp, Homo sapiens
gtgatctctcagcagaatagatttattatttgtattgcttgcagaataaagcctatccttgaaagctctgaatcatgggcagtgagctcagtggtatctgaaggacagggcactggccactgcagtcaccatcttctgccaggaagcctgcacctcaggggtgaattctttgccgaaatggattgccaaaacggtcaccagcacatttcccaggagcttgaagttctcaggatccacatgcagcttgtcacagtgcagttcactcagctgggcaaaggtgcccttgagatcatccaggtgctttgtggcatctcccaaggaagtcagcaccttcttgccatgtgccttgactttggggttgcccatgatggcagaggcagaggacaggttgccaaagctgtcaaagaacctctgggtccatgggtagacaaccaggagccttcccagggtttctcctccagcatcttccacattcaccttgccccacaggcttgtgatagtagccttgtcctcctctgtgaaatgacccatggcgtctggactaggagcttattgataacctcagacgttccagaagcgagtgtaacacagattctcctctgcgctatgtggacattgccatcccatgcaacaacaagggagctcactcagtgggtttgatgtggtggatgctggctcgggaagttctgcgcatgcgtggcaccatttcccgtgaacacccatgggaggtcatgcctgatctgtacttctacagagatcctgaagagattgaaaaagaagagcaggctgctgctgagaaggcagtgaccaaggaggaatttcagggtgaatggactgctcccgctcctgagttcactgctactcagcctgaggttgcagactggtctgaaggtgtacaggtgccctctgtgcctattcagcaattccctactgaagactggagcgctcagcctgccacggaagactggtctgcagctcccactgctcaggccactgaatgggtaggagcaaccactgactggtcttaagctgttcttgcataggctcttaagcagcatggaaaaatggttgatggaaaataaacatcagtttctaaaagttgtcttcatttagtttgctttttactccagatcagaatacctgggattgcatatcaaagcataataataaatacatgtctcgacatgagttgtacttctaaaacccac

SEQ ID NO: 273805 - DNA, 787 bp, Homo sapiens
tgtcttttccgtgctacctgcagaggggtccatacggcgttgttctggattcccgtcgtaacttaaagggaaattttcacaatgtccggagcccttgatgtcctgcaaatgaaggaggaggatgtccttaagttccttgcagcaggaacccacttaggtggcaccaatcttgacttccagatggaacagtacatctataaaaggaaaagtgatggcatctatatcataaatctcaagaggacctgggagaagcttctgctggcagctcgtgcaattgttgccattgaaaaccctgctgatgtcagtgttatatcctccaggaatactggccagagggctgtgctgaagtttgctgctgccactggagccactccaattgctggccgcttcactcctggaaccttcactaaccagatccaggcagccttccgggagccacggcttcttgtggttactgaccccagggctgaccaccagcctctcacggaggcatcttatgttaacctacctaccattgcgctgtgtaacacagattctcctctgcgctatgtggacattgccatcccatgcaacaacaaggtaatgattttaggatctagagtttgtgaatgcgtgctctagaaaaaacattcctgtgcacattgttagagcttggagttgaggctactgactggccgatgaactcgcaagtgtaggtagtgtgctacatgaggggcaagttttcgctaacaccacaagggtctctggcccaatgagtggagtttgatagtaattcttgctacaagta

SEQ ID NO: 273806 - DNA, 826 bp, Homo sapiens
tactaggaccacatagtttgtacacagtagaaaaaagcagttagttattgctgtagaatgaactgagtgacagttcttgcttgcttgagaaaaatatactgagcatctagattgggccaggtagtgttgctaggtgctcgggatatatagtagaaaaacaagcctgtcttttttaatgtatgcaggaaatctctggagaagtaagagaggttaaggaaagctgggtatgtgcctgctttacatggagtagtagtgattaagttggccagtgcccagaagtgcttactgggtgccaggattgttgctgtggaatatcgagtaccactaacttttaaattcttcaaagagggctgtgctgaagtttgctgctgccactggagccactccaattgctggccgcttcactcctggaaccttcactaaccagatccaggcagccttccgggagccacggcttcttgtggttactgaccccagggctgaccaccagcctctcacggaggcatcttatgttaacctacctaccattgcgctgtgtaacacagattctcctctgcgctatgtggacattgccatcccatgcaacaacaagggagctcactcagtgggtttgatgtggtggatgctggctcgggaagttctgcgcatgcgtggcaccatttcccgtgaacacccatgggaggtcatgcctgatctgtacttctacagagatcctgaagagagattgaaaaaaaaaaccggttttttgttgaaaagggctttccccaagggaggaatttggggggaaggggctgtgcccccctccccggattcacgtgttctcacc

SEQ ID NO: 273807 - DNA, 1166 bp, Homo sapiens
  misc_feature (21)..(21): n is a, c, g, or t
tggcaggatgagccgggtgtnaatcggcacgaggctgcagaggggtccatacggcgttgttctggattcccgtcgtaacttaaagggaaattttcacaatgtccggagcccttgatgtcctgcaaatgaaggaggaggatgtccttaagttccttgcagcaggaacccacttaggtggcaccaatcttgacttccagatggaacagtacatctataaaaggaaaagtgatggcatctatatcataaatctcaagaggacctgggagaagcttctgctggcagctcgtgcaattgttgccattgaaaaccctgctgatgtcagtgttatatcctccaggaatactggccagagggctgtgctgaagtttgctgctgccactggagccactccaattgctggccgcttcactcctggaaccttcactaaccagatccaggcagccttccgggagccacggcttcttgtggttactgaccccagggctgaccaccagcctctcacggaggcatcttatgttaacctacctaccattgcgctgtgtaacacagattctcctctgcgctatgtggacattgccatcccatgcaacaacaagggagctcactcagtgggtttgatgtggtggatgctggctcgggaagttctgcgcatgcgtggcaccatttcccgtgaacacccatgggaggtcatgcctgatctgtacttctacagagatcctgaagagattgaaaaagaagagcaggctgctgctgagaaggcagtgaccaaggaggaatttcagggtgaatggactgctcccgctcctgagttcactgctactcagcctgaggttgcagactggtctgaaggtgtacaggtgccctctgtgcctattcagcaattccctactgaagactggagcgctcagcctgccacggaagactggtctgcagctcccactgctcaggccactgaatgggtaggagcaaccactgactggtcttaagctgttcttgcataggctcttaagcagcatggaaaaatggttgatggaaaataaacatcagtttctaaaagttgtcttcatttagtttgctttttactccagatcagaatacctgggattgcatatcaaagcataataataaatacatgtctcgacatgagttgtacttctaaaacccac

SEQ ID NO: 273808 - DNA, 1179 bp, Homo sapiens
  misc_feature (16)..(16): n is a, c, g, or t
caggctggtacccccnggagtattggatatcgtcgaccaggcgctcgctgcagaggggtccatacggcgttgttctggattcccgtcgtaacttaaagggaaattttcacaatgtccggagcccttgatgtcctgcaaatgaaggaggaggatgtccttaagttccttgcagcaggaacccacttaggtggcaccaatcttgacttccagatggaacagtacatctataaaaggaaaagtgatggcatctatatcataaatctcaagaggacctgggagaagcttctgctggcagctcgtgcaattgttgccattgaaaaccctgctgatgtcagtgttatatcctccaggaatactggccagagggctgtgctgaagtttgctgctgccactggagccactccaattgctggccgcttcactcctggaaccttcactaaccagatccaggcagccttccgggagccacggcttcttgtggttactgaccccagggctgaccaccagcctctcacggaggcatcttatgttaacctacctaccattgcgctgtgtaacacagattctcctctgcgctatgtggacattgccatcccatgcaacaacaagggagctcactcagtgggtttgatgtggtggatgctggctcgggaagttctgcgcatgcgtggcaccatttcccgtgaacacccatgggaggtcatgcctgatctgtacttctacagagatcctgaagagattgaaaaagaagagcaggctgctgctgagaaggcagtgaccaaggaggaatttcagggtgaatggactgctcccgctcctgagttcactgctactcagcctgaggttgcagactggtctgaaggtgtacaggtgccctctgtgcctattcagcaattccctactgaagactggagcgctcagcctgccacggaagactggtctgcagctcccactgctcaggccactgaatgggtaggagcaaccactgactggtcttaagctgttcttgcataggctcttaagcagcatggaaaaatggttgatggaaaataaacatcagtttctaaaagttgtcttcatttagtttgctttttactccagatcagaatacctgggattgcatatcaaagcataataataaatacatgtctcgacatgagttgtacttctaaaacccac

SEQ ID NO: 273809 - DNA, 1161 bp, Homo sapiens
aaatatacgctaggtagcgaggctgggtggcgcagaggggtccatacggcgttgttctggattcccgtcgtaacttaaagggaaattttcacaatgtccggagcccttgatgtcctgcaaatgaaggaggaggatgtccttaagttccttgcagcaggaacccacttaggtggcaccaatcttgacttccagatggaacagtacatctataaaaggaaaagtgatggcatctatatcataaatctcaagaggacctgggagaagcttctgctggcagctcgtgcaattgttgccattgaaaaccctgctgatgtcagtgttatatcctccaggaatactggccagagggctgtgctgaagtttgctgctgccactggagccactccaattgctggccgcttcactcctggaaccttcactaaccagatccaggcagccttccgggagccacggcttcttgtggttactgaccccagggctgaccaccagcctctcacggaggcatcttatgttaacctacctaccattgcgctgtgtaacacagattctcctctgcgctatgtggacattgccatcccatgcaacaacaagggagctcactcagtgggtttgatgtggtggatgctggctcgggaagttctgcgcatgcgtggcaccatttcccgtgaacacccatgggaggtcatgcctgatctgtacttctacagagatcctgaagagattgaaaaagaagagcaggctgctgctgagaaggcagtgaccaaggaggaatttcagggtgaatggactgctcccgctcctgagttcactgctactcagcctgaggttgcagactggtctgaaggtgtacaggtgccctctgtgcctattcagcaattccctactgaagactggagcgctcagcctgccacggaagactggtctgcagctcccactgctcaggccactgaatgggtaggagcaaccactgactggtcttaagctgttcttgcataggctcttaagcagcatggaaaaatggttgatggaaaataaacatcagtttctaaaagttgtcttcatttagtttgctttttactccagatcagaatacctgggattgcatatcaaagcataataataaatacatgtctcgacatgagttgtacttctaaaacccac

SEQ ID NO: 273810 - DNA, 1154 bp, Homo sapiens
ccacgcgtcgccacgcgtcgccacgcagaggggtccatacggcgttgttctggattcccgtcgtaacttaaagggaaattttcacaatgtccggagcccttgatgtcctgcaaatgaaggaggaggatgtccttaagttccttgcagcaggaacccacttaggtggcaccaatcttgacttccagatggaacagtacatctataaaaggaaaagtgatggcatctatatcataaatctcaagaggacctgggagaagcttctgctggcagctcgtgcaattgttgccattgaaaaccctgctgatgtcagtgttatatcctccaggaatactggccagagggctgtgctgaagtttgctgctgccactggagccactccaattgctggccgcttcactcctggaaccttcactaaccagatccaggcagccttccgggagccacggcttcttgtggttactgaccccagggctgaccaccagcctctcacggaggcatcttatgttaacctacctaccattgcgctgtgtaacacagattctcctctgcgctatgtggacattgccatcccatgcaacaacaagggagctcactcagtgggtttgatgtggtggatgctggctcgggaagttctgcgcatgcgtggcaccatttcccgtgaacacccatgggaggtcatgcctgatctgtacttctacagagatcctgaagagattgaaaaagaagagcaggctgctgctgagaaggcagtgaccaaggaggaatttcagggtgaatggactgctcccgctcctgagttcactgctactcagcctgaggttgcagactggtctgaaggtgtacaggtgccctctgtgcctattcagcaattccctactgaagactggagcgctcagcctgccacggaagactggtctgcagctcccactgctcaggccactgaatgggtaggagcaaccactgactggtcttaagctgttcttgcataggctcttaagcagcatggaaaaatggttgatggaaaataaacatcagtttctaaaagttgtcttcatttagtttgctttttactccagatcagaatacctgggattgcatatcaaagcataataataaatacatgtctcgacatgagttgtacttctaaaacccac

SEQ ID NO: 273811 - DNA, 1188 bp, Homo sapiens
gagagagagagagagagagagagagagagagagagagagagagagagagagagagagagcagaggggtccatacggcgttgttctggattcccgtcgtaacttaaagggaaattttcacaatgtccggagcccttgatgtcctgcaaatgaaggaggaggatgtccttaagttccttgcagcaggaacccacttaggtggcaccaatcttgacttccagatggaacagtacatctataaaaggaaaagtgatggcatctatatcataaatctcaagaggacctgggagaagcttctgctggcagctcgtgcaattgttgccattgaaaaccctgctgatgtcagtgttatatcctccaggaatactggccagagggctgtgctgaagtttgctgctgccactggagccactccaattgctggccgcttcactcctggaaccttcactaaccagatccaggcagccttccgggagccacggcttcttgtggttactgaccccagggctgaccaccagcctctcacggaggcatcttatgttaacctacctaccattgcgctgtgtaacacagattctcctctgcgctatgtggacattgccatcccatgcaacaacaagggagctcactcagtgggtttgatgtggtggatgctggctcgggaagttctgcgcatgcgtggcaccatttcccgtgaacacccatgggaggtcatgcctgatctgtacttctacagagatcctgaagagattgaaaaagaagagcaggctgctgctgagaaggcagtgaccaaggaggaatttcagggtgaatggactgctcccgctcctgagttcactgctactcagcctgaggttgcagactggtctgaaggtgtacaggtgccctctgtgcctattcagcaattccctactgaagactggagcgctcagcctgccacggaagactggtctgcagctcccactgctcaggccactgaatgggtaggagcaaccactgactggtcttaagctgttcttgcataggctcttaagcagcatggaaaaatggttgatggaaaataaacatcagtttctaaaagttgtcttcatttagtttgctttttactccagatcagaatacctgggattgcatatcaaagcataataataaatacatgtctcgacatgagttgtacttctaaaacccac

SEQ ID NO: 273812 - DNA, 1080 bp, Homo sapiens
  misc_feature (21)..(21): n is a, c, g, or t
tggcaggatgagccgggtgtnaatcggcacgaggctgcagaggggtccatacggcgttgttctggattcccgtcgtaacttaaagggaaattttcacaatgtccggagcccttgatgtcctgcaaatgaaggaggaggatgtccttaagttccttgcagcaggaacccacttaggtggcaccaatcttgacttccagatggaacagtacatctataaaaggaaaagtgatggcatctatatcataaatctcaagaggacctgggagaagcttctgctggcagctcgtgcaattgttgccattgaaaaccctgctgatgtcagtgttatatcctccaggaatactggccagagggctgtgctgaagtttgctgctgccactggagccactccaattgctggccgcttcactcctggaaccttcactaaccagatccaggcagccttccgggagccacggcttcttgtggttactgaccccagggctgaccaccagcctctcacggaggcatcttatgttaacctacctaccattgcgctgtgtaacacagattctcctctgcgctatgtggacattgccatcccatgcaacaacaagggagctcactcagtgggtttgatgtggtggatgctggctcgggaagttctgcgcatgcgtggcaccatttcccgtgaacacccatgggaggtcatgcctgatctgtacttctacagagatcctgaagagattgaaaaagaagagcaggctgctgctgagaaggcagtgaccaaggaggaatttcagggtgaatggactgctcccgctcctgagttcactgctactcagcctgaggttgcagactggtctgaaggtgtacaggtgccctctgtgcctattcagcaattccctactgaagactggagcgctcagcctgccacggaagactggtctgcagctcccactgctcaggccactgaatgggtaggagcaaccactgactggtcttaagctgttcttgcataggctcttaagcagcatggaaaaatggttgatggaaaataaacatcacaccacacccaaccccacaacccattctcgggca

SEQ ID NO: 273813 - DNA, 1164 bp, Homo sapiens
  misc_feature (21)..(21): n is a, c, g, or t
tggcaggatgagccgggtgtnaatcggcacgaggctgcagaggggtccatacggcgttgttctggattcccgtcgtaacttaaagggaaattttcacaatgtccggagcccttgatgtcctgcaaatgaaggaggaggatgtccttaagttccttgcagcaggaacccacttaggtggcaccaatcttgacttccagatggaacagtacatctataaaaggaaaagtgatggcatctatatcataaatctcaagaggacctgggagaagcttctgctggcagctcgtgcaattgttgccattgaaaaccctgctgatgtcagtgttatatcctccaggaatactggccagagggctgtgctgaagtttgctgctgccactggagccactccaattgctggccgcttcactcctggaaccttcactaaccagatccaggcagccttccgggagccacggcttcttgtggttactgaccccagggctgaccaccagcctctcacggaggcatcttatgttaacctacctaccattgcgctgtgtaacacagattctcctctgcgctatgtggacattgccatcccatgcaacaacaagggagctcactcagtgggtttgatgtggtggatgctggctcgggaagttctgcgcatgcgtggcaccatttcccgtgaacacccatgggaggtcatgcctgatctgtacttctacagagatcctgaagagattgaaaaagaagagcaggctgctgctgagaaggcagtgaccaaggaggaatttcagggtgaatggactgctcccgctcctgagttcactgctactcagcctgaggttgcagactggtctgaaggtgtacaggtgccctctgtgcctattcagcaattccctactgaagactggagcgctcagcctgccacggaagactggtctgcagctcccactgctcaggccactgaatgggtaggagcaaccactgactggtcttaagctgttcttgcataggctcttaagcagcatggaaaaatggttgatggaaaataaacatcacagatgacatcaacagtggatgcatgatggaatgccacagccagttaagcacaaaaggaaaacatttcaataaaggatcatttgaacaagcgtggtgcacaccaaatatataccccgg

SEQ ID NO: 273814 - DNA, 1378 bp, Homo sapiens
  misc_feature (21)..(21): n is a, c, g, or t
tggcaggatgagccgggtgtnaatcggcacgaggctgcagaggggtccatacggcgttgttctggattcccgtcgtaacttaaagggaaattttcacaatgtccggagcccttgatgtcctgcaaatgaaggaggaggatgtccttaagttccttgcagcaggaacccacttaggtggcaccaatcttgacttccagatggaacagtacatctataaaaggaaaagtgatggcatctatatcataaatctcaagaggacctgggagaagcttctgctggcagctcgtgcaattgttgccattgaaaaccctgctgatgtcagtgttatatcctccaggaatactggccagagggctgtgctgaagtttgctgctgccactggagccactccaattgctggccgcttcactcctggaaccttcactaaccagatccaggcagccttccgggagccacggcttcttgtggttactgaccccagggctgaccaccagcctctcacggaggcatcttatgttaacctacctaccattgcgctgtgtaacacagattctcctctgcgctatgtggacattgccatcccatgcaacaacaagggagctcactcagtgggtttgatgtggtggatgctggctcgggaagttctgcgcatgcgtggcaccatttcccgtgaacacccatgggaggtcatgcctgatctgtacttctacagagatcctgaagagattgaaaaagaagagcaggctgctgctgagaaggcagtgaccaaggaggaatttcagggtgaatggactgctcccgctcctgagttcactgctactcagcctgaggttgcagactggtctgaaggtgtacaggtgccctctgtgcctattcagcaattccctactggtatgtatcaggatagaggtgaatcaagctgatattttgcaacttctcagttttattctaactttaatgatctctgtgacttttatactagctttaagaggttttcattccagtgtgctacagcatctgatagactgctgttgggagtggggtaaggaaaaatactacattgaggacagagctgatggctttttttggtattctcttaacagaagactggagcgctcagcctgccacggaagactggtctgcagctcccactgctcaggccactgaatgggtaggagcaaccactgactggtcttaagctgttcttgcataggctcttaagcagcatggaaaaatggttgatggaaaataaacatcagtttctaaaagttgtcttcatttagtttgctttttactccagatcagaatacctgggattgcatatcaaagcataataataaatacatgtctcgacatgagttgtacttctaaaacccac

SEQ ID NO: 273815 - DNA, 1331 bp, Homo sapiens
ggttcactgctactcagcctgaggttgcagactggtctgaaggtgtacaggtgccctctgtgcctattcagcaattccctactgaagactggagcgctcagcctgccacggaagactggtctgcagctcccactgctcaggccactgaatgggtaggagcaaccactgactgggtcttaagaggctatggcaatctgctcagtgggtccactaatgcggcgttgttctggattcccgtcgtaacttaaagggaaattttcacaatgtccggagcccttgatgtcctgcaaatgaaggaggaggatgtccttaagttccttgcagcaggaacccacttaggtggcaccaatcttgacttccagatggaacagtacatctataaaaggaaaagtgatggcatctatatcataaatctcaagaggacctgggagaagcttctgctggcagctcgtgcaattgttgccattgaaaaccctgctgatgtcagtgttatatcctccaggaatactggccagagggctgtgctgaagtttgctgctgccactggagccactccaattgctggccgcttcactcctggaaccttcactaaccagatccaggcagccttccgggagccacggcttcttgtggttactgaccccagggctgaccaccagcctctcacggaggcatcttatgttaacctacctaccattgcgctgtgtaacacagattctcctctgcgctatgtggacattgccatcccatgcaacaacaagggagctcactcagtgggtttgatgtggtggatgctggctcgggaagttctgcgcatgcgtggcaccatttcccgtgaacacccatgggaggtcatgcctgatctgtacttctacagagatcctgaagagattgaaaaagaagagcaggctgctgctgagaaggcagtgaccaaggaggaatttcagggtgaatggactgctcccgctcctgagttcactgctactcagcctgaggttgcagactggtctgaaggtgtacaggtgccctctgtgcctattcagcaattccctactgaagactggagcgctcagcctgccacggaagactggtctgcagctcccactgctcaggccactgaatgggtaggagcaaccactgactggtcttaagctgttcttgcataggctcttaagcagcatggaaaaatggttgatggaaaataaacatcagtttctaaaagttgtcttcatttagtttgctttttactccagatcagaatacctgggattgcatatcaaagcataataataaatacatgtctcgacatgagttgtacttctaaaacccac

SEQ ID NO: 273816 - DNA, 1399 bp, Homo sapiens
ctggcgccttccagggctagaaaaatgagcttttcctgctcaaatgaagggtgagaagactagtgatgaaagccggtcagactggatctgtctcccgcccggcgcgccccaccttaggcctgcggcccgcacgtggccaggctcgggctggcgggttcccagagtgccccgggagcgggtggaggccgccctccagcggaggctccgagctggggttcggaccaggccgcgggtgggcgggagtgcagaaagcgggctaacatcctgtgttgctatcccttcggagtcccacacggcgattcccgtcgtaacttaaagggaaattttcacaatgtccggagcccttgatgtcctgcaaatgaaggaggaggatgtccttaagttccttgcagcaggaacccacttaggtggcaccaatcttgacttccagatggaacagtacatctataaaaggaaaagtgatggcatctatatcataaatctcaagaggacctgggagaagcttctgctggcagctcgtgcaattgttgccattgaaaaccctgctgatgtcagtgttatatcctccaggaatactggccagagggctgtgctgaagtttgctgctgccactggagccactccaattgctggccgcttcactcctggaaccttcactaaccagatccaggcagccttccgggagccacggcttcttgtggttactgaccccagggctgaccaccagcctctcacggaggcatcttatgttaacctacctaccattgcgctgtgtaacacagattctcctctgcgctatgtggacattgccatcccatgcaacaacaagggagctcactcagtgggtttgatgtggtggatgctggctcgggaagttctgcgcatgcgtggcaccatttcccgtgaacacccatgggaggtcatgcctgatctgtacttctacagagatcctgaagagattgaaaaagaagagcaggctgctgctgagaaggcagtgaccaaggaggaatttcagggtgaatggactgctcccgctcctgagttcactgctactcagcctgaggttgcagactggtctgaaggtgtacaggtgccctctgtgcctattcagcaattccctactgaagactggagcgctcagcctgccacggaagactggtctgcagctcccactgctcaggccactgaatgggtaggagcaaccactgactggtcttaagctgttcttgcataggctcttaagcagcatggaaaaatggttgatggaaaataaacatcagtttctaaaagttgtcttcatttagtttgctttttactccagatcagaatacctgggattgcatatcaaagcataataataaatacatgtctcgacatgagttgtacttctaaaacccac

SEQ ID NO: 273817 - DNA, 1149 bp, Homo sapiens
tgtcttttccgtgctacctgcagaggggtccatacggcgttgttctggattcccgtcgtaacttaaagggaaattttcacaatgtccggagcccttgatgtcctgcaaatgaaggaggaggatgtccttaagttccttgcagcaggaacccacttaggtggcaccaatcttgacttccagatggaacagtacatctataaaaggaaaagtgatggcatctatatcataaatctcaagaggacctgggagaagcttctgctggcagctcgtgcaattgttgccattgaaaaccctgctgatgtcagtgttatatcctccaggaatactggccagagggctgtgctgaagtttgctgctgccactggagccactccaattgctggccgcttcactcctggaaccttcactaaccagatccaggcagccttccgggagccacggcttcttgtggttactgaccccagggctgaccaccagcctctcacggaggcatcttatgttaacctacctaccattgcgctgtgtaacacagattctcctctgcgctatgtggacattgccatcccatgcaacaacaagggagctcactcagtgggtttgatgtggtggatgctggctcgggaagttctgcgcatgcgtggcaccatttcccgtgaacacccatgggaggtcatgcctgatctgtacttctacagagatcctgaagagattgaaaaagaagagcaggctgctgctgagaaggcagtgaccaaggaggaatttcagggtgaatggactgctcccgctcctgagttcactgctactcagcctgaggttgcagactggtctgaaggtgtacaggtgccctctgtgcctattcagcaattccctactgaagactggagcgctcagcctgccacggaagactggtctgcagctcccactgctcaggccactgaatgggtaggagcaaccactgactggtcttaagctgttcttgcataggctcttaagcagcatggaaaaatggttgatggaaaataaacatcagtttctaaaagttgtcttcatttagtttgctttttactccagatcagaatacctgggattgcatatcaaagcataataataaatacatgtctcgacatgagttgtacttctaaaacccac

SEQ ID NO: 273818 - DNA, 1157 bp, Homo sapiens
ggcgttttcacgtgctgaccatgcaagcagtgggtccatacgtgcgtcgttcatggattcccgtcgtaacttaaagggaaattttcacaatgtccggagcccttgatgtcctgcaaatgaaggaggaggatgtccttaagttccttgcagcaggaacccacttaggtggcaccaatcttgacttccagatggaacagtacatctataaaaggaaaagtgatggcatctatatcataaatctcaagaggacctgggagaagcttctgctggcagctcgtgcaattgttgccattgaaaaccctgctgatgtcagtgttatatcctccaggaatactggccagagggctgtgctgaagtttgctgctgccactggagccactccaattgctggccgcttcactcctggaaccttcactaaccagatccaggcagccttccgggagccacggcttcttgtggttactgaccccagggctgaccaccagcctctcacggaggcatcttatgttaacctacctaccattgcgctgtgtaacacagattctcctctgcgctatgtggacattgccatcccatgcaacaacaagggagctcactcagtgggtttgatgtggtggatgctggctcgggaagttctgcgcatgcgtggcaccatttcccgtgaacacccatgggaggtcatgcctgatctgtacttctacagagatcctgaagagattgaaaaagaagagcaggctgctgctgagaaggcagtgaccaaggaggaatttcagggtgaatggactgctcccgctcctgagttcactgctactcagcctgaggttgcagactggtctgaaggtgtacaggtgccctctgtgcctattcagcaattccctactgaagactggagcgctcagcctgccacggaagactggtctgcagctcccactgctcaggccactgaatgggtaggagcaaccactgactggtcttaagctgttcttgcataggctcttaagcagcatggaaaaatggttgatggaaaataaacatcagtttctaaaagttgtcttcatttagtttgctttttactccagatcagaatacctgggattgcatatcaaagcataataataaatacatgtctcgacatgagttgtacttctaaaacccac

SEQ ID NO: 273819 - DNA, 1151 bp, Homo sapiens
ctggcgccttccagggctagaaaaatgagcttttcctgctcaaatgaaggattcccgtcgtaacttaaagggaaattttcacaatgtccggagcccttgatgtcctgcaaatgaaggaggaggatgtccttaagttccttgcagcaggaacccacttaggtggcaccaatcttgacttccagatggaacagtacatctataaaaggaaaagtgatggcatctatatcataaatctcaagaggacctgggagaagcttctgctggcagctcgtgcaattgttgccattgaaaaccctgctgatgtcagtgttatatcctccaggaatactggccagagggctgtgctgaagtttgctgctgccactggagccactccaattgctggccgcttcactcctggaaccttcactaaccagatccaggcagccttccgggagccacggcttcttgtggttactgaccccagggctgaccaccagcctctcacggaggcatcttatgttaacctacctaccattgcgctgtgtaacacagattctcctctgcgctatgtggacattgccatcccatgcaacaacaagggagctcactcagtgggtttgatgtggtggatgctggctcgggaagttctgcgcatgcgtggcaccatttcccgtgaacacccatgggaggtcatgcctgatctgtacttctacagagatcctgaagagattgaaaaagaagagcaggctgctgctgagaaggcagtgaccaaggaggaatttcagggtgaatggactgctcccgctcctgagttcactgctactcagcctgaggttgcagactggtctgaaggtgtacaggtgccctctgtgcctattcagcaattccctactgaagactggagcgctcagcctgccacggaagactggtctgcagctcccactgctcaggccactgaatgggtaggagcaaccactgactggtcttaagctgttcttgcataggctcttaagcagcatggaaaaatggttgatggaaaataaacatcagtttctaaaagttgtcttcatttagtttgctttttactccagatcagaatacctgggattgcatatcaaagcataataataaatacatgtctcgacatgagttgtacttctaaaacccac

SEQ ID NO: 273820 - DNA, 1969 bp, Homo sapiens
tgtcttttccgtgctacctgcagaggggtccatacggcgttgttctggattcccgtcgtaacttaaagggaaattttcacaatgtccggagcccttgatgtcctgcaaatgaaggaggaggatgtccttaagttccttgcagcaggaacccacttaggtggcaccaatcttgacttccagatggaacagtacatctataaaaggaaaagtgatgggttagtcattgctttaattttttgttactccagctgtaagtacaaattttgagcttgctattctcgtggttagttctgggtaatttctttctatcttccttaaatgaagccagacccctacgttgaaaacatactttaaataaatgttcttgttattgagagaaaagatttctgctccaggggaggaatatgtcagttgtctgagttacgggacttgggttgggtcatgaacatgagaaagttcattggctgagtttctaatagctcgcatagtgccttcaacttcataggtacttacacaggctattgaactgaattttgagtggaaagtggggtaagaggtgggaatgaacaatatggtttggaagaaccagaggatggaaggcattaagttggctaaggcacttacttattttagagataaagctaccaaggacttgggagtgacatgctgtaaaggagttttaggatgaatcttgcatcagtgcagattataaaagggaaagagtggcagaaagccaggaagtggattcttaagaaccaatgatggaataagtacagggaaagagaaaggaaagatggatttagccaactgaatctaggctgcacactattaaagctcagggtggaggccagtcttggctcatgaacttctgagtgtcggaagtgtgctatatcaatggcaggattttcgctaacaccagtagagcttgcctctatgactggagtttggtagtactcgctgccacatagagtaaacttgagaagaatgtttgcacagccaggtcaagtgttacaaatccttctgccctcacttaggcatctatatcataaatctcaagaggacctgggagaagcttctgctggcagctcgtgcaattgttgccattgaaaaccctgctgatgtcagtgttatatcctccaggaatactggccagagggctgtgctgaagtttgctgctgccactggagccactccaattgctggccgcttcactcctggaaccttcactaaccagatccaggcagccttccgggagccacggcttcttgtggttactgaccccagggctgaccaccagcctctcacggaggcatcttatgttaacctacctaccattgcgctgtgtaacacagattctcctctgcgctatgtggacattgccatcccatgcaacaacaagggagctcactcagtgggtttgatgtggtggatgctggctcgggaagttctgcgcatgcgtggcaccatttcccgtgaacacccatgggaggtcatgcctgatctgtacttctacagagatcctgaagagattgaaaaagaagagcaggctgctgctgagaaggcagtgaccaaggaggaatttcagggtgaatggactgctcccgctcctgagttcactgctactcagcctgaggttgcagactggtctgaaggtgtacaggtgccctctgtgcctattcagcaattccctactgaagactggagcgctcagcctgccacggaagactggtctgcagctcccactgctcaggccactgaatgggtaggagcaaccactgactggtcttaagctgttcttgcataggctcttaagcagcatggaaaaatggttgatggaaaataaacatcagtttctaaaagttgtcttcatttagtttgctttttactccagatcagaatacctgggattgcatatcaaagcataataataaatacatgtctcgacatgagttgtacttctaaaacccac

SEQ ID NO: 273821 - DNA, 1185 bp, Homo sapiens
tgtcttttccgtgctacctgcagaggggtccatacggcgttgttctggattcccgtcgtaacttaaagggaaattttcacaatgtccggagcccttgatgtcctgcaaatgaaggaggaggatgtccttaagttccttgcagcaggaacccacttaggtggcaccaatcttgacttccagatggaacagtacatctataaaaggaaaagtgatgggttagtcattgctttaattttttgttactccagctgcatctatatcataaatctcaagaggacctgggagaagcttctgctggcagctcgtgcaattgttgccattgaaaaccctgctgatgtcagtgttatatcctccaggaatactggccagagggctgtgctgaagtttgctgctgccactggagccactccaattgctggccgcttcactcctggaaccttcactaaccagatccaggcagccttccgggagccacggcttcttgtggttactgaccccagggctgaccaccagcctctcacggaggcatcttatgttaacctacctaccattgcgctgtgtaacacagattctcctctgcgctatgtggacattgccatcccatgcaacaacaagggagctcactcagtgggtttgatgtggtggatgctggctcgggaagttctgcgcatgcgtggcaccatttcccgtgaacacccatgggaggtcatgcctgatctgtacttctacagagatcctgaagagattgaaaaagaagagcaggctgctgctgagaaggcagtgaccaaggaggaatttcagggtgaatggactgctcccgctcctgagttcactgctactcagcctgaggttgcagactggtctgaaggtgtacaggtgccctctgtgcctattcagcaattccctactgaagactggagcgctcagcctgccacggaagactggtctgcagctcccactgctcaggccactgaatgggtaggagcaaccactgactggtcttaagctgttcttgcataggctcttaagcagcatggaaaaatggttgatggaaaataaacatcagtttctaaaagttgtcttcatttagtttgctttttactccagatcagaatacctgggattgcatatcaaagcataataataaatacatgtctcgacatgagttgtacttctaaaacccac

SEQ ID NO: 273822 - DNA, 1856 bp, Homo sapiens
agagtatgaggtccttttagctctcgtgacgagaaccggcggatgtggcaccaatcttgacttccagatggaacagtacatctataaaaggaaaagtgatgggttagtcattgctttaattttttgttactccagctgtaagtacaaattttgagcttgctattctcgtggttagttctgggtaatttctttctatcttccttaaatgaagccagacccctacgttgaaaacatactttaaataaatgttcttgttattgagagaaaagatttctgctccaggggaggaatatgtcagttgtctgagttacgggacttgggttgggtcatgaacatgagaaagttcattggctgagtttctaatagctcgcatagtgccttcaacttcataggtacttacacaggctattgaactgaattttgagtggaaagtggggtaagaggtgggaatgaacaatatggtttggaagaaccagaggatggaaggcattaagttggctaaggcacttacttattttagagataaagctaccaaggacttgggagtgacatgctgtaaaggagttttaggatgaatcttgcatcagtgcagattataaaagggaaagagtggcagaaagccaggaagtggattcttaagaaccaatgatggaataagtacagggaaagagaaaggaaagatggatttagccaactgaatctaggctgcacactattaaagctcagggtggaggccagtcttggctcatgaacttctgagtgtcggaagtgtgctatatcaatggcaggattttcgctaacaccagtagagcttgcctctatgactggagtttggtagtactcgctgccacatagagtaaacttgagaagaatgtttgcacagccaggtcaagtgttacaaatccttctgccctcacttaggcatctatatcataaatctcaagaggacctgggagaagcttctgctggcagctcgtgcaattgttgccattgaaaaccctgctgatgtcagtgttatatcctccaggaatactggccagagggctgtgctgaagtttgctgctgccactggagccactccaattgctggccgcttcactcctggaaccttcactaaccagatccaggcagccttccgggagccacggcttcttgtggttactgaccccagggctgaccaccagcctctcacggaggcatcttatgttaacctacctaccattgcgctgtgtaacacagattctcctctgcgctatgtggacattgccatcccatgcaacaacaagggagctcactcagtgggtttgatgtggtggatgctggctcgggaagttctgcgcatgcgtggcaccatttcccgtgaacacccatgggaggtcatgcctgatctgtacttctacagagatcctgaagagattgaaaaagaagagcaggctgctgctgagaaggcagtgaccaaggaggaatttcagggtgaatggactgctcccgctcctgagttcactgctactcagcctgaggttgcagactggtctgaaggtgtacaggtgccctctgtgcctattcagcaattccctactgaagactggagcgctcagcctgccacggaagactggtctgcagctcccactgctcaggccactgaatgggtaggagcaaccactgactggtcttaagctgttcttgcataggctcttaagcagcatggaaaaatggttgatggaaaataaacatcagtttctaaaagttgtcttcatttagtttgctttttactccagatcagaatacctgggattgcatatcaaagcataataataaatacatgtctcgacatgagttgtacttctaaaacccac

SEQ ID NO: 273823 - DNA, 1066 bp, Homo sapiens
tgtcttttccgtgctacctgcagaggggtccatacggcgttgttctggattcccgtcgtaacttaaagggaaattttcacaatgtccggagcccttgatgtcctgcaaatgaaggaggaggatgtccttaagcatctatatcataaatctcaagaggacctgggagaagcttctgctggcagctcgtgcaattgttgccattgaaaaccctgctgatgtcagtgttatatcctccaggaatactggccagagggctgtgctgaagtttgctgctgccactggagccactccaattgctggccgcttcactcctggaaccttcactaaccagatccaggcagccttccgggagccacggcttcttgtggttactgaccccagggctgaccaccagcctctcacggaggcatcttatgttaacctacctaccattgcgctgtgtaacacagattctcctctgcgctatgtggacattgccatcccatgcaacaacaagggagctcactcagtgggtttgatgtggtggatgctggctcgggaagttctgcgcatgcgtggcaccatttcccgtgaacacccatgggaggtcatgcctgatctgtacttctacagagatcctgaagagattgaaaaagaagagcaggctgctgctgagaaggcagtgaccaaggaggaatttcagggtgaatggactgctcccgctcctgagttcactgctactcagcctgaggttgcagactggtctgaaggtgtacaggtgccctctgtgcctattcagcaattccctactgaagactggagcgctcagcctgccacggaagactggtctgcagctcccactgctcaggccactgaatgggtaggagcaaccactgactggtcttaagctgttcttgcataggctcttaagcagcatggaaaaatggttgatggaaaataaacatcagtttctaaaagttgtcttcatttagtttgctttttactccagatcagaatacctgggattgcatatcaaagcataataataaatacatgtctcgacatgagttgtacttctaaaacccac

SEQ ID NO: 273824 - DNA, 1162 bp, Homo sapiens
tactaggaccacatagtttgtacacagtagaaaaaagcagttagttattgctgtagaatgaactgagtgacagttcttgcttgcttgagaaaaatatactgagcatctagattgggccaggtagtgttgctaggtgctcgggatatatagtagaaaaacaagcctgtcttttttaatgtatgcaggaaatctctggagaagtaagagaggttaaggaaagctgggtatgtgcctgctttacatggagtagtagtgattaagttggccagtgcccagaagtgcttactgggtgccaggattgttgctgtggaatatcgagtaccactaacttttaaattcttcaaagagggctgtgctgaagtttgctgctgccactggagccactccaattgctggccgcttcactcctggaaccttcactaaccagatccaggcagccttccgggagccacggcttcttgtggttactgaccccagggctgaccaccagcctctcacggaggcatcttatgttaacctacctaccattgcgctgtgtaacacagattctcctctgcgctatgtggacattgccatcccatgcaacaacaagggagctcactcagtgggtttgatgtggtggatgctggctcgggaagttctgcgcatgcgtggcaccatttcccgtgaacacccatgggaggtcatgcctgatctgtacttctacagagatcctgaagagattgaaaaagaagagcaggctgctgctgagaaggcagtgaccaaggaggaatttcagggtgaatggactgctcccgctcctgagttcactgctactcagcctgaggttgcagactggtctgaaggtgtacaggtgccctctgtgcctattcagcaattccctactgaagactggagcgctcagcctgccacggaagactggtctgcagctcccactgctcaggccactgaatgggtaggagcaaccactgactggtcttaagctgttcttgcataggctcttaagcagcatggaaaaatggttgatggaaaataaacatcagtttctaaaagttgtcttcatttagtttgctttttactccagatcagaatacctgggattgcatatcaaagcataataataaatacatgtctcgacatgagttgtacttctaaaacccac

SEQ ID NO: 273825 - DNA, 804 bp, Homo sapiens
  misc_feature (21)..(21): n is a, c, g, or t
tggcaggatgagccgggtgtnaatcggcacgaggctgcagaggggtccatacggcgttgttctggattcccgtcgtaacttaaagggaaattttcacaatgtccggagcccttgatgtcctgcaaatgaaggaggaggatgtccttaagttccttgcagcaggaacccacttaggtggcaccaatcttgacttccagatggaacagtacatctataaaaggaaaagtgatggcatctatatcataaatctcaagaggacctgggagaagcttctgctggcagctcgtgcaattgttgccattgaaaaccctgctgatgtcagtgttatatcctccaggaatactggccagagggctgtgctgaagtttgctgctgccactggagccactccaattgctggccgcttcactcctggaaccttcactaaccagatccaggcagccttccgggagccacggcttcttgtggttactgaccccagggctgaccaccagcctctcacggaggcatcttatgttaacctacctaccattgcgctgtgtaacacagattctcctctgcgctatgtggacattgccatcccatgcaacaacaaggtaatgattttaggatctagagtttgtgaatgcgtgctctagaaaaaacattcctgtgcacattgttagagcttggagttgaggctactgactggccgatgaactcgcaagtgtaggtagtgtgctacatgaggggcaagttttcgctaacaccacaagggtctctggcccaatgagtggagtttgatagtaattcttgctacaagta

SEQ ID NO: 273826 - DNA, 531 bp, Homo sapiens
catgccctgtcccccgtcctgatggccatgccccgtcctggcccatgggaggtcatgcctgatctgtacttctacagagatcctgaagagattgaaaaagaagagcaggctgctgctgagaaggcagtgaccaaggaggaatttcagggtgaatggactgctcccgctcctgagttcactgctactcagcctgaggttgcagactggtctgaaggtgtacaggtgccctctgtgcctattcagcaattccctactgaagactggagcgctcagcctgccacggaagactggtctgcagctcccactgctcaggccactgaatgggtaggagcaaccactgactggtcttaagctgttcttgcataggctcttaagcagcatggaaaaatggttgatggaaaataaacatcagtttctaaaagttgtcttcatttagtttgctttttactccagatcagaatacctgggattgcatatcaaagcataataataaatacatgtctcgacatgagttgtacttctaaaacccac

SEQ ID NO: 273827 - DNA, 1215 bp, Homo sapiens
tgtcttttccgtgctacctgcagaggggtccatacggcgttgttctggattcccgtcgtaacttaaagggaaattttcacaatgtccggagcccttgatgtcctgcaaatgaaggaggaggatgtccttaagttccttgcagcaggaacccacttaggtggcaccaatcttgacttccagatggaacagtacatctataaaaggaaaagtgatgggttagtcattgctttaattttttgttactccagctgtaagtacaaattttgagcttgctattctcgtggttagttctgggtaatttctttctatcttccttaaatgaagccagacccctacgttgaaaacatactttaaataaatgttcttgttattgagagaaaagatttctgctccaggggaggaatatgtcagttgtctgagttacgggacttgggttgggtcatgaacatgagaaagttcattggctgagtttctaatagctcgcatagtgccttcaacttcataggtacttacacaggctattgaactgaattttgagtggaaagtggggtaagaggtgggaatgaacaatatggtttggaagaaccagaggatggaaggcattaagttggctaaggcacttacttattttagagataaagctaccaaggacttgggagtgacatgctgtaaaggagttttaggatgaatcttgcatcagtgcagattataaaagggaaagagtggcagaaagccaggaagtggattcttaagaaccaatgatggaataagtacagggaaagagaaaggaaagatggatttagccaactgaatctaggctgcacactattaaagctcagggtggaggccagtcttggctcatgaacttctgagtgtcggaagtgtgctatatcaatggcaggattttcgctaacaccagtagagcttgcctctatgactggagtttggtagtactcgctgccacatagagtaaacttgagaagaatgtttgcacagccaggtcaagtgttacaaatccttctgccctcacttaggcatctatatcataaatctcaagaggacctgggagaagcttctgctggcagctcgtgcaattgttgccattgaaaaccctgctgatgtcagtgttatatcctccaggaatactggccagtttgtggaacagtggttagtttttatattatagaaataaagcttacagacattgtgagacat

SEQ ID NO: 273828 - DNA, 369 bp, Homo sapiens
gagagagagagagagagagagagagagagagagagagagagagagagagagagagagagcagaggggtccatacggcgttgttctggattcccgtcgtaacttaaagggaaattttcacaatgtccggagcccttgatgtcctgcaaatgaaggaggaggatgtccttaagttccttgcagcaggaacccacttaggtggcaccaatcttgacttccagatggaacagtacatctataaaaggaaaagtgatggcatctatatcataaatctcaagaggacctgggagaagcttctgctggcagctcgtgcagattcacgcgctggtgagagacatccgcaccagcggcgtatctctggacagcttgca

SEQ ID NO: 273829 - DNA, 292 bp, Homo sapiens
ctccagcggaggctccgagctggggttcggaccaggccgcgggtgggcgggagtgcagaaagcgggctaacatcctgtgttgctatcccttcggagtcccacacggcggtgagtctaggcccaggcgctgatttacaccagctacttgggctggtcgggttttcccttcgcgccgtgcgggtcaggagttaaggttctcgggtttttagacaaacaagtggtgacagcacagcgaagtaattccaaagcatccgcctacaatctgcttgaaaatgtctgaaaacaattcatg

SEQ ID NO: 273830 - DNA, 298 bp, Homo sapiens
tgtcttttccgtgctacctgcagaggggtccatacggcgttgttctggattcccgtcgtaacttaaagggaaattttcacaatgtccggagcccttgatgtcctgcaaatgaaggaggaggatgtccttaagttccttgcagcaggaacccacttaggtggcaccaatcttgacttccagatggaacagtacatctataaaaggaaaagtgatgggtattgcatatctatatcatatatctaaggaggccctggagagaggtttttcctgcacagctgcgcacatttttcacataaaa

SEQ ID NO: 273831 - DNA, 659 bp, Homo sapiens
gctcaatcttgataaaatccagcagcaatcgcccatacatgtcataccatctgcgctagctgaacagtgcgatcagacgcaacaacctggaaccgcactcaacacacgtgcagtggtggatgctggctcgggaagttctgcgcatgcgtggcaccatttcccgtgaacacccatgggaggtcatgcctgatctgtacttctacagagatcctgaagagattgaaaaagaagagcaggctgctgctgagaaggcagtgaccaaggaggaatttcagggtgaatggactgctcccgctcctgagttcactgctactcagcctgaggttgcagactggtctgaaggtgtacaggtgccctctgtgcctattcagcaattccctactgaagactggagcgctcagcctgccacggaagactggtctgcagctcccactgctcaggccactgaatgggtaggagcaaccactgactggtcttaagctgttcttgcataggctcttaagcagcatggaaaaatggttgatggaaaataaacatcagtttctaaaagttgtcttcatttagtttgctttttactccagatcagaatacctgggattgcatatcaaagcataataataaatacatgtctcgacatgagttgtacttctaaaacccac

SEQ ID NO: 273832 - DNA, 240 bp, Homo sapiens
gattaatacctctgcttgaagaaagggataattttctgatgacatcattcattacaacatgcagggtataaagagaggacacttcagtcattagccatgccctatgaaatgcagagacaactgcttgcctcatttgctcatcatcaagttttggcctttaaagatgttcaaaactgactacttaaggcatttaaaattaaacacttagcctcgacccccctcagttggcttaaaatctta

SEQ ID NO: 273833 - DNA, 206 bp, Homo sapiens
gattaaataaaaattgtgaagtgactggcccataatagacaatcaataaatcacagttatttttatgaacattatcattatatttattactagttgattgtaactagttggttattactgaattctaatgtcccagtagaaaaagaaggaaagtgaaaattggtatgggcccagtctaagaatgctggctggcgaaaatgatacga

SEQ ID NO: 273834 - DNA, 213 bp, Homo sapiens
gtttttggtagagatggggttttgccatgttgcccaggctggcctcgaactcctgagctcaagtgatccacctgcctcagcctccaaaagtgctgggattacaggcaggagccactgtgccgggcccttgtctattaaattctgtgtgtagttcttgaaagtgtatctcacctcattggtctgcaaggctcatgagtacagggactgtgtctg

SEQ ID NO: 273835 - DNA, 449 bp, Homo sapiens
tttacctcctttcttatggttcataaatccccctttcaatgtgtgtatgtgtagatttgaaactgtgtatctgaacacaaccatgtgtaaggatgtatggaaatgctgtgcaatgttttccatcaattcaagagctgaatttatgaatcctccactgcttatgtaccagacactttcaatgccgtatttataccctcagatgagtgttgcttctttcaaagtagccacactcggaagtggaggaattatcccacaaatgcaagcctgggttggattgccaaggatatttatcttccatctcattgggcttaggtgggctactaaactctgctcaactttttggacctcgattttctaatctgaaaaatgctcctgattaaacctacttcttgggctgttatgcaaattttatgagaaaatgttcataaagaatttatctgtgcctggca

SEQ ID NO: 273836 - DNA, 583 bp, Homo sapiens
tggcccctgtggtggctgaggctactatgttgccaaaacatcaaatcaaggtggctaaggcatgtgaaagttgccagtaccagaatggagtcacttatgtcaaaaccctaacaaagtggagtcaggaggccctaaaaaagttctcaccgcacatgcctataatataccttatcacaagaaattcctgcaggtcccacatgccccacttctgcactcaccctgcaacagagcttatcacaggaatttttcaggcctgcagtatttcagacaagctgccagcaccaggacagttactcagcaacagccatctccaccaatgaataaacgccaactcctgcactgagcttctgtgacccgtgagctttatttcaagctttatttcatggatttctctttgtctttaaaagctttccctttccccaactcccctggatacattaatggcccgtcatagcttgcataccctgcaattgcaatccctctgctattcctagataaacttgtttgttctaaagagcctgtctttctgagtttctttttaggttgacaggcagttccagtagcagcagtagttatggcagtg

SEQ ID NO: 273837 - DNA, 509 bp, Homo sapiens
tcaataatgtcctatttatcatatgaatagtatttttatgtatctttttatgaatagtatttttatgtatctttttaaagaaatctttgactactgcaaagtcacaaattatcctaatttttagaagcttatgcttttacttttcacattagctctcttattcattttaaattaaatttctgtgtatgaaataagccaagtctaaggctcattattttcaaataaatactgatcaacaatatttatcaacaagactagccttctatttcattatactggagcccttgttaaaactcaggtgtgtttgcgagtctgttcctgaaccattttgttccactggtttatctctccttgtacacaccccacatttaattactgcagctatacaaaatcttgaaatctgacacattaattcctccaaatttgtttttctacttcaagattatcttggctactttcagtccctttcactgtctatataaattgaagaatcatatcatcaaatctac

SEQ ID NO: 273838 - DNA, 412 bp, Homo sapiens
caagaactatttaatccttccaataagcccatgaggtaagttctcttaccatccctagtttacaggtgaggaaactgaggcacagaggggcgagcaacttgtccaaggtcaccccactactgagtgtcacagctggactctacacctggccgcctggctctagagactgggctgttggcctctttcctagaatgccttgacagaaggaatctgagaaagcatttcatctggttttcaagctgtgctcttagagtcttcatcaagtcctcaggggcccagggatgagggctctggtgggacccagtgtgggggtggtacacaggcacaaccagagaagcaccaactctgtctgctttatgtgctggcttttaagggcagctcctctcaaagaaaggattccatggctttaaaa

SEQ ID NO: 273839 - DNA, 350 bp, Homo sapiens
cagagtctcatttgaggcgtgcaaactctgagcaatctcttagatttcccagaagggtgtcaattaggcagttggaaatatgactggagttccaaagggagatctggcctggaggtataagtttgtgaatcaagagtgcacagatggaattaaaagctataagattagaaagaatcatcaaataatatgagtgtggaaagaggagaggtccaaggacagagtcctaaagagcctagatggtagaaaaagagtagaatccagcaaaggagattgagaagagcagccagagaggtaggaggacaaccaggcatttcttcatatttacaataaatgggttgcactacaccacc

SEQ ID NO: 273840 - DNA, 335 bp, Homo sapiens
ggggattcaggctgaatgttagtctggaatgcatttggcctgaagcagcaagtgctgggtgatacagttccctggtaaacagccgagagctggccgctagtttggcccaacctgcaacggaagaaggccttaagtacaggagaaaaagatctttgccaattggataatcatggaaatttagaagaagtacagctcgaactagacgtaaaggacagaatgtgtctgtctagctgaccagccaaccatcggtccatcactttcatcctccaaactagtgatttgttgatgaattggtttcaatactttgttttaaaatgttgaataaaaagtaaatg

SEQ ID NO: 273841 - DNA, 237 bp, Homo sapiens
tgacagagcgagacactgtctcaaacaaaaaacaccagattgacttttgatcatctttccttatggaatattacaaagatagtgtcaaaagatggaaaagacaagaactagagagaaagcagattccatttcagatgaagggagacctgggctaagccttcagcttcagagagcctggggtggatgaagaggagcaagcacttgggatggtttgggttttccagctgaaatatgtta

SEQ ID NO: 273842 - DNA, 169 bp, Homo sapiens
aggtctaggctcctgatgcatactccagaagacccacgaaccagcccccagcattagctgcccaaggcccagggtccagttccctagcaatgacccagaagagcccagggcccagccccgagcacttgctcaggcctaccgggcagcccttgggaaccaggatcagact

SEQ ID NO: 273843 - DNA, 340 bp, Homo sapiens
gatctttctaattctttcttaactaacttattcaaggggctagcatcagaatcttttttctgtactgaccaatttatgtctaaatgggagaatttggcatcagtctgcatttgaaaaacaatatcacacagaaaagattgataatgaatagactgttcatttatttttcaagaatagttttctttaaagtaatgtaattttgagataagttttgtattatgtataagtcacatattagtttttagatgtaacttaatttttaaaacttcttcaaaccacttaaattttgaattgtgtatgtacaaattaattttatattgacctatgtatttttcaggat

SEQ ID NO: 273844 - DNA, 513 bp, Homo sapiens
cttcagtgtcggaggatgaacatcttctgcaggtggatgataggagcaggtgcatgacagtgtgaagaaggtacttaatgccactgaactgcacccctaaaaatggttattacagtaagctgtacggtaagtcaattggaccacacacacacacaagtgaagaaagcgttcaacaccacagcaagtaaacaggtcagtttgggacaccagtgtgactgggggcagctttctctccatggccctgtgtgcaggaaagaacaccctctcgtgtgtggaatcactctgtgacacagtattgtacaacagaggtcacacactttttccataaaagaccaaagtaaatatcttaggccttatagggggccatacagtctctgccgcaactactcaactttgccgtcatgggcctgaagacaaccgcagaaacaacctgtacataaatgggtttgactgtgttccaagaaaactttactgacaaatacagctggccaagcagtcatatgctgaccactg

SEQ ID NO: 273845 - DNA, 364 bp, Homo sapiens
tttttttttgaaaatctgacattaggaaattaaacctcttctgcaagatccagttttctccagaataaaagttttaaagattttttttctttttgtaatttaaaataattcaggtttacaatattttgagaatgtagacatataggggaaaagtgggtattcttccacaaggctaacactttgtaatgcatctttccagcctcttctctgcaaaagatttcttaaagaaaaactggacactttatatactgtctcataatttgtgtttttacctaacactcccatgtatttccaggtttatagatggctaccttttagatactttttataacatcattttatagatcattataattaagaggtc

SEQ ID NO: 273846 - DNA, 504 bp, Homo sapiens
agttctcacagcccgaggaagatgctgcggcgattcccactttacggctaatgccaggcccaggtatgccataccgctgtcagggctctcaccaccccaccttgggtgactcacacccagcaagatggggagcgtgggacctgactcagaagctggtgctcacctgagtccctctcctgcgggtttaactggcaccttctcctggggagaagcaaagccagaggtcctgggccgtctcctccagacatgtgtgcagacgaagggacaggaagcgacgatgagtggaactgatgattggacttcatcctgaccaagaggcacacacagccagtgactgcagaagtgaccacgtccccccgcaggggtcctgagaacagagctcgtggcctggcctgcgttagcttcacaccagcctagatgactgcaagaaattcaaagagaaggcagatggaacgtgctgtgagaggttctcaaaggcaaagagctaattaaaaagtctgtttc

SEQ ID NO: 273847 - DNA, 434 bp, Homo sapiens
ttctgcttttccatttccccattattgtcaataatgtcatccttttgttctcatggcataatatgcatggagctgctctatgtgccctgacagtgcagcgactccactccatgttaagctcaagagacacttgagccataaaggacaaagttgtggccttagccaacagagcccttgctccccaaacagtacaatctatgacataatccaccaggaagtcccaagccattagttaaaatgtggaacttcagagaaagggagtgtttgttttcacaaagaaatcttgatgattcttcctgacttcagcctgtcctctgtccctttactttctcagtacctccactctggccagagtttgcccccatctgcctgcctgcctcctgcttctttcagctgccacaattccataccgtactttgcccactgggactttc

SEQ ID NO: 273848 - DNA, 432 bp, Homo sapiens
tcagcacgaccaagagggaagaagaagagaggagtgaaatttctcaattaaactgtgggtaactttgggaaggaaggggctttgaaagcctcattcattctgtgttcctttcagaacagaagcttgcatctgcacttgccatttttgccaagacgatctgtggagggctctggaggtagtgctattgcattcaaactacttctttgacaacatgaagcttcaagtccacagaactgtccccaaatatacattttggtggaggagcggaataagtgcttcctaaaaagtctttctctaaggctcactgattccacacattaccttgtgaaaaaggacaccatggcctcgatctccatggccaaataaataaaggaaatggaatttcacaatgcatattagcacattagagaggccgagaggtcctgcagggga

SEQ ID NO: 273849 - DNA, 262 bp, Homo sapiens
gcaaaaataggacttgaacccaggacctccaggtgtttctgggtgttctttgagttcctccatcctgaatcaatagtcaagtatcatgtataaatggagccacagtcctcaaggataaacactaactgcttgtaggccactgcaggccattcagtacagtgttttattgtgctgaaaagtcacctgtttccagaagtgcttccccaatgcaggctttctaaagtcatcatgtagagtaaattattttcccctaacaaactat

SEQ ID NO: 273850 - DNA, 569 bp, Homo sapiens
aagatccccttttggcaaactgaaaggcctttcagctctggcatgtgtacatcaaccatggcattcaagccacaatatcaaaaccaatcactgatttggcaattacccaacaaagtatccacattattggggaaaatatatttttagaaagctgttatccctactctcataaaaattacacaaataatttgaaatagagtgtggtgggggtagacaactaaatgaacaagaacccaaaggatcataaactgaaatagttactggggtcaggaagataatattaatgagagaagcaaggttggcctattataacaaggagtgggtttcgctgcggcaaagttacaacaaccttcatcatttaagtaaaacagccactaattgaatagctttagctggcttttgccaattgggaaaggggatgcactattattaaatggtctatgttcttcaaacaagccagaaatccaatatttatgtgaaatttcctgaaatacaaataacagcaactaggcaaatttggtggagcaaacaaaaccttcatgggatggatttggcaagtgggccactac

SEQ ID NO: 273851 - DNA, 303 bp, Homo sapiens
gtgtgggattacaggtgtgagccaccacacttggcttaattgagcattttctatgattccactttctttcttttcttagcttctcagttaattgttaatttttttttttaattttagtttttttagtttggcttttagttcccccagagtttgcagtctacagctaatccaagcccactttcaaataacaccatgccactttacaggtagtggaagtaccttataataacgcagtaatcctattttctctctctagtctcttacatcattgctgctattctttttacttatatataagcatac

SEQ ID NO: 273852 - DNA, 294 bp, Homo sapiens
aggggtctggtgtgtcctcttggggtcggcttcctgctggccatctgaaggtttgcatttggggcgggggtgacactggcatgcagagaagaatgtcagaaaactccaagtcacacagtatatgcactgtctgaatccgttttcagctctagttttcctacctgggaaatggatgaagcaggggattccttcatgtcaaggggcctgtacagtggagctgagggacatgctttaggagtacctgaggcctcttggaatgaaacatctaagccactacccctgcctctcaggtcg

SEQ ID NO: 273853 - DNA, 211 bp, Homo sapiens
gggggtggtgtgagtgctgccagggaaccgccggggcaatgttcctggccctccattcccagggctgccctaagcctcggtttcctcatcaggaaaatggaaaagtgaatcgctactgggctcaggtttagggagagagtgtgcttctggaaggtctgccagtaatgtcgctctacttggtggaggagtgaggtgcagccctgatgggcgg

SEQ ID NO: 273854 - DNA, 183 bp, Homo sapiens
ggttttaccgtgttggccaggctggtctcaaactcctgacctcaaagtgctgggattacaggtgtgagccactgcacccggccctgacagcacttcttaacaaattaccagatgccctttctctctcctgcgacggcgggatgcagtcaactccaggccacactcactgggcacctaccctgt

SEQ ID NO: 273855 - DNA, 1936 bp, Homo sapiens
aggggaaaatggggagtgactgttaatgagtatcaggtttcctttggggatgatgaaaatgctctggaataaagtagtggtgatgttcaactttgtgactaaattgaaaactgctggattgtacactttaaatgggcgaatttatggccatggaagcaggtctctcagaggtaaaaagtgagttacagtcacgtgatgatctcttgagaattatagaaatggaacgattgcaattacacagagaattattaaaaataggagagtgccaaaatgctcaaggaaataaaacaagacttgaatcatcttatttgccttctattaaagaaccagaaaggaaaataaaagagctgttttcagtgatgcaagatcaaccaaatcatgaaaaagaattgaacaagataagaagccaactccaacaggtggaagagtaccataactctgagcaggaaagaatgaggaatgaaatctctgacctaacagaagagcttcatcagaaggagatcactatagcaactgtcacaaagaaagctgcccttctggaaaaacagttaaaaatggaattagaaataaaagaaaaaatgttagcaaaacaaaaggtctcagatatgaaatataaagctgtcagaactgaaaacacacatctaaaaggaatgatgggagatttagaccccggagaatacatgagtatggacttcactaacagggaacagtcaaggcatacatctattaataaactgcaatatgagaatgaaaggctccgaaatgatcttgcaaaacttcatgtcaatggaaaatcaacctggactaatcaaaacacctatgaagaaacaggaagatatgcctatcaaagccaaataaaagtggaacaaaatgaagagagacttagtcatgactgtgagccaaacagaagtacaatgcctcccttgccaccttcgacatttcaagccaaagaaatgacaagtcctttggttagtgatgatgatgtattcccactgtctcccccagatatgtccttcccagcatctttggctgcacagcatttccttctggaagaagagaaacgagcaaaagaacttgaaaaacttctaaatacacatattgatgaactgcaaagacacacagaatttactcttaataaatactccaagctaaaacaaaatagacacatatgagcttttaaacttttttatttgcttcccccccccacccccgccaagaaaaaaagctctggcaaaatatttacaaagctgattaatgaaaccaagaaattctgttctgtttccttgagtaaataatttccgtaaggcagctagaaaatagtaagtattttgttctataaagctgttcacatttctgcattaacatgctaaattgtcctgctgtagagttactataaaataaacatgactattccaaaagagatttttttccagtctaaggaatattttggaatcaaatatgcagttttttttccccacttgaatcatgtatactgaaaacccatttcctcagcaactacacaaaataagagaaagggaagtgctatattccagatacaaatgactcaaaggcagctcagttgtactggttttgaaaactcaaggattttataaataaaaatatttaagtatttccagttatgtaaacactctaaaattctataattttttggaaaaaaaaagctatagctttattgtttttacattcacctttataatgtctgtctgtttcaacacaatgaaggtatatggaatgtgcaatttacaaacctaaaatatatgtgccaaaaattaacgcttttttgttagtactaattacttcatggacacaaacaagataaaggaaatataaagcattactgttgctacattttcctttgtaatcacttctgtttttaatacaataaaggaatgtaaaattcaatggacttgaagca

SEQ ID NO: 273856 - DNA, 258 bp, Homo sapiens
agtgtgagttgtcagattatatccagaagtggggataaggatacaagagttaatttttaagtgactgaccttaagagttgtagtctaagaatgtgattaattagaaagaatgagtatttctatcagaataatctgaataattcttagaatcattataatcaaaaccagtttcaattgtttaatgtcctagtttgccacaagttgtcaaataaagtcataataagcttaacaacaaaataaaatatcattaaaggaaga

SEQ ID NO: 273857 - DNA, 380 bp, Homo sapiens
cttctccatggctcactaggaactgtaacctcagaggaagagtaagcaaggccgtgacagggaacactcagctggccccaggcaggacatgccagcatctgtacttcccgcacgtccgtctatccatgcggtgtcagtttatcccatactgacatgtataccaagagaatattttcttcttttcagcatgacatgtactccttacccccagggtcttcctctacccctgagtgtgctttgccttctaaagacacccagcataggccgggcacagtggctcaggcctataatcccagcactttggaaggctgaggtgggcggatcacgagatcagaagatcgagaccatcctggctaacacagtgaaaccccatctctact

SEQ ID NO: 273858 - DNA, 436 bp, Homo sapiens
aatgtgaggtcctgttccagccaattgaaactggacacggcagtagggtggacatgtcaggttataaatgaccctgtctcgtttgttcagtgtactctcgtggctaagctgctggcgagtgtaccctttctgcagaaaatagaaaaatggccttgctgagaaaattaaatttatgttcaagtgccatttctttacggcaccagggaacaaggctttcaaacaagtcttagggttttactatctcaaaataattgttttttatggttgcggtagggatcaaagttcgtttttcccccatgttgttaaccagttagtccaccaccattatttacacatatattaaaaaataattgcaaaattattgaataggaacttacctttttttacagaagcaattcacatttattatagaaaaaatgaaaataaatataatgta

SEQ ID NO: 273859 - DNA, 816 bp, Homo sapiens
ggagcttcccggctgctttgtttacctaatcaagcccgggcaatggcgggcgcccctcccccagcctcgctgccgccttgcagtttgatctcagactgctgtgctagcaatcagcgagactccgtgggcgtaggaccctccgagccagtctatttttcaggagcattgaactgaccagttatatttatatctgggagaactacaggctgttcaatttgccttgggattctccatggacttggtattcagccttcttaggagttgactttggctactactggttccatcgtatggctcatgaatttcctactctcccctggccctcttcatacccccttcagtatatgctgttcatcttcaattcaatcttctttaccaatttgtgatccatacagaggtcatcaataacctgtggtccttgtggaaactgattcttaatactcctagccatcatagggttccatcatggcagaaatcgttatttgcatagacaaaaattatgctggtgtcttattattggactaacatcttgggaccattggcagcagacaatgaacaaagtgtatatgggtttaacacatcccatttaatacctttggaccaatcaagtgcagtccatcacttatttttcatatggactcacattctgggcacaccgattcttcaataagtttctggcatattagggcgggtgggcccggtaacacgacttggcccggaaaatccgaaggccgggaaaagtcctcttatcacttattcagatagatataagcgacggcgggtggtataagctcgaagggggggacccgcggggac

SEQ ID NO: 273860 - DNA, 1091 bp, Homo sapiens
ctacacagaatcggctgttgagtgtgctctcagtggagctttggttttagctgttctctgacaaagagcttgttctgagctgcacatctcgtcctctttgttcagcctcaggcttcaagcattgaatcctaaatattctccagctgggaatcagacaagggcagaaatgaagaacccagaagcccagcaggatgtttcagtttcccagggatttcgcatgttgttttacacgatgaaacccagtgaaacttcattccaaacattagaagaggtgcctgattatgtaaaaaaggcaactccatttttcatttctttgatgctgcttgaacttgttgtcagctggattctcaaaggaaagccaccaggtcgcctggatgatgctttaacgtcaatctcagctggtgttctgtctcgacttccaagtctatttttcaggagcattgaactgaccagttatatttatatctgggagaactacaggctgttcaatttgccttgggattctccatggacttggtattcagccttcttaggagttgactttggctactactggttccatcgtatggctcatgaatttcctactctcccctggccctcttcatacccccttcagtatatgctgttcatcttcaattcaatcttctttaccaatttgtgatccatacagaggtcatcaataacctgtggtccttgtggaaactgattcttaatactcctagccatcatagggttccatcatggcagaaatcgttatttgcatagacaaaaattatgctggtgtcttattattggactaacatcttgggaccattggcagcagacaatgaacaaagtgtatatgggtttaacacatcccatttaatacctttggaccaatcaagtgcagtccatcacttatttttcatatggactcacattctgggcacaccgattcttcaataagtttctggcatattagggcgggtgggcccggtaacacgacttggcccggaaaatccgaaggccgggaaaagtcctcttatcacttattcagatagatataagcgacggcgggtggtataagctcgaagggggggacccgcggggac

SEQ ID NO: 273861 - DNA, 549 bp, Homo sapiens
tagttgaaaggagagttcagaggagcctcattagagtttagtcaaggagagaatctttgtcattaatgaggtgcatctttctttttaatctatgtatttctatgagatgtcttttttttttttgctcttatagctattgaaattaatattgaaatatttttatgagaaaaaagtttttatgctatttataaaatgaaataattaaaatagtaagaaaagcatgtcttaccattgaattgaacattttattatatagagattctcttttactttgatagtgatttttatcttaaagtctattttgtctggtatctactatataggtgtacaagctttcttttggttagtatttgtctaatatatactttttctttttttcactttcattttatttttttattttatttttgtgttttgagacagtcttgccctgttgcccaggctggagcgcagtggcacgatctcagctcactgcaatctctgcctccagggtttaagagattctcctgcctcagtctcccaagtagctagaattacaggagtgcacca

SEQ ID NO: 273862 - DNA, 297 bp, Homo sapiens
gcctggtaaaatgaaagaagtcaggaagggagttgggtgcaacccaagaagagggctcttctacagagtttcagtttctgttgtacctctttaaatagcagctgccccataaacttcatggtagaaggtttagaaagccaaagactcaacctccattctccactataggtcccaaacatagactctgcccaggcctgaatactacatctcgaaagtgtttaaaaatttcctttgttttccaattagcagcagacttcatactaatccctgcttttcttacctgctttttttcctcct

SEQ ID NO: 273863 - DNA, 343 bp, Homo sapiens
ttttttaagtttcaaggggagggccatctacacccagtatatctctcaggatattcacagtgttgcttttctccactctctccttgtttccagcttccacactcgatttctcaccgagatttgaatcccagtcactgaactcccttgtatctctttctcatgactttccttttaccatttggactttaacttttctacctgattattgacttagtttaaaccccaggattccaggccctcggactcccaccttccactcaaagtcagactggtccagcccttcttcttatattacaggaatctagataaaaatacagtaaacccaagagaacagtactaaaca

SEQ ID NO: 273864 - DNA, 1639 bp, Homo sapiens
  misc_feature (1)..(1): n is a, c, g, or t
  misc_feature (44)..(44): n is a, c, g, or t
  misc_feature (759)..(759): n is a, c, g, or t
  misc_feature (1115)..(1115): n is a, c, g, or t
  misc_feature (1478)..(1478): n is a, c, g, or t
  misc_feature (1552)..(1552): n is a, c, g, or t
nttttttggagataaaaatgacaaaggagaacctcctgaacagnatccagtttgcttttagctttagccatctctctgacctcagtgctgctggactcagttccaagatctaactgtcaaatgctttaggggaaacgggaagagaagtccctggagtaacccatgtgcgcagcctggcactgttttcacttgcctttggaaatgaaggtgcagaaaccatgggaggaacctgatgaaatgcctggtctaacaggaggatgcagagaaagttatgaagagaggatcctgaggaatttgctcctgggccatgaagatgggaagctgagtcagagtgcagttcttcacccaatcccacagccacacgtgcctgcttgctcacgggatcttcccactctcctcgggaaggcttccgagctgcttcctcaggatgtcctgtgatagcagcctgacctgtcaaagccatgcgaataccatctgttcagttatataacttgagatctgggaagaattctcaataggcaaggtttcactacattgaccaggctggtcttcaacttctgacctcagtggcttctagaagagtgagtctggaaaatactgcccctactttcaaatgggagaaagcctcccttgtactaagtttgcaatcattagaaaactgttgatatacagcaaaagaaactaccatcagagtgaacaggcaacctacagaatgggagaaaatttttgcaatctactcatctgacaaagggctaatanccagaatctacaaagaactcaaacaaatttacaagaaaaaacaaacaaccccatcaaaaagtgggcaaaggatatgaacagacacttctcaaaagaagacatttatgcagccaacagacacatgaaaaaatgctcatcatcactggccatcagagaaatgcaaatcaaaatcacaatgagataccatctcacaccagttagaaaggcagtcattaaaaagtcaggaaacaacaggtgctggagaggatgtggagaaataggaacacttttacactattagtgggactgtaaactggttcaaccattgtggaagacagtgtggcgattcctcaaggatccagaactagaaataccanttgacccagccatcccattactgggtatatacccaaaggattataaatcatgctgctataaagacacatgcacacgtatgtttattgtggcactattcacaatagcaaagacttggaaccaacccaaatgtccatcagtgatagactagattaagaaaatgtggcacatatacaccatggaatactatgcagccataaaaaaggatgagttcatgtcctttgtagggacatggatgaagctggaaaccatcattctcagcaaactatcgcaaggacaaaaaaccaaatactgcatgttctcactcataggtgggaattgaacaatgagaacacttggacacaggaaggggaacatcacacacnggggcctgttgtggggtggggggaggggagagggatagcattaggagatatacctaatgtaaatgacgagttantgggtgcagcacaccaacatggcacatgtatacatgtgtaacaaacctgcatgttgtgtacatgtaccctagaacttaaagtataat

SEQ ID NO: 273865 - DNA, 573 bp, Homo sapiens
ctcatttctaggggaagaagcataggaataagaatcaaaagattcacattctaatcttggcccagcctccaaacagcagtgtgacgtggtccaagaagtggcgctgccctaaacactcattacatcttcacagcatgaacaggaacctgatgaaatgcctggtctaacaggaggatgcagagaaagttatgaagagaggatcctgaggaatttgctcctgggccatgaagatgggaagctgagtcagagtgcagttcttcacccaatcccacagccacacgtgcctgcttgctcacgggatcttcccactctcctcgggaaggcttccgagctgcttcctcaggatgtcctgtgatagcagcctgacctgtcaaagccatgcgaataccatctgttcagttatataacttgagatctgggaagaattctcaatgtaggatttgctgcccaaatcaaatcattttcagaaaggagattaagcattctttgctgggaaaaggagaaattaccagaaaaattatcatttcactgagtataaacaaacctttgtccaaaatacacaaatgaaaatga

SEQ ID NO: 273866 - DNA, 407 bp, Homo sapiens
tagctgggattacaggtggccaccaccacacctggctaattttttgtatgttttgcagaggcaaggtttcactacattgaccaggctggtcttcaacttctgacctcaggtaatccacccacctcagcctcccaaagtgctgggattacaggcctgagccaccacgcccagctctcagttgtttcttaatttgcctgccagtttgttttttatatgatactaattgaaatggaggtccttcttaaatgaacttctttcacaaacaaaaacattagttttggcagtgatggcttacaagagtgtgttctataatacctactttgcagatgcaatttgaattcttcaatatgagttatttggatttcttttttctgaaattctttctaatgagatttttgtggattttt

SEQ ID NO: 273867 - DNA, 307 bp, Homo sapiens
aaggttacctttgaggttctttcagctctaatgattgtagcatatcccctgatgttctctgttatcactgtagtgggctgaaatgtccccccccaccaaattcatgtccacctggagtcttatttagtgacctaattattttaaaatagcattttttttttagctgggcatggtggtgggcacctgtaattccagctactcgggaggccgaggcacaaaaattgcttgaacctgggaggcagagtttgcagtcagctgagatcgcaccattgcactccaccctgggcgacagagcaagactcttctc

SEQ ID NO: 273868 - DNA, 633 bp, Homo sapiens
gttacgggaagacacatcggtgcagtggttgcccacctggcttcaactagaatctccacaggggcttaaaagctgtttctgatgaaaatgtaaacaaaatttgagaaacgatgcagtgaactattttgacctatcattctaacataccaatccaaccacattgcaccctctttagaactctcagataatttttcatcaatgatagaagaaattccacactccaggtgtgctgtgaggggcttccccgacctaactcccatccctattcaggctgtttagcatcctgagtgtgtgcatgtacacacacacacacataaacgcacacacataaacacacacaacatgcatgcacacacatataaccacacagacacacccacatacataaacacacatataacacacacataaacacacaacacacacatgcacatacatacacagagaatgcagcacacacatgcacacaagcttgcacacacaaacacacaacacacatgtaacacacatgaacacacttaacacacataagcacacatacacagagaacacagcacacacatgcacacatacttgcacacacaaacacacacaacatacacatgcatgcacataaacagacacataacacac

SEQ ID NO: 273869 - DNA, 310 bp, Homo sapiens
tgaacttagcccattcatatactgttagtttgttggctcatttatatgtaaactcctggctcatcaactccagtgaccactcagcttcacattggaagagtatttaggactcggggctccctatataaatgtaccactgcctcccattaaagtcattctggggttcatcccagaataactgaattagaatctcatgtgggcctaagtgtttgaattttaaaaagctcctccggaagctctgctaggtttgagacccactggtttaggtaatttcatgacaggtttaggcagctaatataaggaattctca

SEQ ID NO: 273870 - DNA, 380 bp, Homo sapiens
agttataatgttgaaaaatgaaatatcaaattgtcaaaaatataaatagaaggaaaaatactgaagacaattaactagctttctaaaaattatttttgaattagtgatttttgagtgagatgggggtctcacttcatcacctaggctggtctcaaaccactgggctcaactgatttttccacctcagcttcccatagttctcggactatagaggtgagcaaccattcctggcggagaaagcatttcttatttctgaacagacatttatgtgctccatggtagtaaatgcatagattttatttatcctcacaacaacaataaaaggagcaagaacagttatggaaaattttagccagaaaatatatctcaaaatcttctag

SEQ ID NO: 273871 - DNA, 344 bp, Homo sapiens
actatcaaatatatttatctcatgtcccctatgttctatagacacaatgaagggaaaacactaatgtgtttatctgaacaatgcctaggggatgatgaagcagacttggaaggaacccgggccgttgagtgcccatttagtagtggggctgctctacaaccccagaccatttacattagcaccattaggttagagagatttaaaagatcttttttctttgattgattgattgattgattgattggagacagagcctcactctgtcacccaaactgaggttgcagtgagccgagatcacgccactgaactccagcctgggtgacagaacaagactccatctcaaa

SEQ ID NO: 273872 - DNA, 181 bp, Homo sapiens
agcaagagactcctcagagagccaggactctaactaacttagcaagttctcatcctttcagaaccagcagggagaagcatttcccccaggtcttccttctggactaagggattcagtcagaaggaaaagcaggaactctggattctgccccccagcttggcttggcaagatggtgggagtt

SEQ ID NO: 273873 - DNA, 308 bp, Homo sapiens
accgagagatgttccggattctgagtctgttccgtcttgtggttgaaaatggactgcccaggagcacacgagccacgcggtgcccccttggctgccccacgaggtgcaggggacgtgggcactcgcggcctgtgctgggcgagggagcaagggacgggtcttcgctgaggatttagagcatgcagggaacgagggctgctggcagtgctggagggactgtgaggctgcagagagctcagattttacaagttgatgggtttcatggatagaggcccctattttgattaaaaaatgcactcttcccactg

SEQ ID NO: 273874 - DNA, 842 bp, Homo sapiens
ttccagagacctaaagagatcccaagggcgcctgggacaccccttcctccccttagctccagacgtcctggaaatctgtgatgtctgctggcctctgtagagggaacaccagccgcagccacctccacgtcagtcaccgcagagaaaggaagatttgtggaaggaatacagcaaatcaacgcctcctcgcaaagcactttccctggatgttgaaacagtgactgcaaactcagaggcccttcaggggcttaagccaggattcgttcagcccatcctacggctgctgcacgtgaggcccgaggcccttgctgcatctgcactgcacccacgccgctgagaggatctcacttgtctgacccgtcagtggctatcttactgtccgtgtctgtggctcaggcagcaaagctctggaccacataacctgcccagggtcgcccagcgggtgagagatgctcttaggatcagatgacagattccacctctagatgcctgtctggggctgctgtaacagaacacccatgagctgggaggcttaaaaccgtggggatttgctggtttacagttctggaggcaggcatctgagatgagggcgctggtggggtggcactgcagcccaaggttctaggggatgatcctcctgccgcttccagcttctggtggctcctggcacttccttgccttgtggccaagtcactccaagctctgcctccgtcttctcttggcccctcgctgtgtctgtctcttgtaaggatatttattggagttggtatccatccagatagtccaggatggtttcatctcaagatccttaacttaattaaatctgcaaacaacctttttct

SEQ ID NO: 273875 - DNA, 536 bp, Homo sapiens
gcttcctgcccttgaatatcaaactccagattcttcaccctttggactctcagacctacaccagtggtttgccattggctctcaggccttcagccacagactgaaggctacactgtcagcttccctaccttagaggctttgggacttgaactgagccactactggtttcattgctcctcagcttatagatggccaactgtgggattttcacttgtgatcatgtgagtcaattctccttaataaactccttttcatatacacataatcctattagttctgtccctctggagaaccctaatacagtctcctagtgtttagatagctgaagtggtcacaggctcaggaaacacaatactcagttggcttagaattcttggaaggtctctaaagaaggacaggcacaaacaaaggaagactgtgaagagtaaaataaatacttaatccctcaatgcacagacagcctgcaatttcacaagcatcaagaagattctgggtaatatgatctcaacaaatggacatgaggcaccagaggccaa

SEQ ID NO: 273876 - DNA, 306 bp, Homo sapiens
ggtagatgtcatgatcttatatctagaaaaacttaaaaactccacaaaaaactctaagtttaatacagtttttgattaaaaaccaacaaataaaaatccataacatttccatacactaataatgaattaagtgaaaaagaaatcgagaaggcaatttcatctacaatagctacaaaaataaaatatttagggaatacacttgatctataaggtgaaatacatctacttcaaaaatacaacaaaactttgatgaaagaaaatgtagaggacacaaacaaatggaaagacatctcatcttcatggaat

SEQ ID NO: 273877 - DNA, 652 bp, Homo sapiens
ctgaaatggagccacaaaaaagttttcagtaagacagtgacatgatttaattttcctttaaagtcattattctggagctatgcagaaaatagattggaggtagacaagaatggaagcagggagaccagtagggaagctattgtaatagtctaggtgagagaagatggtggcttgcaccaggggcaagctcagataggaagtttaggagatgggtttgcaatacattttggaagtagaattgttgggattcagagatggattggatgtgggtggggtgtgaaggaaaaaggaagtcccaagtatcattgcctggtttcaggttttagtaaataggcagatagtgatgccattttttgaggtaaagaaacttgaggaagaggcacctatgtagggataatcattaaatccattttttaaaaagtcagtttatggaggtataattttcactcagcaaaattaacagtacaatttaacattttgagaaatattgtttttgtgaaactatcatgccaatcatcttaaaaagtttcctgatgccctttgtagttagtcctctccccctctacatctacagacaaccactgatgttttctgtccctataattttgcctgttttcagaatgtcatatacattaaaatataaaatatgaaa

SEQ ID NO: 273878 - DNA, 295 bp, Homo sapiens
ctccttcatgtgtgcccaatgtttacagagccctctctcactccttcatgtgtggccaatgtttacagagccctccctcactacatcatgtgtggccgatgtttacagagccctctctcattacatcttctgtgcccgatgtttacagagccctctctgactccatcatgtgtgcccgatgtctacagagccctctctcactccatcatgcgtgcccgatgtcgacagagccctctctcactccatcacgtgtgcccgatgtttacagagccctctctgactccatcatgtgtgc

SEQ ID NO: 273879 - DNA, 400 bp, Homo sapiens
caacattggggattacaattcaacatgagatttaggcagggtcaagtatctaaactatatcactgtctgtgattgggcgctatttttacatttttttcaatatttaaaatgtaagtgaaattaaaagcagatgtcaaaacagttaaagttatcttttattttgatattgatatttagtaggacaaagtacttaatttttaagtagatatttgtgatcacttacttatacttatgtaacgtgttttatcttcaaattatatatgagcctttggaaactaagggcttttagacatctttgtatcctccatggtacctgatatattgcttttcaagtgtttgttaaattgaattattgccatgtaaaatagaacagaaatataagtaaatatgtaaccagtga

SEQ ID NO: 273880 - DNA, 432 bp, Homo sapiens
acagaatgtataattttttgcaatattttattatcactaagcatgtatctaattactttgcttgcgttttccttttaattctgatattaattcaatgtagtaaaaattaacaccagtattttcatgagtaatgtgaggctaagttaagtaagataccagtgaaaacatagctagtaaatgatacagccaagatgaaacccaagcctaactcatttcaacagcatttatttgcagtctaccacactatcatgaatagtttatcttagtggtttatggcaggttctagaaactattttagagataaatatcaagtcatagttttatagacaaatgagcaacagttcatcgtgtttcaaatattccttcctctcatcttaatgtcatatctttctccccaaccccaaatttcactcagcttttccactcaaagac

SEQ ID NO: 273881 - DNA, 292 bp, Homo sapiens
tataaatgtaagaggctgtcttattttttgacccaaatcattgtggtctcttctactccattcggctcaatttcctcactgttcccagcacaactgttccattctcatggaagagcctttgctcatgcagttcctccacctgaaatgccttccttcctccccagcacccatccaaatctcatccattcttcaagatcaactcaaatgccaccccatccaggaagtctccaatgcacccacccaagcacatccattcctccattgactcctcctataattacagatgggctac

SEQ ID NO: 273882 - DNA, 485 bp, Homo sapiens
aaaataggcataatagctacagtaataatatggtattttacaggattcatgggaggctcaaatgagataatctgtgaaaagcacttaaataatttcctagagtatagcaagcattaaagagcactctttactgatatgcttcctattattagagaaagaaaaagaagaatgttgaaaatcatgatgtctgttacaatgcacatgtgccaagtttggaaatgagcatcaagttatttctactttctctaataatattacttcaagcccatgcttatgcttacattcatacacacacagcatttacataatgatttatcattttcaaagtgttctcaaactcattattttatctgttcatgggttagtgacttacacgtagtatatgtgattctacatatgatggaagacttacgattttttttccagaaccctgactcttacggcatgtagaagggcaccctttcacatgtgacccaggagcaaaa

SEQ ID NO: 273883 - DNA, 516 bp, Homo sapiens
tctggcaagctcctttcacaaatcttgcgaaacttggcctttagacaatccgagctcttgactgagctagatttttgtttttgttttctttccccttagagtttccacaatatcccttttgagcagttagggttagaggactatgaatgaactggactgttcgctacaaaattaaattcgaggacattttaattaagtttggttatgagtacgtcatagtttttatccctgggacatacaagagccttaagacatcttgtgtctaaaacactgcattcttagcaaaaagcccaccaaggagcctgagggaaggaccttataaggtccttatgtcattaaaaggagaatacctcaggaaccattagtaatggccaggtttgggacattcagcacccagtatgccggaacctcagagaagggattcagtacagtgccaacatgtccttcatatatcctttggttaaattctgagatgagccccagacatagagctttggattactatcagagcggccc

SEQ ID NO: 273884 - DNA, 296 bp, Homo sapiens
caattatttgtcaatttaaaaaattgttaaagagacaaataagtgttggcaagaatatggtgaaattggaaccttcatacactggtggtaggaatgtaaaatggtgtagctactgtggaaaacattttagcagttcctcaaaatgttaaatacagagttatcatatgacccagtaattctactcgtaggtatatactcaaggggaatgaaaacacacacacacacacacacacccatcaagtcatacacaaacgctcatagcagttttattcataatagtatcaattgatgaatag

SEQ ID NO: 273885 - DNA, 271 bp, Homo sapiens
aatactgactctttattagctgatgaaggcaatgactttgaagacagcttgaatcacagtgtgaagaagaaagcagcaaaacgaccaccaaaagcaacaccggtgagtcagccagttttcttttgtttttgaatcttgtgggggaagcagcccagctacttgggaggctgaggcaggacaatagcatgaacccagggggcagagctggcagtgagccgagatcacgccactgaactccagcctgggtgatagagcgacactccgtctcaaa

SEQ ID NO: 273886 - DNA, 390 bp, Homo sapiens
accgcgcctggccagcttttaatatttaacttaatcactcagtcagtgctgaaagttgttatgggggcctgcctgttcagctgctagtgaaacctgacctgctacaacagcgcggagccacacctgccctaactccatctcctctttcatcagccaggaaaacgatgctgcccacaggtgcacacctgcagaggccgcgacccatgtagaacataagtgtcccaggagagaggccgaagcctggttccaggagtggcccagaggatggacattcatgaccctggtgagcagggtgtgcttagtggttggcctggccgggggatccagcccagggccgctctgcatacagcaccctggggccctcccatctgggatccacttgcttgaccc

SEQ ID NO: 273887 - DNA, 455 bp, Homo sapiens
tagtgggatggtgcctggtcagcattgctctgacttgctgtaataagcaatagatttacatttgtcatttcatttcagatatcaagtggtggtatcctcatcctcaacaatacctaaggagagaataatggagtaacagccaacaaggaccaacaaacttattagaaagtagttttcttcacaggtgttctttattagacagactcctgctgagaccggatctttctgctcatcccaatttcagctcacaggggagatgggttgagaaactcccagtcgaatttcaacactttggaagaaagagggcagagagatgagaagaaagagagtcataagataatggattacaagaaatcctacgggccaccctctttaattattttaactttatttcttaacctgagaactgacatggccttcttttgtctataaaacaatagcagtaatttacagaa

SEQ ID NO: 273888 - DNA, 402 bp, Homo sapiens
caatcttcactatggtaatagtttcacatgggccataactcaaactgtacactttaaatgtgtgcagtttattgtacattaattatacctcaataaatctgtttattaaaagtcaaggccaggcgtggtggctcacgcctgtaatcccagcactttgggaggccgaggcgggtggatcacaaggtcaggagatcgagccatcctggctaacatggtgaaacctcgtctctactgaaaaaaaaaatacaaaaaaattagctgggcgtggtggcgggcacctgtaatcccagctactcgggagggtgaggcagaagaatggcatgaacctgggaggcagcgcttgcagtgagccgagaccatgccaccgcactccagcctgggcgacagagtgagactgtctca

SEQ ID NO: 273889 - DNA, 434 bp, Homo sapiens
aattgcaggtcataaaatcctcatttcagaggggtcttgccccattccctggaggaaggactgctgcacggagaggctaagaagaatctgaacagacaggccttgctgggtttccccactcagtctattagtattagattataccctttttgtctaatcacatttctacacagttgtccttataccaatcatgtctatccgatgaagtctccataaaaggcctaagaggaggggtttggggagtttctggacagctgaactcataggaacatgaacaagaactcatccacgtgcccagagggtgttgtaccccaactcataagaatggaagctcctgttctcaggatacttccagacctcgcctgtataatcccatcatctggctatttatttgtattatttaaataaagatattacattaattaattacttca

SEQ ID NO: 273890 - DNA, 350 bp, Homo sapiens
ctatattgataatgatgccatttgctacgttagaaaggggaaaaaagcaacttagagtgggaacattgagatgataacttttattttagatgtttagggtttaaagtacctgtagaaccttttaggggaagtgtctagtaggcaattgaaagtatgggtctggagcttagtaattcttaatttgggtgtcagtagttttaggagagtagctaaaatcatgatatacatgagttgcctaggacaggtatataaagtaaaaggagaaagccgggcacaactcttaaatagcacccttgtttatgggacagcataaagggagagggccatgcataaaggagaaggatactgat

SEQ ID NO: 273891 - DNA, 212 bp, Homo sapiens
ggcctatcaatacagaccctgacataagctactattccacctggagtgagttttttcagtaggagtaacgggttgtactgctgtagcagacattgttagttgtcgaccctggcagcttgtcatccttcattctctgttattagaaaacatcaactttgttcaggtaggaaagtgacatgtgtccaggccaggagataaccaagtggtctaat

SEQ ID NO: 273892 - DNA, 421 bp, Homo sapiens
catcttataagcattccttttcttcccagtcagcttcttctttaaaacctacatgtatctgtaatctgagtttcaattttacattataagaaatgaacctaatcctaattcactacctaaaaggaaatatgcataccaatctttattcatttgtatatgccctagatatcagaagaatgaaaacttattcagattttaactcatttaaaaatgcatttgattctttttttagtttttgttttgttttgttttgtttgagacagagtctcgctatgtcccccagcctggagtgcagtagcactatcttggttcaccacaacctccacctcctgagttcaagcgagtctcctgggaggcaggggttacagtgagccgagattgcaccaaaacacttccgcctggcgacagagcgagactccgt

SEQ ID NO: 273893 - DNA, 305 bp, Homo sapiens
gcttcttggatagagcatcttctgactgtttttagcctgaggactcatccttaaagtagaacgttggtcacggcatgtcctggttcaaaagaaaagctgctgcacatcaatcttcacagcagcgttgtcacaacaggacaaaggtggaagctacccaagtgtctatcagaagatgaatggataagcaacaaactatggtggatggatgcacagtgggatattacttagcctcaaaaagtgaggaaattctggccaggcgctgtggctcacgcctgtaatcccagcactttgggaggccgaggcgg

SEQ ID NO: 273894 - DNA, 561 bp, Homo sapiens
gatgattttgtaaaatgaaatacagcattcttcactaacactaaatctatcaaatattaataagaatcacttgaggaaattcacaactgtgtgcccacccaacaagcaatacacaaaacccttacttccctctatgaatgacttttaataacacttcaaattagaatttaagttagaaccagtgcgtatacgtgatatttttacaaatttaaataatgctttattacattacaaaaaattaagagttgttgtttaagccaaaacaacttatttgtaaccaacatctcaaaagactgcagtgcgctaaaataaacctatgatgaaaactcagttttacattattgattcaactctatgaagtaggcctactgttacctcattttagacataatgaaactgaggcacaaagctgttgaataacttagtcaaggtcatatggatagtaagtggctgagctaacctatacgattctactgaaatggagttcacaaaatttttgacgttcacgagatactttcattcttcaaaaattccaacatatctccatgtcccagacagcca

SEQ ID NO: 273895 - DNA, 476 bp, Homo sapiens
ttggcttctttgcttttgtgtaacctcctgttcacctcctggtgaatagaatcctcagatgaggcttattgaatgattgattcctcctcaaaagtatacttgaaagcagtggtgtgctgaagccagctcatgcccactcacaagggacaactgtgagaatttcttcctaactctgcactcagtgaccttgcgttggtagccatgagctacttcatgagccctcatgttgaaattggccatagtgggagtatttacaccacagaaattcacagatgctataaagcacagctttcgctttttttttttttagagagagctggtttaccaatttcactgcttgaaagtatcacaaaaatctggggatccttttgaaaatataaatgccatcatattgtgatataatttatacaatataatataattgtgtaaaatcatgattataataatgtttcaataaacatttcttaaattcccaa

SEQ ID NO: 273896 - DNA, 427 bp, Homo sapiens
ttatgctgggctcggggtgtggaaaatggaatcgaagctggtctctgctcctgagaggcttacagccccttttagggtatgtgctggatctggaaagctgggatagaagaaattgggtgactgtgtattgtctttgtgcttttgtgtttttttagaggcttctatgatcagaatatttttggactaatgatgtgagttccttagataatttgaaaatgtgcccctatattctctactgtttagagtggtataatgttggcatgacctcatcttcctttcaagattacatattaaaagaaaatttgactttatattaaacgaagtcaaagctgggttcagtggtgagcacctgttgtcccagctgctagggaggctcaggcagaaggatcacttgagcccaggagttcgagtccagcctgggcaacat

SEQ ID NO: 273897 - DNA, 431 bp, Homo sapiens
caatttataatctcaggaaattagtccattagtgagaccacagagggcaatgagtgtttaaataataaaagataaagcagaagaacaattttaattaggtttgatctggcctagacaaaaaaagggatgaaatctagcctaccaagagacaggtatatcatcctggctatctggaaatagatttaatacagtacttaaaatgaatactttgcataaactttgtatgaggttataataccaaacaaactattctcttagagaaaagccatacttttttttttttttttgaggacaggaaataaaagataactctttcaatggctcctaaatatccacaacaaacatttttctggagaagcagacaagagatcacagtatcttgtaccagccaagtacatactgtttttttgtttttgtttgtttgttttgac

SEQ ID NO: 273898 - DNA, 490 bp, Homo sapiens
cccacattgtggctctgcatccttttctagaggatctgcgtgctatttaaaatgctttgtcataaagcagaactcttccctcctttctgtcactctgtaggaggggagaggagtccctccctccattttgactctgaagttttctgacttgcactatgccagcctttctacccaattgcccaagcatttctcagctaaagtgatccttagtagcttgaattcttgtcacaatgtgttcaggctgctataacaaaataccataggctgggtggtttataaacaaaggaaatttatttcttagagttctggaggctgttcggaagtctaaggtcaggaatgcagtaggttcggtgtctggtgagtgtctgcttcgtggttcatagatggctgtcttcttgctgcacagtcacttggcagaaagggtgaggggttctctctctggggccactaatccctttcatgagggctccctccccctcatgacttcatt

SEQ ID NO: 273899 - DNA, 524 bp, Homo sapiens
gtagattatatttaaggacaaatctttattccatgtttaatttatttagcttcccctgtagctaatatttcatgctgaacacattttaaatgctgtaaatgtagataatgtaatttatgtatcattaatgcctctttagtagtttagagaaaacgtcaaaagaaatggccccagaataagcttcttgatttgtaaaattctatgtcattggctcaaatttgtatagtatctcaaaatataaatatatagacatctcagataatatatttgaaatagcaaattcctgttagaaaataatagtacttaactagatgagaataacaggtcgccattatttgaattgtctcctattcgtttttcatttgttgtgttactcatgttttacttatgggggatatatataacttccgctgttttcagaattattgtatgcagtcagtatgagaatgcaatttaagtttccttgatgctttttcacacttctattactagaaataagaatacagtaatattggcaaagaaaa

SEQ ID NO: 273900 - DNA, 287 bp, Homo sapiens
tctgggggtaatttgttaatgcagactcatcaagtactgagttttctttatgtatctttttctttaaatattttctcattatagagattaggacttaaaaaaatcttttctggaaatagctcacttgaaaggaagggaatcttttggtgttttccattgttttaaaaatgcacagatgagaaaactcaaggaaaatgtaatagaatagtttgcatatttacttttgtactttgctagaagaatggaaagtcagtggtggaataaagatggtcttgaaagtaacatgt

SEQ ID NO: 273901 - DNA, 502 bp, Homo sapiens
aaccactactctagagtgtcacgctctataagtacacacattctatttagtcattccattctagaccgatagcttttatttttagtttggaactattacaaattgtgctgctctggacattctcgaacatgggttttgggacacacatgtacacttttctgttgcttatacctaggaataagattgttggattataggtgatgcacatactcagttttaagatatgttgtcagacatttttccaaagcaattgtgccaatgcccgtgcctaccagtaatgtgtgaatattccatttccttcacatcttcagcaacacttaatgatgccagtcagaatttgcatttccctgatagctaacgaggttgggcatttttacatgcttgctagctgttaggatatctttctttatgtaatatcccttcagatgtttgcatattgattaatccgactgtctttttccagttaatttttcctttgttgaataaatatgttgcaaatata

SEQ ID NO: 273902 - DNA, 255 bp, Homo sapiens
ttttttttttttagctcatcagttatcgttagtgttagtgtattttatgtgtggcccaagataattcttaattcttccaatgtggcccagggaagccaaaagattggacacccctgtacatgctcatatactttatctttaatctttatagcccttatctgtaagtgttcttgcatttgctttaaaagatctttataaaaacttgtccccaaattgtgagcacttgcaaatcccttctgtcgtcttctcgcattt

SEQ ID NO: 273903 - DNA, 93 bp, Homo sapiens
tctggtctgtagtttttattagattctcagggaatcctgatcctatcatgaagaccttctattctagattgggttcctttcacatccccttct

SEQ ID NO: 273904 - DNA, 1265 bp, Homo sapiens
gttttaaagaagtctaggagttcataaaagtcaaagagcaggaaatacagaaagagcaaatacaagagaattctaatagccttacttccccaggtggtttgaatgagaacctgcacacactttcagtgtacctgcagatacagcagattgtaaaggattgtgacttgacaagttaagtattttctcagtctaatagagcaacttggaatcaggtaatctgaccctgggcccaagtggaatggatgaggtgttaggcggggctaacctccatcagctctgcacacaggtgcaaactgatgccaacaactcaatgactcctttatttgcagcaggctttttcctgttgactcatccctgaacacatttctttaatatagtctaattagagtagcattccaaaacagcctgagagaattatgtgttagaagtttgaggtcccaatcacttactctccatcactgcaagctctaataaagataaataaggaggaggagctaaatgaggtcaaatgattcaccttcttggtggaggctcagtaactcctagctggactaaagaacctagctaagagctgaggccaaagtggagaatctccttatcttttttcaagcagagataacgggtcaccaacggaagttggcctgacttaccacttgcaggtgaaaaatctggagtagttggtctcccagaggtgtcacagcctagtgtgcacaccctgtgggagtggacataggggttcaagaacacagcaaatacagaatgggaaatggatgaacctaaccacatcaaaattccctcatacattgttaaggaatgtttgttaacttagtggacatagaaaagatggacttttgaaaaggcacaaatgattgaatggtagcaggctaccaaatgaactcttatccaagtgccttcaagcctgcctactcccccagattcccctctggactaccaattacctccacccctatcccaaagacacagctgagacatttgtgagcactcgctcagccatatgttcagacatttgtcagatgttgacctccaagagacacaactggcatgaaactgccaattagcacttcagaaataatgttctctcaccagtgatgctaaaagggaaacttcatataaaggagaatatatttgtgaaacgcatataaaggattgtatccagactatataaaggtctcttaaaactttaataaaataataaaacaattcagttttaaaacaggcaatatccaggcgaggtagaaaaaaga

SEQ ID NO: 273905 - DNA, 271 bp, Homo sapiens
tgattcccacccctaccctattccccagaaccttcagcagtgcctagcgcagctaggactcaatcatcgcttgtccacttaatgaatgactcttggcacaaatttcctcgtccttttctgccccagacagacaccccacaaacatgaagttacccttgatttttccactttcttcctcctgcctgcaaattcctcaatcacaggtggtgcaaatcctacctctaaatggtactgaatctgcctactttcggggcaacctcccttacctgga

SEQ ID NO: 273906 - DNA, 577 bp, Homo sapiens
ggaaaatgcagaaaaagtgtagcctgaagcatgattttctcatgtggcacttctgtgtgcaggagatcacagcgcgggttttgttggctgctcatggaccccttctccaatgaggctcatacctgactgaatgaaggacccttgggagggaggcccagtctcctctgagaaaagcctaaccaacaccttatgaaaataagcaaataaatacttgttaaataattggctgggaagggatagggacatcttctcttgtctataaccaaggtagattgctcccatgcacacagatgatcacagggtaggtgtctacaaaagtctccttgccaggaaaaacttttgactatttagaaattgtgttttgcgttatactaccaaatatttcactaatatttaaaaagagttaggaaaaaagtgttcaatgaaatggattccttggagtgaaataaatacaaggtttacaaagtaagagtcacaaattctcagaaattttttcagaagacttggagtattcttgaaatgtagttattttggaaaaataaacttggatatacaggaaggattttaaatgtttcaa

SEQ ID NO: 273907 - DNA, 1482 bp, Homo sapiens
ctgagattacaagcgtcaacgactgtacccggccccaaattccttattgaggatcctagaatacatgagaccagacttggaaatgaaagtgtaacatgtttattgttcaaaaagaaaaactcaaaggtgtgtagtgattttaaaatttagggaaattcctcaatatagtgaaagaagaaaaacaagaaagaaatttaggaaagaaacacacttaaaccataaaaaatagaaaatggaccaataaagataaaagctaaacttaacaaggtaggaaaaagaaaaagaataaattaaaaaattctttgaaagcaccaataaaatagataaaacctcctgagcctgataaaaggggaaaggagccaaaaaaattaacaaaattaggcatgagaaattagacataaccatatatattgaggaattgagaagaagaatagaactctatggcaacaaatttgaaatcagaggaaatggataatttcccagcaaacactgatcctagaaatagtttgaataggccagttggttacccaagaagaaactggaaaggtggttaaaattttatcctttttgagcaccataagatggtgaaaaataaataaaattttatccttgtaaaagattgatggccaggcatggtggtggcccacacctgtaatcctagcactttggaaggccaaggcaggcagatcacttgagccccggagtctgagaccagcctgggcaacatggcaagaccccacctctactaaaaataccaaaattagccaggcatgatggtgcttgcctgtagtcaacagctacttgggaggctgaggtggggaagatggtttaagcccaggaggcagaggttgcagtgagccaagactgtgctgctgcactccagcctgggtgacagagcgagaccatgtcccaaaaataaaaaattgtttttaattaaactttttaattgaaaaatataggggaaattgtacaaatcacaagtatgcagctcagtgaatgattacaaagtaaacacactcctatagccatcactcaacccccaaaatagatgagttttaactattattgtactcaaacctgataaagtgccagaaagaatgctatagcctaatctcacctatggccatagatgcaaaaatcccaaataaaatcaagttgaattgcacactctgattacataaggtttattttagcaatgcaaggctcagtgtcaggaaatttattaatttattacatcaagaacttaaatgttatttaaatgtctagagagtgctagtgttgttaaattttctcattttgataattatactatgattacagaagagaacgtccttgttttcagaaaatgtaagtatttagaggttaaaggtaaacctctaatttggtttgccagtatttcagataactacacacacacacacacacacacacacacacacaggaatgataaagcaaaaagtaaggtgttggcaaggcatggtg

SEQ ID NO: 273908 - DNA, 1271 bp, Homo sapiens
  misc_feature (220)..(222): n is a, c, g, or t
  misc_feature (275)..(275): n is a, c, g, or t
  misc_feature (868)..(868): n is a, c, g, or t
  misc_feature (1269)..(1271): n is a, c, g, or t
tgagacagggtcttgctcagtcactcaggctggagtggagtggtgcaatcacaatcacagctcactgtagcctccaactcctgggctcaagtgatcttcccacctcagcctccgaagtaactgggaccacaggcatgtaccaccacacaaagccaattttttattttttgcagagatagtgtcttcctatgttgctcaggctggtcttgaactcctggcnnnaactgatcctcccacctcagcgtcccaatgtgcttggattacaggtgtgaacnaccatgactgaccctagatgtttatctttaatagaaaaaaaaataggttaaaaaaagtcatgcccaatattaggggaacaattaagcaagaagccctcccttactccaccaatcaccaatcagatttaataccttcctttgtgggtggttagtgcttacatcttagcatttcgactgagttgtactatacatagtcatacccaagtctgtttcccttgctggactgtaaactctctgagtataaatttgagatcctattcagatctgtattatatcccttaccatcttttgggtcttttaggcccctcctccctaccctcagcatccagcacaatatttcactaacagcaggatatgaaaaaatcttaaggtgaaccactataaaaagcaattaatcaatgactttagagataaaataattttatatagaaaaagacatataaacactttagaggtatgaacaaacactaaatttagaactgccttaattcaaccataatttagaataagctcaaattccatgagaatgcaggaatgagtattagatcaaaggagtcagagtaagcagtcatgtccctttacgttttctccgncttcctgcctcaaacatacatgagaagcctagagatgcaacgggtatcttgaaaccgtgaatcaagccacaagtttatgactgtagcaccaaaggcaaaagcctgatcctcaattatgtcaatgagccaactgcctcactctggacttgtgacgtgaggagaaagaaatcccacgtgttaaacccactgttaatgatgttttctgttattgtgacttacagaattttctgacagatactaacagaatttctcatagttagtaaaagggttttcctttacttgttctgacttgtacccatctacttggttacagtgactacaccgtaagtggacacttcaatcaagaaaggcctatcagagtcttcctctagactaacctatggtctgagggaaaaaaaaannn

SEQ ID NO: 273909 - DNA, 294 bp, Homo sapiens
agtggacgccaggctctgcatttctcgggaaccaagtggggtgggccttccctgggtccctccctcccggacgggataaataagccggggctacttggaaacgatttgcgcaatgccgggttcgggcgtccgtttggggaactcagatgcctgcggcagctgatctactctgtgctatgctgagccagacaccaccacgctttgcctccaggagcaagtcttaactagagagagatcaaagaaaaagacaactagggacgactgccaagagtgcaataaatataaagttcagcc

SEQ ID NO: 273910 - DNA, 100 bp, Homo sapiens
tgagacagggtctcactctgtcgcccaggctggagtgcagtggcgcgatctcagtgttacaaggtgtcatttttctggccgcaaatgtttgaggccagtg

SEQ ID NO: 273911 - DNA, 133 bp, Homo sapiens
gccagttgaaggattttatagtgctgtaggtttgttttatctaatgaagtttgaaagcagggggagtatcatgattaggccattgggcacaattaacattcgtagtttacatggatggcaaccttctctagtg

SEQ ID NO: 273912 - DNA, 521 bp, Homo sapiens
aggagcaggcatgtttatgcatctgccttgaggctgggcttggatgctgcagggggaaaaatagttgaaggccttggaaggtaaaagagggaatcacacacacacacacacacacacacacacacacactcactctctctctctctctctctctctctctctctctctctctctctgtctgtctctctctctctctctctgtctctctcacttggattttccctatgccaggtaagggtttgacattgtgagccccggtgggtgcttgcattagggttttgttgttgttgtttaaggagcctgagccgaggggagtgtgagtgccagctagctgctgtaacttaagtctcatttgcccaccattgtgactgttaaaaaggaatgataaagttgttactggttggtttttcgcggtttggggcggtggtggctctccctcactgcaaaatgaatgaatacttttcgggtcaaggttagcgtgaaaatgacagcccccttaggctgccccctttggcactgag

SEQ ID NO: 273913 - DNA, 481 bp, Homo sapiens
aggagcaggcatgtttatgcatctgccttgaggctgggcttggatgctgcagggggaaaaatagttgaaggccttggaaggtaaaagagggaatcacacacacacacacacacacacacacacacacactcactctctctctctctctctctctctctctctctctctcacttggattttccctatgccaggtaagggtttgacattgtgagccccggtgggtgcttgcattagggttttgttgttgttgtttaaggagcctgagccgaggggagtgtgagtgccagctagctgctgtaacttaagtctcatttgcccaccattgtgactgttaaaaaggaatgataaagttgttactggttggtttttcgcggtttggggcggtggtggctctccctcactgcaaaatgaatgaatacttttcgggtcaaggttagcgtgaaaatgacagcccccttaggctgccccctttggcactgag

SEQ ID NO: 273914 - DNA, 282 bp, Homo sapiens
aatgtagcatttaattttatgttgtcttttccccattgagaacaattctgtgaagtaaaatttgttggcttttgaatttcatatcatgctttggaagaactctcctgtcccaagatcttgcaaatatattcctatattttcttctagatttaaattttttaaatatttagatcttcacctgtaatttaccttcttgttcttcaatgtaagattacaaatgctattatcttttatagctgttttctcattaatacatgtcttttaagtcactaatatactgat

SEQ ID NO: 273915 - DNA, 457 bp, Homo sapiens
gtacgtgcctgcattcacatgtacatctgcatgtgtgtatacttgcttttgtgtgtggctgtatgtgcattcatgtgtacatgtgcacacatatgtgcgtgtgtgtgtgcatgtgcccatgcttttgagtgcactgtgtgcaagtgtgtgtgcgtgtgtgtagacagccacaggcaggctggaagggctccttctgaacagctaacccactgctgcaggcagggcacacgggaccccgacctggccagccaggactttgtcttccaggccatattgattcactcaggggtgggcacatgatcctggccaggccaaggagcttcaatctggacttttgctagcaaacctgggaaggaggtaccttctgctgggactgccacactagtggccaggagcccggggcgtggctgggaacactcaaatgccacacacaacaggctgtcaggccccgcacctg

SEQ ID NO: 273916 - DNA, 111 bp, Homo sapiens
atcgatgccacccagaccgtgttatcgatgccacactagtggccaggagcccggggcgtggctgggaacactcaaatgccacacacaacaggctgtcaggccccgcacctg

SEQ ID NO: 273917 - DNA, 503 bp, Homo sapiens
gtctttgctttcttgaggttatatttacatttttgtgctttaaattttgggaggtaaaatacagttttactccccacccttatcgtatgtgtcaaatacttcaactgattttttggagaataaacattttctttcaaacagatctctagctgtgcttggccagcagcatgttagttgccatgcacaataccaggatttgatatctgtttgagaatattcttggtcttgatctggataaaatgactcatagagaaatgctcttgtgctacttttatagcattccctgtatatacagaaatatgtgtttatattggcttctctcagagttttagtcagcctttctctgctctcctgccccacctctgccccatagaaaaagagtaacatgttgtatcaagatcttggtgggaaaataagggagaaatagcgctttgggcactgtccctgcacacattggaatgggggaggggtgggcataggagcctaatgattgataccaaaaa

SEQ ID NO: 273918 - DNA, 279 bp, Homo sapiens
cacacctggccgggattgtgctgaatatgtagatcaattcgaggagcactgcccatccatccttgaacatgggccccgtctccatttacttaagcctcttttaatttgtctcaacaatattttgtctttttcagcatataagccttgcactttttttgttacatttattcctaagtattttgttattctttatgctattgtgaatgaaattgttctcttatttctattttcagaatgtttgttgccagtatatataaaataaaacactatttatttatt

SEQ ID NO: 273919 - DNA, 480 bp, Homo sapiens
gaaaaagaatggatgttgaaatttgtcaaatgcagccgggcgtggtggctcacgcctgtaataccagcactttgggaggccgaggtgggtggatcacgaggtcaagagatcgagaccatcctggctaacacagtgaaaccccatctctactaaagaaatacaaaaaattagccaggcgtggtggcgggctcctgtaatcccagctactcgggaggctgaggcaggagaatggcatcaacccgggaggcagagcttgcagtgagtcaagatcgcgccactgcactccagcctgggtgacagagcgagactccatctcaaaaaaaaaaaaaaaaagaaatttgtcaaatgccacttctgcatttattaagatattcatatgatctttctgttttaatctgttactgtagaaaattatattgcttttacatatattgtttttaaagtttgttttaaataaaagtcatccaagtgagacttatt

SEQ ID NO: 273920 - DNA, 515 bp, Homo sapiens
tagagaggattccagaagcaaggactcaagaggttaaaggtcccagatatagaaaaagcagaaactgctgattgttcctttttttgttgactgattatacaatgtgtccttttaaaaatggttctctgttctctttgcagttcttgtattggttcctagttcctactaatttctcacacttagttaactagtcagtcttactgaaaagtaaactaaccagggatccctggtttctgtatctttcaaacctatagggttacaaaccaaagtgagatgcctatctggtttctgcacagttgtcctgaattatgttggcagatattttatacctagaaattcaccttgaaaaataaattgaaaccataccaagtatttagagctaggggtctaaagtctgcaaaagccctgggaggttgcgttgtctcaagagccagtattcaatggaccactccacatcatagtaaataaaatttgaacacagcattttgaagccaatagtatgggtctctgtgtgt

SEQ ID NO: 273921 - DNA, 348 bp, Homo sapiens
tgccgtttcccaaaaacagtcaagttggaaaagactggaaggatcatttagtgtagtgctgtacccctacctccagtctggtgactgtgcccctcttctctaacagtctcaacagatgattctctagctcaggggtcagcaaactgcagcccgcgtgggccagcaggcctgtttctataaatttttattggaacacagccatggtcattcattaacatatctgtccatggctgctttcacactacaatggcagagttgagtagttgcgacagggaccatatggcctgcagaaactaaaatatttacaatctggccctctaagtaaaagattgcagacccctgctctac

SEQ ID NO: 273922 - DNA, 95 bp, Homo sapiens
aggatgtacaggctacaggtgccccggcgggaaggaggtatcaggcatgcaacacaagttactgcaaagaccctgacgtgggagcccgattggcc

SEQ ID NO: 273923 - DNA, 498 bp, Homo sapiens
tgctttgtaggaaatgcgagctgggccgtgaggcgtgtagtcacactttccagcacagccgaggtagaggacctgactcctcttgaggctgaaagataccctctgccttggttgcacttccctcaccccattctgattttctccattcatgagagaatttccacatagtcagtggtctccttgccttcattcccaccttagtctaatataggagttggtaaatgatggtcctcaggacagatccatacctcctggctttgtaaatacatgtgcattagaacacagccgggttctttcttaaatgaaatacttaaatgtattgtcttatggctgctttcacactacagcagcagagttgagaagttgtaacaaagactgtgtggtccacaaggccacaaatatttaccctttggcctgctgaccccttaatccatccaactggctgcctgtgagtgatctcttaaacctcagatcgaaccacaccactcttctgcttac

SEQ ID NO: 273924 - DNA, 646 bp, Homo sapiens
atttaaaaataaatcagtattctgtgtttacattattataactctgaaagattcatttactatcaagccaaatagtgtagtgtgatttaatctattttcttctaaagctttttgtttttcctggagctgacaattgcattattttttcatttgcttagttttctggtattaatcactaattctttccaagccttttgagaaactataaaaccctacaattcttgcttgaacccgggaggcggaggctgcagtgagccgagatcgcaccattgcaccccagcctgggcgacagagcaagaccccatctcaaaaaacaaacaaacaaaaaacccctacagttctgtttttcacatggtcaaatgtatcagctgcactattttttttttttgagacctaaaactagggattgcctaagcctttcctttttaaaaagtcaggtttatataggtataacttgcatacagtaaaattaaccttttttaggtgtaagagttctgagaggtttgatagaatatatcaaggtatagggccagcgccgatggctcacacctgtagtcccaacaatttgggaggccaaggcgggaggatcacttaggcccaggagtttgagaccagcttgggcaacatagtgagaccctgtctctac

SEQ ID NO: 273925 - DNA, 425 bp, Homo sapiens
agccaacttactttccatttcagctcattgtcttgccatttcgtctttgacttttcatgagagaatccatagttttcctgattttcattgggaacgcaaatagggtagagttccttacgacctgctggcagcatttagtgacttcattccaatgggatgttcttcttctctattaaaggctcatacttcttaatttttttggtcacaaaatcttttcactgtttctaagttactttctgtccattttctcactcctgcaatggtaaattagaatttaatctaggatgatacatccttgtaattctggtgttttcccatgaacaaggtttaatatttcgtttcattccactcatgttcaacttggctgctcgaagaattttccttcgtgtagtgagggctggtcggggtgtgtcccttggttggcc

SEQ ID NO: 273926 - DNA, 452 bp, Homo sapiens
ccttaactatcgaggaatggcaggaaattctgtctgcccagcacctggtgaccctggagctcctcagtttcctggggagttgagttttggagcagtctcttccagagaggctgggagtgcatcactttccccctggaggtggcggaggctgctgggcccaactagctcattgccaggcaatccagagagagttccagacaccagatactgaacaacctacttgtctccacacctagtaaagcttggatccaatgctgccaacttttctgcctctccagttttggagcccttaatgtgaaggtgcaacccagaagcctgcaggctgttcgtagcctgtagatgtgttttcttcccagtagctggagtacacagtgtttttgtattatttttcaaataagcaatacatttgtgtggttcaaaaattaaagcgctatagaaaggtaaaaaagaaa

SEQ ID NO: 273927 - DNA, 330 bp, Homo sapiens
actccatccttcctttgctcaggccaacccccttgtagccaccctagacacctcactgcctcccacatttcacatctaagcaggcatcaagttatgttggctcctccttccaagtgtacccaggatggaactgcctctccctactcccacgtctctcaccctgctccaggccaccttcagctcgctctgaaggatcatggtcgcatccaactggtttccctgctcctccccagcccccttcagtctatttccctcctctgctcaccactgggcagtggccactgctctcaagctcaggaaaagcccaagtcctggcctggcgcagtggct

SEQ ID NO: 273928 - DNA, 467 bp, Homo sapiens
tgtgtctgcaggtagaatgctgtcatgggccacagtcatctcaaggctccactgaggctggagcatccccttctggaactctcatggctataaaatgaagaagtcacttggttgctgttaccttgctgtgtgaacctctccacaaggttatttgagtgtcctcactaatggcatctggctttccccagagtgggcaaactctcaatagaggacaagtgaaggggaagctttttatggcttagtccctgtagtcaccccgccgttccttacacgtattcattggaatcaagccactacgtcccaccgatgttcaagggaaagggacttaggctctaattcttcaaggagaaggtgtcaaggaatttgtgaacatatttacaaatctttacaataactttttgcatacatccatgcactggtataacctagcatttatgctaataaagtgttatgtgcatgcttttggt

SEQ ID NO: 273929 - DNA, 1382 bp, Homo sapiens
atgaaaataagacatgatgtaccaagactcaaggaatgcagctagcacacttcttagagggaaatttgtagctataaatgcctatgtaataaagaagaaagatctcaaatcattaacctttccaccttaagacactagaaagagaacaaactatacctaaagcacacagaaaaaagaaaataacaaaaagcagggcagtgatatggtttggatctgtgtctccaccaattctatattaaactgtaatccccagtgtcggaggtgggtccttgtgggaggtgattggatcatggggttggatttccccctttggtgctgttctcgggacagaggtctcacaagatctggttgtttaaaagtatgcaccatttccccctcgctctctgttcctcctgctctggcatgtgaagtgctgcctcctagtttgccttctgccgtgattgtaagtttcctgaggcttccccagaagccaagcagatgctgccacgcttcctgtacagcttgtgaaaccatgagccaattcagtatcttttctttataaattacccaatctcaggcatttctttatagccatgtgagagcggactattacaagcagaaatggaagaaatagagaacaataaagaaatagagaaaatcagtgaaaccaaaagctgattcttggaaaatatcaagaaaattaacatgcatttaagtaagtaattaaccaagaaaaaaagagaaaggactcaaatttctagggtcaaaaaaaaggacattactgccaatcttatataaataaaaaggattataaaggaatacaatcgtgaataaatgtatgtcaagaaattagatggctatttttctaatagaagtgaaatgaataaattcctggaaagacacaaactgctaaaactaaatcagaaacagaccattttaatagatagacttataattagtaaaaaggttgaattagttatcaaaaacctatacataatgaaaagtccaagtccagatagtttcaccactgaattctaccaaacatttaaaaaattccagtgctctcaaaaaaaaaaaaaaaaaaaaaagaagaggggtgaatatttctcatctcattttatgatggcagtattaccttgatgcaaaaccaaagacatcacaagaaaactacagaccaatgtttttataaatatggatgaaaaaaatctcaaaaaataccaccaaactgaattcggcaacttataaaaagaattatcaccatgaagctgggcatggtggtgtgcaactgtagttgcagctcctcaggaggctaagcagggggaatcccttgagtccaggaattgaaggatgcagtgagctttgatcacaccactgtacttcagcctgggtgaagatttatctaa

SEQ ID NO: 273930 - DNA, 926 bp, Homo sapiens
actcacaatagcaaagactaggaaccaacccaaatgtccaacaatgatagactggattaagaaaatgtggcgcatatacaccatggaatactatgcagccatggtattgagtggccatgtgagagcggactattacaagcagaaatggaagaaatagagaacaataaagaaatagagaaaatcagtgaaaccaaaagctgattcttggaaaatatcaagaaaattaacatgcatttaagtaagtaattaaccaagaaaaaaagagaaaggactcaaatttctagggtcaaaaaaaaggacattactgccaatcttatataaataaaaaggattataaaggaatacaatcgtgaataaatgtatgtcaagaaattagatggctatttttctaatagaagtgaaatgaataaattcctggaaagacacaaactgctaaaactaaatcagaaacagaccattttaatagatagacttataattagtaaaaaggttgaattagttatcaaaaacctatacataatgaaaagtccaagtccagatagtttcaccactgaattctaccaaacatttaaaaaattccagtgctctcaaaaaaaaaaaaaaaaaaaaaagaagaggggtgaatatttctcatctcattttatgatggcagtattaccttgatgcaaaaccaaagacatcacaagaaaactacagaccaatgtttttataaatatggatgaaaaaaatctcaaaaaataccaccaaactgaattcggcaacttataaaaagaattatcaccatgaagctgggcatggtggtgtgcaactgtagttgcagctcctcaggaggctaagcagggggaatcccttgagtccaggaattgaaggatgcagtgagctttgatcacaccactgtacttcagcctgggtgaagatttatctaa

SEQ ID NO: 273931 - DNA, 1717 bp, Homo sapiens
gtaatcctactttatacattttaaacattattctgagaagtagtccacatggttcacttattaagaagttcacggcacacacaaaaacaaacaaaaaagaattagaaactcctgctcttataaataaaccttacaagggttaaattcagagtgattaacagtgaccagacaaccaactgactcatcaaaatcccatgtcacagctaacaagaactaagtttgcaatgaattaaatgaaaattaccttttccctatttgcaggctgctccatgtcatgtatctcattataggctgataataagtttgatgaaaccagcttattacaccaaatcaaagccaagattgaaagaaaatataacaaaagagagaattacttattttgtcaacctccaaaccagattcctattctaaaaaatcacaaataaagcaaacctaccatttgcagcaaactctaaaccaagaaaaatgatcacctttgttgcttatttcagaaagccaagataaaaagagcagaatgtgcagaaaaatatgtgctgcactagacctctggtccaaccctcacaatcatcagtactgtctgagacttccagctggttctcaaggcctccgggactcaattttcaaaggcatctgtacctccttgtcctcttgtacactcgtcttctactctcttcagcctaggactacaccacagtcattcccagctccatacctctgctctgacctgcaacaaaatgtattccacctgtccttcaagtcagttgcatgcaacctttgtcctcattgagccctccccttgtctgataagattcagaacccattaatttagcacttagttccccaaatattccactactgtttcattcagaacccaaggttcctagaaggacacaacagtcaacagttaactgaataataagagtaagagaatgcctcaaactgctgctaaactcacactaaccacaaaaaaaacaaactataataattaagtaattcctgctttaaagtgtcttctcatttcctataggcaacacagcataagactcacaacaccatctcttcaacctctctagttatttttcttcaacctaaccaccaaccagactgactacttctacattatctactgaacacatatctgttttactatttcctccactagaattctcattttcttcgtatataaaaaagtctttcaaggcacagctaaagaactacctcttctggctgggcgcagtggctcatgcctgtaatcccagcactttgggtttgttttggggggtgggagttgatcctcccacccagtctgcccctggtctctgcccatccaatcagagcccaccctcctggaagagacccccgtgttcagagtgctggcagccctgcacgtgtccagggacactgcatttcaaagaaccactgagtgggtgagctaccttgggcaaaccccccactcctgactctgactgccacgtgggtggcccgacctctgacctgctgtcatcatagaggtagaaagcaaacaatctggggctcagcacacctgggggtgctcccactcattcagtgtgtggggcccctgagcagaggctgggcattgccactagaacctgagctcctagagagcaaggacctgggtggcctcgcttactgttccagcccaggccgagcacagggcctggctcgtggcaaaccttgaataaatatttgttggctg

SEQ ID NO: 273932 - DNA, 372 bp, Homo sapiens
ttacttcatgaattttaatgtaaaaaaagaaaaagaagccacagatcctctagacccttatgcaatatagggaaatattccttaaccccaatcgtgctttaatccttcttctactgaaacaaatacagctaatgaattagagatgctcttttgttctcctgttaactatctgaccttaaggaagtcactcaaccaattggttctcagtattctctttccacactgagggaagtggacagataatctatggttgcttctagctccaaaattcagtgaccctttaagcttaacttctttcaccagaatacctgtcatttctaggtaaatagtgttctcagtcctttctgttaaagaggttaagtaaataaaaag

SEQ ID NO: 273933 - DNA, 290 bp, Homo sapiens
gggatggggtggaggcgcatggccacctgagaacttgcgagactcatgccagcccctcctagggtgcccccaccaccagcctttttggtccccagtgagtctttcatccaagtgggtcactgccaggggtgaggacttgtaaatctatgtgagatttcaacaaatgaggcttctagctgatggtcttaaacacttccacggacatctccattttcttttagacaaatgggaaaataccagttatagtcattcactaacatccttttagtccacaccgggggcaaggcact

SEQ ID NO: 273934 - DNA, 183 bp, Homo sapiens
aaacccatcaaaaaattaacactttgcaagtgccttctttgttttaaaccaaatcaatttaagaatatgctcagattttgagattaaactctccccccagggaagctaaaacacagctttcctaaagatagaaaattctagtttcaaagatattagaataaagatgaatgagctcattactgg

SEQ ID NO: 273935 - DNA, 426 bp, Homo sapiens
tggggggaatttgggactgagtataaataatcagtgtgagtttatgaagccttggggatttacttatggggtcatttcttagaaaagaatgtttaaggatgctgatcaccctgaaatcaacagaagaagccagtctgcaaagcaattgaacaaatatggggccacagatgaggactgtgatgagagagatgtcattcacttctctcagtgattttgagtgcttcctggttcagtatacaagcaggatccttttggataaggctttcctgaagaaggtgatagtgtattttcttaagagactgttatgggccgggtgcggtggctcacgcctgtaattccagcactttgggaggctgaggtgggaggatcacttgaggttgggagtttaaggccaacctgggcaacatagcgagaccccatctctac

SEQ ID NO: 273936 - DNA, 313 bp, Homo sapiens
gaacaaaagcctcactgaaggaggagaaaggatgagccataatgacagcttgaaggaagaccattcaggcgaagggaacaagtgcaaaggccctgaggcagaatgaatgcctgaagagaactgaggcggggaacaagcacagaattaggaagacctagacatggtggtgcaggcctgtagtcccagctacttgggaggctgaggtggtaggatcccttgagcccaggagtctgaggctgcagtgaactatgatcctgctactgtactccagcctgggcaagagaatgagaaatctgtctattaaaaaaaacaa

SEQ ID NO: 273937 - DNA, 383 bp, Homo sapiens
gagttcaagaccagcttggccaacatggcaaaacccctatctctactaaaaatacaaaaattaggccaggcacagtaaacttctgatgattcacgtgcaggtggttcacacctgtaatcccagcactttggcaggccgaggcaggtggatcatgaggtcaggagttcaagaccagcctggccaatatggtgaaatcctgtctctactaaaaatacaaaaattagctgggcgtggtggtgcgcacctgtagttccagctactcgggaggctgaggcaggagaatcccttgaacctgggaggcagaggttgcagtgagccgagatcatgccattgcactccagcctgggcgacagggcgagactccatctctaaataaataaata

SEQ ID NO: 273938 - DNA, 334 bp, Homo sapiens
aatttttatgaagccagcccagaattcccagaattcagtcgggtgcactttgcaaaccctaaaatgctgtcaccatagaaggtttcattgcttgcacctgctataacatttgaggcatttgagaggcagtgaaacacatttgcttttcattttatctgactttggaaacctttgaagtgtttaatagtagagcccaggaaagatctccgcctcttaatcatttactcgtaaggcacattctcggctggtagcctgtcaagcagaaactgaactgagcccagttttattaagtgtcacatgcccagtcactgttcattaaaggtgttttaaggtt

SEQ ID NO: 273939 - DNA, 390 bp, Homo sapiens
tgtagacataagactttacctttttaatttttttagaaacagagtcttatgctgtcaccgaggctggagtttagtgataacattcatagctcgttgcaacctctaactgctgggcagaagcgattctccaacctcagcttcctgagtagcttaggactacaggtgtatgccatcacgcctggctatgttgcctaggatgttttcaaactcctcagctcaagcgatcctcccgcctctgcctcccaaagcactgggattacaggtgtgagccactgcccctagccagactctaccattttttacagttgtgctagaagttaattaactatgacattaactctcagagaggagatcttagaattataataaattggctttttgatgcttatt

SEQ ID NO: 273940 - DNA, 470 bp, Homo sapiens
tctccctttgtcccttgtataattgctgtcattcattttattaatttataagcatgcatacagacatgatatgtacataagcatacacaatccaatgcattattactgttttgggggaagatttacctctgtttaattttatgttgaacattctttcatttcaacatttatttattgaatgtctacaccatgaagtcatagtgccttgaatagggttgtattaagatgaatgagggtttgagctgggaatgttatgatcagcactaaaatatggaagctatgacaagcccaggtggatgtgatgagattctgaactaagttgagggaagggagaatggaaaggagaaacaagtccatactattttgcccagactcagagaacaggtatgtaaatgttatttaaagatctgccatgcacgctcataccagatactcaaaatttttttgaatacaacaggcctcaaatctga

SEQ ID NO: 273941 - DNA, 714 bp, Homo sapiens
gagttctggtgaaatctgctcatttaaaagtgtgtggtacctccctccccaactctcactccatatcttggccatgtaagatgtgcctgttttcattctgacttctgccatgattgtaagtttcctaaggccttcccagaagcagaagccactatgcttcctgtacagcctgcagaactgtgagccaattaaacctcttttctttataaattaccgagtctcaggtatttctttatagaaattcaagaatggactaacacagaaaattagtaccaagaaaaggggcattgctatgatacctgaaaatgtggaagcagctttgaaactggataacaggcagaggttggaacagtttggagggctcagaagaaaacaggaagatgagggaaaagtttggaacttcctagagacttgaattgttgtgaccaaaatgctgatagtgatatggacaatgaagtccaagctgaggaggtctcaggtgaatacgggaaagttaccgagaattggagtaaagctatgctttagcaaacagcctggctgcaatgtgtccttgctctatggatctgtggaactttgaacttcaaagtgatgatttagggtatctgatggaagaaatttctaagcagtgaagtattcaagacatggcctggctgctcacatgtgtaagcaaagaaatgacctgtaatttgaacttttttataaaagaaaagcaga

SEQ ID NO: 273942 - DNA, 122 bp, Homo sapiens
ccagctcctgtcccaggacgtcatctccaggcccaaaacttcctcaagtcagcctctctagtcccaactgctgcctcctggtggcctatgaaggcccaaaatctcctcaagttgacctctcc

SEQ ID NO: 273943 - DNA, 365 bp, Homo sapiens
tgagcaggagccacggcccacctgtgggcaccgaccccaaggccagggcaggtctctgaggttggagagggcggttgagaggccacccaagatgagcaggggcctgatgggaaccggaactaagcagtctttcctgtcgctgggcctgacacagctgccttctgtgcccagggaatcccgggggctgggaactgggccttctcctgcagctcccacattgcccgggcaccaggctgttgtcttccttcctggcttgaaaaaaagtccaggtccccgccagaagcctttggcctgctgagggagcaatgtacttgttttttctaaattccttccttgggattttatttttttattccccctgccaa

SEQ ID NO: 273944 - DNA, 404 bp, Homo sapiens
ttatctccaaaccttaccctcatgttactgtagccacttttactcctacttcacttagagaaacacagacttccattaccagcaaagtgcaatctatatctgaaaaacttccaatgaaacaacaaaaaattgctggataaaaataacaaacctacttttaaatgcatagctgagcttgcaagagagtaaggaaatccccagaggtcaaacgtgaagacaaaactaaaaactagatctcaaaatgtgaattggtgctggacttgtcttagggtagggcaaaggatgtgttttcattcacatagatatacagggaggtaaagctcggatgaggcaaggtagaggcttagaactgaggccctctacaaaaagatggactcactagaatccagtgaaagttgtgaagt

SEQ ID NO: 273945 - DNA, 427 bp, Homo sapiens
gacccagtttattgactccatattcttataacagcaaaataaaaattcttttaagttaaaaaaaactttatcataggaatttccaagcatatgttaaaataggatatctccagcttcaacactaatggcattttgcagattgagaggataataaaatgtagctgtagtttggatacatgtatccagatatattacatgtatttcagatatgtcctctgaaaatacctgcaagtttatagagaatgttgtatatgtcctttgactttatccatgcttagttccatagtgtataattcagtttatggctgggtacagtggttcatacctgtaatcccaacactgggaggtcgagctgggaggattacttgagcccaggagttcgagaccagcctgggtaacatagggagaacctgtctcttaaaaaaaa

SEQ ID NO: 273946 - DNA, 464 bp, Homo sapiens
tgttctttctaattcactgggctttagacatactgaccatttgtgtgtcctcaaatatgtaaggcatttctttgtctcatagcctttgtagatgttgtttcctcagcttgcaataattttctccaaagcatgtttttttggtcccgtatttattcagctcaatgccacctccttagagaaacttcacttagtctcttcttgtcactctttacttccttatcctgaatacttattgttctccatggtgcttaacgttctttacttgtttattgtcgaatgccttttccagaatgtgagcttcatgagaacgtctgctgtatcctctggaatatggtcagcaccggggtgagttagaattgacgagttaaggggtgcagcacaccagcatggcacatgtatacatatgtaactaaactgcacattgtgcacatgtaccctaaaacttaaagtgtaataataattta

SEQ ID NO: 273947 - DNA, 408 bp, Homo sapiens
atatttatttatttaattcaaattgatgtgcattgatcattattttcataggaggaataaatgctataactatgtaagcttacaattaaattttatttaaagctgccaaaaattaaatttatttaatttttaatttagaggcatataaaatttgtgtcattgttttctgattttttagctggaagagacaaaaaaagtgaggtgagattattttcttactactttctgttgaagaatttgatctcaaaattgacatggtaatataagttcatgactaaaatctggacacatcaaggtgttaatattcaaattaaaacagttataagcttttctgataaaccaaaatattagtgagtgatattgatgactatgaatattcaattgagatttttttttctaagtgatcac

SEQ ID NO: 273948 - DNA, 624 bp, Homo sapiens
tctggggccttcttgcctctcaagaagggccccaaggagcccattcctgaggagcaggagctggacttccaagggttggaggaggaggaggaaccttccgaagggctagaggaggaagggcctgaggcaggtgggaaagagctgaccccactgcctcctcaggaggagaagtccagctccccatccccactgcccaccctgggcccactctgggggacaaacggggatggggacgaaactgcagagaaagagcccccagcggccgaagatgatattcgggggatccagctgagtcccggggtgggctcctctgctggcccacccggagatctggaggatgatgaaggcttgaagcacctgcagcaggaggcggagaagctggtggcctccctgcaggacagctccttggaggaggagcagttcacggctgccatgcagacccagggcctgcgccactctgcagccgccactgccctcccgctcagccatggggctgcccggaagtggttctacaaggacccacagggcgagatccaaggccccttcacgacacaggagatggcagagtggttccaggccggctacttttccatgtcactgctggtgaagcggggctgcgatgag

SEQ ID NO: 273949 - DNA, 923 bp, Homo sapiens
gtggaaaatttagacaatacagaaaagtataacaattaattgcctatgattctgtcaccagaaaaaatcacttgatatttttgcatcttccttgccattgtctttgctacttctgcatatttttacttagtttcatcattctcagtgtaatttatatcttggggtttttccccgcaacctacaggcattattccatgtcattaaaactgtgtcaactattattaattttatggtactccattgttatggatgtgccatgtttcatataacctttacttattttgaacagtttagattatatctcataatgccacaatgaatgtctttgtgtataaattattttcttaggataaaatactggaggtggaatttctagtcaagggtatatgaacacttttgtagttcttgattcataccacttttccacatgggtatgttaatttatactgcagctagatggtatgggaagggtggtctagccatattttccaagaacatgcaacgttttatctttatgcaggcatctgcactaagaccctctgcctttctgactctatggaacggggttaactgatatggagatcattggcagagattttcccaagctttcttagttttaaatatatctgacatgggccgggtatggaggctcacgcctgtaatcccagcactttgggaggccaaggcgggcagataatctgaagtcaggagttggagaccagcctggctaacatggaacatggtgaaaccccatctctagcaaaaacataaattaggtgggtgtgatggcaggcgcctgtagtcccagctacttgggagaccgaggcaggagaatcgcttgaacccaggaggcggaggatttgcagtgatccgagattgtgccactgcactccagcctgggtaacaaagcaagactctctaaa

SEQ ID NO: 273950 - DNA, 417 bp, Homo sapiens
tgacagagtaagactgtctggaaaaaaaaaaaagaatcttgaacatctagtttaatggatttcaagttctactcaaaggagtatgcacctgtgcaggggatgaaggagcagggggtggggtggcaggaggtgggaggagtcagatgggagaatatctgaccccctgctcctggcttcaatcagagcagcattttgtgttcatatttatttgacttccatgtgaattttatttaatggttttgctgctgattgaaagagcagaaacccttgccccagcaccctgttttccttaacctctgtcattctcattaaccatggtcatgacttttgccatatctatgtaccacctgtattgttaatttagttatgtactatttttgattaaatgcattcactctctgaaaacctcaaaaaaaa

SEQ ID NO: 273951 - DNA, 875 bp, Homo sapiens
tttctagcaactgctcttaagtcataggttcctcattttttctttgctggtagtgggagaaaatagttgatctgtgatttttgttttcatctccccaaactatgttataaaggcagtaatttgatgctgaagattatgattagaaatcctcagatgggttatatattggggctttatcttttaatattaaaaagaatgtctttcctggactactttattcagtagtaagcactattcattctatgtatattccttattcagccttgcagactcctgtgggatctgatctcttcctgcttcaactcagtaccatactcaccaaggcttagtatgtcttcacccactctcccttctcttgcattcctcaaacatgctgagtttattccagccttaagcctttgatctacgcatcagaaatgttgggccccacttcagatcttctctgccctgccttctactccagtcactgctgtggtaactaattccatgaagtctttgaccaggttctcagagaatatgatagtacctctctttggattctagctgtatacctttcacttcagcctccctgacgtggaatgtctgcagaacttgtttggtactcccaattgcacagcccaaaggtgcaggggagttaggtgcccatggggccatccttgacctaggtggaaagttgctagtggataactgattactcttttcatcacctgggcagacagttctgaaatgcatttcgtaagtctcctcaaaagaggaggagacttctgtggcgggtttggcaataaccatccttatattggctttcctcttttgtttcactcctgtgcatctctcttgcatcctgggatcgcttctcaaataaatgactttcattc

SEQ ID NO: 273952 - DNA, 539 bp, Homo sapiens
gattccaaaaaaaagaaaaagaaaaagaaaagaaggctttttctaattagaaaggtcaggttagtggcattgtggaagacggattggacaggggcaaaagtagacccagggagactagtcagtctagccagtcagccaacaagtgttttgtaagttctgtagtaggttaaatagttgcttcccccactccaaaagttatgcccatgtcccagaacccgtgaatgtgaccttatttggaaaacagaactttaaagatgtaatcaagttaaggatctcaggatccttgattatctgatgggccttaaatccaatggcaaatgtccttaaaagaaacaaatgcaagagaaggccactgaagacagaggcagagattgcagtgatgcagccataagccaaggaatgcccggaaatgtcagaagcagaaagagcagattctcccttcaagccttcagagggagtgtggccctgctgacatcttgacatcaaacctctagcctccagaacaatgagaataaatttatgttgccttatgccaccaa

SEQ ID NO: 273953 - DNA, 262 bp, Homo sapiens
attttcattgttgctacaaagtacaactatattactaaatacatattgatattattgttggtggtacgtattacttaagagtttatgtgttttacttccacagaagtgaatttttagtacattatcaagtaggtgagaatagagttaaaattttataaaaatgttcattattgttaaaccatggtattaaaaacttttaatgcttagaaattaagttctggtagataaaatatggtttctaaaatcatttaatctcaattat

SEQ ID NO: 273954 - DNA, 174 bp, Homo sapiens
aatcatacacttaatgatatacaattggctcaaatttttattttacataaaaataaaagatagacaagctaatagaaaaaagtgttatcagtgacaaattagtatcagtccttcctgtaatgttagtttacccacctaatattggatttatagactgctaagtgtgtttgtttt

SEQ ID NO: 273955 - DNA, 351 bp, Homo sapiens
ggtggtgcatacctgtagtcccagctacttgggaggctgaggcaggagaatcgcttgaacccgggaggcggaggttgcagtgagccaaggtcacagcattgcactccagcctgggcaacaagagcaaaacaagagaatatataaagaactctcaaatcacaatcttttttaaaaacaacagtaaacaacagttcatttagaaaatgtgcaaaagacacaaaaagatattttgccaaaaaggatttagggtaggaggatctacttaagcctgggaggtcaaggctgcagtgagccgtgatcgtgccactgtactccagcctgggcaacagagccagaccctatctttaaaaa

SEQ ID NO: 273956 - DNA, 259 bp, Homo sapiens
cctgtgaagacaggggtggagactggagtgatgcggccacaagcccaggaatgcaaaacaaccagaaggtggaagaggcaaggaatgcattctcccctagatcgccctggagggagcgcagccctgttggatttcaaccttctggcttccaaaactaagagggaataaatttctgctgtttattttatcttgagatggagtcttgctttgttgtccaggcaagagtgcagtggtacgattgtggctcactgcaacctct

SEQ ID NO: 273957 - DNA, 505 bp, Homo sapiens
aaaatgcaggagtcttggctgagtcccctttctctgtctgggtctcagtttcctggtctgagagcattggaggagtagcacaacctacttaatatttggggctggaattgaatactagaagcttcactcaggtatttctacaagtccagagcagggaggttagacatttctctgtgagagcaacatgtgaggaaaatatggggggtgagtgtcttagagccctttgtgcttacacaaactggaccagctgagtgagcagggcaaggcagccaccctccaggtcatactgtggaacagaggcaggacccctcccaagaagccgtgctctcagctccctactcagggctctgggcagcttcccgattctagtgctggcagcagcctgatgtctatccttctgtcctgcgagaagctcccacttaccggggaggcttctgcttatctgtccccttttgcaattttgaactcttcaccctccagccctggcaggggctgaggaacatct

SEQ ID NO: 273958 - DNA, 402 bp, Homo sapiens
ctgcgttcagtgctcagtggtgagttcccacgcaagagcctggggagtcaaccagaaagacccgaacgcggggcgggcccagcgacctcgggcgccatctgctgattaccagacgccactacctgagaaaggcccctccagtcccctcattgcccagctgcggaccctaagcggagccataaccgtcctaccaacccacgtcagcagaagagcccagtgggagggcgtgtgttcacttctgctcctctgggcaaagacgcccaggtcagaaacacccacccgaccctcccactacccagagacagccccacctgcacagctcagagcaggaccactgaccctctggctctccggtcatatttgctattgaagaccagaataaagtatttttatcaggattga

SEQ ID NO: 273959 - DNA, 1604 bp, Homo sapiens
gtaatgtgtcagttgaaagccatctttctaggttcagctcatgtaagcctctctgaatgtcacaagtgtatattgttctatatttatcttaaaactgctaagaagttaggggaaatggaaatgcctgcacagatagtcaaaatagaaatggacacggaccaaaaatgctggtggctttacaagggatgctttctcaaaaatttaaaacgtggggagggaagaacatggttaggaaaacagatgactgtctattccacatcactctgcggcctttaaaataggcttttaaaatttttccagccttgggaacttggataaaaaggggcagataaagcagaaacaactctcagcttgttgctgccattgctcaccactaggtggcgacagagtgcagctgcattacaaatctctgcttaagcgacttgccatttgagttacatcaccaaggggaaagggcgaaagacagtctccccagataatctatttacatcaccttataggacatttgcacctacctcagcgtcaaaattaagatgctgattttagccaaggtaggccaagtagtccatcatagtaatctttcatgcaatagcgtgcacatcgaaattaccattttgtttctttttctgtttgttttttacctatttgtcgtattaagaaattatccagtatctttgggttttggtttaccattctgcaaaatggagttgaattgtaaccattatttttttttacgtgaccgagacacatgagaattaaccaatcaatgtcagtgtcccagctctctgtgtaaaactgatgacggacacctttacacagcagaggaaatacatctgtggaaatgtgtatccttcatggaatccctgaggggacccgattaaccctcatcttgtccaactcattgatttcagagatagggaagctgaggcatccccaaggttatatggtgcttaacgcccaaaacagaaagacgcagatgagccgtcttagataactgttcttgctactcattccctactagtcaaatgcctttaaaataaactatttcaactactgtaattagtcagctttcctcaaaactgtctcctagttatccacattaacatggaggtgattcttgttaaaggtaagctttgaaaagttctaaaactcgccattataagacacacacaacttctctgctacgaaaagtcttgattgattctggcctcaggatgtgaacagtatagaaaactgatgatttgtgtgtaaaaagaggggcagggtttgaaagatatgaaggaagggaaaagagaaattgggaaacaggtaaaagcaaggacgggggccgggcgcagtgactcacgcctgtaatcccagcactttaggaggccaaggcgggaagatcacaaggtcaggagatcgagaccatcctggctaacatggtgaaaccctgtctctactaaaaatacaaaaattagctgggcacggtggtgcgtgcctgtagtcccagctactcgggaggctgaggcaggagaatcgcttgaacccgggaggcagaggttgcagtgagccaagatcacaccactgacctctagcctggtggcagagtgagactccatctc

SEQ ID NO: 273960 - DNA, 1861 bp, Homo sapiens
gggatggcagtatggaaacagaataaaatgaggcagatttatcataaagcagtgctagaacaacccatgtatatcttcttctagtagcatctctgaaagggggtaccaggaagcaccagttccatgaattgtctagagcagggattagcaaacctttctgtaatgggcagatagtaaatatcttaggctttgagggccagactacctctgtagccactctgcaactctcctgttgtgctaaagcagctacagacaatacgatgaatgggcacaactgtgttccaataaactttatttacaaaaaaaaagtggtgggatagatgaggcctatgagccataatttgtcagcccctggcctagggggaagaagaatctacagataagcttaggaaacactgcctggtctatctcccccttggagattcactgagcacacagaacattacacactctgaaattctgaaaggaagtcacttgcctttgcgtagcccatcagttcccaaatttatttggtttcatctccttattctcatgtaacttctattaacatcctgaagaactaatgttctgtggaacatactttgagaaacattgactatagactggattttagaggaacaaaggaagaatattctatttgacttaatgccaaacgccatattccacacctaacccttggggaggtgcattctccactgtggttggcagatccaactccaggggcccctgttgcactcccctcccctctcgctttggcttagagtatggagacagggtgagaatgaggttgctgcctggccagaagggggtcccttctccctgcggtagcagctgttgctgctgccaactacttctttgcatgaatttatttacagggctcctttaaaacctcttggacaaaaacacaataaaaatagttaattataatagtttaggcagatgaacatgacattaataaattatgcattttttaaggagtttaaaacagtatgtctcagattccagttccactgaggcaggttagctttacaaaggtcccactggtcccatctgagtccaggtactcgtcacacttatcacctgggccactgcaaagacttcactgggtctttttccagccttcagttctagtgcactctgatccaccctgcacaccactgagaaattaatctggtaaagcaccatctaatcaaaatgctttttctcaaagcccttcactggctccccaaagcctatggcacacaacacaatccctcagccagttaaaggtcttccatcctctggctccaatttacctctgcaacataactgggttagttcgcccatatggaacctgctccaggcatataggtattccccaaatcttcaagcacatcagaagtttctccctaacttaattatgtttgttctagaccctctagcccagtggctcccaaatataaccagagcaggataattatctggggaactttttataaattcagatttgtagatgctattccagacttccctcatcagaatcccttagggatggggcattagaaacttatattttaacaagcaccctaagtgatttttatgtagccagcccagatcaactgggaaccactgatggtccaaactcttcatttaagagatgagaaaaccaagtctccaaggccctagtctgggcaaggccacaggtgctcttgcaaaactaactaggcttcttaattgttttctcatccattcatcatagagggaatgggggtatatgccacatggttctatagataaatatttgcagctgggcaaaatcttcagcagtaagattttgtttaaaagtcaaatttgcaaccaaaaaaaaagtcaaatcccactt

SEQ ID NO: 273961 - DNA, 528 bp, Homo sapiens
aggatgttagtacaaactatagcgcctcatgttcttaacagaccccaccacttcggatgccagttacagtgtaattgtaggctatgttcttcattaagaattgatggatctgctgtctgcagaacaagcattttggaataaatagccccatttgaacaataggccaaaagcaaagccaactagtccataagagatttaaacagcctgatatttttttcccctacaaattgtgctttattcagtgagggttcacatttggaagttcatatttgtaaacattaattttcaaagccaggctttccctatagttactgcaggacaaccccctcataaagcattttatcacattgaggtcaaaatacatttcctcatgaatgctgtggtctgtggccttgctgtccaagctctgttactggtctgccaggagttaagttccaaaattgcaagtatacactcaaactttcatggcaatttgacggagtaatttatgtttgtgggaatccaataaaaaactctggatttgtaaat

SEQ ID NO: 273962 - DNA, 350 bp, Homo sapiens
tcaggtatcagcactttgcttatttccggccgaagcccaggaaggggagaattaaagttgcagatggaagttgtcataggggccctcataagtggaagaagaaggtcagtgttagagagacacatgtgaggatgctacgctgctggcactgcagttggaagaagggaccacaagccgaggaatgcaggtagcctttagaagctggaagaggcaaggaaacagggactcccctaaagcctccagaaaggaatgcagccctgatgacaatatgattttagcccagtgagacccatttcagacttctgggtgctgaaactatactacaataaatttgtattgttttaagtaac

SEQ ID NO: 273963 - DNA, 119 bp, Homo sapiens
tgtacttatcttaatatcgttaagagatggcagccaagggtaaaactgagtcttcttgggctgactatgatgaaaatgccaagtgtaatctgagcacagccctgaacttgggctggtag

SEQ ID NO: 273964 - DNA, 419 bp, Homo sapiens
acacgattcttccaatcctcactccggtaccagtttccctctgggtgtgcagagcgggagcctggcaaggtataccagtttcacaccttgggtggcttcttagaacccctgactctggataggttcaaatagcagaatctggatatcgctggttgtagtttctgatacctacaacagcggaatactgtgactcttctcataaagctaaaatcaggaataacatttgcttgaaaccatctgctctcccaaacaaaagttcaaatacgtttcactgaaagtcacatttaccacatatttaacttattattattattttttttgagatggagtcttgctgttgcccaggctggagtgcagtggcgtggtctcagctcaccacaacctccgcctcccaggttccagtgattctcctgcctcag

SEQ ID NO: 273965 - DNA, 578 bp, Homo sapiens
gacatctccactgttgcagaaggctctgttacacagtgccgcacttggttcagttacatctgtcgttaaatgcagtgactttccacaggagagagatgggagaagcgataactcccagggaggacatcgtgaaatttctgtgattggatggagagcttgcatcttcattcccttcccacttgaagttctgatgcttttctcggaagacatgtcttccagctgtctgttgagaattagtgttccatagtaagttaattgtgggaaagaaaattggtgccaatagcttttcagggttggactattactgataattggtgaggtccatacatagttaaacagcacctatatataacggtaaatgctgctgttcaatttcggctccagagcgtttagtaacattagttacagcaagtgctgatgattacattgaagctttgtaaaatgataaaaaattagaatattggaaatgcattctgtattgtgtgcaaaacagcatgtatttatgccaccttttatggttaggaaatacgtaatctagaaagattcacaagaaacagaatactttgctctgggaatgg

SEQ ID NO: 273966 - DNA, 442 bp, Homo sapiens
ggctggtctcctgacctcaaatgatccacctgcctcagcctcccatagtgctggagttacaggcatgagccactgcgccccaccgcctcccattctattcaaagtcacccctctgctcactgacataaatacatatctgattgcctactttagagaggccaatcagaaactcaaaagaatgcaaccatttgtctcttatctacctatgacctggaagctcccttcctacttccagttgtcttgcctttgtttcaagttgtcccacctttccagaccaaaaccaatgttcatcttacgtatattgattgatgtgtcatatctccctaaaatgtataaaaccaagctgcgctcagaccaccttgggcacgtgtcatcagaacttcctgaggctgtgtcgcaggcgcacgtccttaactttggcaaaataaacttactaaattga

SEQ ID NO: 273967 - DNA, 254 bp, Homo sapiens
ctcgtgggaggtgtttgggtcatgagggcatatccctcataaataaattaatgcgctcccacaggggtgagctgtcattggcaggaatggattagttcccactacagtgggttgtgaaacagtctgacttctttggtctctctcttgcctcctctgtcaccatgtgatctctacacacacctgctgcccttccattttctgccatgagtttaagcagcttgaagccctcactagacacagctgcccaatcttga

SEQ ID NO: 273968 - DNA, 281 bp, Homo sapiens
tttactgggatgcttatctactatgtactatccaccataccaagaacttatatctgttcttgtttaatcttcatttacccagtgaaagtaattgccacacttgtctccatttcacagatgaaggcacttagcttaggcaggcaaataacttgcccaaggtcacacactagaaagtaacagagccagcctttccatccagccttcaaaccctgagtccgatgttttcatcactaacaggaatgcccgctgtgtctactcttcatagagtaaatggtggaggc

SEQ ID NO: 273969 - DNA, 603 bp, Homo sapiens
acattttgcccatccattcatcggccgacggacacttgggttgcttctacctttttcctcttgtgagtaatgctgctgtgaacatgggtgtgcaagtacctcttcaagaccctgctttcagttattttgggtatagacccaggagtggaattgttggacctcacattacttttcaagaccatcagtctctgcactctgaatctgtcatgttctcagttttttctttagcttattaagaagtgtagccatgtgaattccctaattgttgacatgactttgtttataaattaccaaatattcttgatgtagtgttcaaattaatacattattttgcaaaaatgtaaagtgctaactcttaactgtctatttttctttaaaaatgtttatattaacatataatgactcttgtttttaaatgaattaaaatacacacacacacatgtacttcagagacaaagtctcactctgtcacctacactggagtgcagtgatgtgatcatagctcattatagtcttgaacccaggaggtggaaattgcagtgggcagagatcgcgccactgcactccagcctgggtgacagagcaagactccatctcaaaaaa

SEQ ID NO: 273970 - DNA, 271 bp, Homo sapiens
tcgcctgggcccccgttccctaaaaaaaaaaaaaaaaaaaaaaaaaaaaaaaaaaaatgcatttaatacatctgacctacaggacatcataacagcctagccttccttatactttctcagaatacttagattagcctacagttgggcaaaatcatctaacacaaagcctatttttatctcatgtaagagtattttactgcatattgctagcccaggaaaatctcaaaatttaaaatttgaagtacattttctactaaatatttatcacttt

SEQ ID NO: 273971 - DNA, 683 bp, Homo sapiens
acatacacacacacgcacatacatacacacatgtacacacacatacacatacacacaatacacacacatacatgtacatgtacatactcacacatatgctcttcaacttaatgatggggttagttccaataaacctaagataaattgaaaatattgttaagtcaaaaatgcatttaaggccaggcacggtggctcacacttataatctgagcactttgggaggccgaggcgagcagatcatttgaggtcaggagttcgtaacagcctggccaacatggtgaaaccccgtctctactgaaaacacaaaaattcggggcgtggtggtggacctctgtaatcccagctactcgggaggctgaggcaggagaatcgcttgaacctggcaggcggaggttgcagtaagctgtgatcgcaccactgcactgcagcctaagcgacagagcaagactccatctcaaaaaaaaaaaaatgcatttaatacatctgacctacaggacatcataacagcctagccttccttatactttctcagaatacttagattagcctacagttgggcaaaatcatctaacacaaagcctatttttatctcatgtaagagtattttactgcatattgctagcccaggaaaatctcaaaatttaaaatttgaagtacattttctactaaatatttatcacttt

SEQ ID NO: 273972 - DNA, 645 bp, Homo sapiens
taattctgcaacagacagctccctgacattctcactgggcccctccacagcctgtgctagaggtgtgccctggaatgctgtggcatgcaggtagttaaagaccacatctcccgccgccatgatgaggaggtcggcgcggctgtgctgcgggcaggcagcggagagggctcgcggcgagggctccagcttaccccgccgccgcgtcgcgtgcacggagcgcttcagaggtttggagggggccggaacctcaaaagcaactggatgagcacaacgcggacgccccggagaagcggcgcaagcgggcccaaaatggttgctgatcagacgagtggcatctctcgcccccctaccgcgggaattgggacctccagactgtgcctgggggatcggcaagtggttcccctctggttttttcggcgctgccttcccggtggtatcctcactctctctctttgaaatgacctctgctttcctatctctaactcttcccagatatttgaaagcaagtttttgtacaaagcaacatatgaatgtattcagccattcgatcgttcggcgaacatttctaggtgtctcgtgctgtgccagatattgttctgagtgcgctgaagatgcacctgttagcaagacaaagtcctggctccc

SEQ ID NO: 273973 - DNA, 317 bp, Homo sapiens
ccatgctagatattttcagatctttctgttcattcaaccaatagtgaattgagtgttgccaggcactgcatatgaacaagacacagtcacagaccttaaaaactcagactgctagaccaacctggctaacacggtgaaaccctctctccactaaaaaatacaaaaaaattagccgggcatggtggcgggtgcctgtaggcccagctactttggaggctgaggcaggagaatggcgtgaacccaggaggtggagcttgcagtgagccgagattgcgccactgcactccagcccgggcgatagagtgagactccatctc

SEQ ID NO: 273974 - DNA, 383 bp, Homo sapiens
tttttttttaagagatggtatcacactctgttacccaggctagagtgtcatgtggtatgatcatggctcactgagctcaagtgattctcccacctcagcctcccaagtgtggctgggatcacaggcacatgccaccatgcctggctaatttatttttaaattattttttgtagtgatgggatcttgctatgttgtccagtctggtcttgaactcctgggctcaagcgatcctcctacctcagcttcctgagtagctgggactacagatgcacaccaccacacttggctaatttttgtattttttgtagagatagggtttcaccatgttgcccatgctgggctcaagcaatcctcctgcctcagtcttccaaagggctgggatt

SEQ ID NO: 273975 - DNA, 246 bp, Homo sapiens
gaggtgaggaaggaagagggagggcccagagctgcccacctcacttgcaggtgtggcctggaagagtgccggggtctctaatgaagaatcaagttcaagggatgaagaggagttggcgaaggggcacaaaaatacagctagatagaaggaatgtgttatagtattcattagtataatagggaaattagagttaacaatttattgtgtatttcaaaataactagaagaattgtactgttcctaacac

SEQ ID NO: 273976 - DNA, 428 bp, Homo sapiens
actctggaggcagaggcatgagcatggcttgaactcaggaggcggaggttgcagtgagcagagatcacaccactgcactccagcctgggtaacacggggagactctgtctcaaacaaacaaacaaacagaaatacactcctgggtggagatctaagatgctaacgagacatgcaacatatgaacaagcatgtatagtcactgcgtatgtgcacccagaatatcactcagaacatgcttataagcaactcctcttccctccaccttattaataataatgtaaaactcccgtaagggggtttctccagcgacagtccacgctgtctcactcttacgagcagcccgccctggagtatctctctcagggtgtactgtaatctgcacttaactttcaagtattttcttttccaataaattatgctgtactttt

SEQ ID NO: 273977 - DNA, 255 bp, Homo sapiens
gggagtggggggtactgagacccctgggggcacagcagacctacccatgctcttggatcagaacgctgggaatattagaggtagtattgaagatgttaggagggcggggtgcgttgggaggctgacactggaagtcaggagttcaagaccagcctgggcaccacagagagacctcatgtctacaaaacattttaaaaacatttgctgggcatggtggtgaatgcctttagtaccagctacttggggtctcacgag

SEQ ID NO: 273978 - DNA, 501 bp, Homo sapiens
tcagtaatgatttgagtcaggttaaataaagacaagcgctgtgaactgggggttttcagggaattcccagacagctcagataatgacaattctttggtaacggagttttggggaagctcaaacatgttcttccctctccagtggatgcaaggctactagttttcacagctactctgacggtgatgctgttgattttcaaagctcctgaaaagctggggaaaagggcataggaatagggtgggtttgaatgtcacaaagctcactgtccttacatatgtttaaccatttttcttagatagacacttagtgttacttagtttgttgaaagcccatatcaatttacagctttcttaaaaagttgattttgacaatatctgccagtacttttgttgattttatgaagaagtggggttttggaggttttcacttaacctttttcactgatgtcactcacttgcattattttttattcagctttatttaaatataatttatattcca

SEQ ID NO: 273979 - DNA, 694 bp, Homo sapiens
ccatacagggtcattctcagaaaccttattgttcttgtttcaagttttcttattatctcaagaagtaccccctaaaatcccagtgcactaagcacattaacatcatatttctactaataatgcacaacttcccttcaatatatagtgataacagactctcttgcctgtaaaaggaaaacattactgaagaaagtaagaatatttactaaagaacatatatattctttaaaaaattattttacattaaaattcctagtttttaatttttttagttgggcaattgagttggagtaatagttatgttctcttgggaactcaaatgttgaatgatactaggcataataatatagatggtcagatttaattatagtgcaatattgattttaagcacctgacttcttattaaatatcttttactaacttgttagatatgcacatcatttatactagatagaaatgtgtgagtcaaaggttaacatacttttcaacaaatattaataatgatttaaaaatgtaagatacttaaatagccattttttcaaattattaggtaatttggtgaattaatttccataattacatctgaaataaattcacccttaaatattattttgtaaaaatccattctggatttaatatattatgtaaaataatataaaatatgcatttggaaagatacaggaaatgttttccc

SEQ ID NO: 273980 - DNA, 282 bp, Homo sapiens
tttttttttttttaatggcttatggtatttattgccaaatcaccatagaaagttggtgttgatttttcacttcctccaatagtgaatgggagtggccatttcctgacctcttgacaatacctggcacaatattcaccattcagaaaaatcttttccagttatttgtttgagcacgttcaaatgttggagcctttttgtgttctttgtctagttttctttggtgatgcttttttaaatttatttgtagtatcacagcccttttccccttctgtcgtcttctcg

SEQ ID NO: 273981 - DNA, 1208 bp, Homo sapiens
caaggacctgctgtcagggctcattaaaccccgaagtatggcaccttggcatgcggactactctgacccagaggagactggaaggcctcagaagccaggtctttgtccttccctcctggttcctgcctccttttctcccccaaattgagtcccagaaaccagaattccttttcctcaaagcaggtcttagaaactagaattcctttctctcaaacccagccataaaacctagctaggtcactctctcccttctccctggaagatcctcattcccgagggggatacccaggggaaggggaattgtacagagcggctttgctgggtttcccgactctgtccatcaccgttaggccagatcctttgtgtccaatcacatttctgcgtggatgttcattcatcaaacctaaatacaaaaataaacgtttttatggccaggacaaaaaaaaattaacaggagtttggaagaagttgcttccaaccctcatggatgactttaggggtataagactttggtggaggaactaattccagacgtggtagaaattgcaagagaagtagaattagaaaatggaacatgaagatgtgactgaattgctgcaacctcatgataaaacttggacagatgaggagttgcttcttacggatgagcaaagagtggtttttcttgaggtggggtctgttcctgttgaagatgctgtgaacatagttgaaatgaagacaaaggatttagaatattacataagcctgttaataaagtagtagcagggttggcaaggattgacaacaattttgaaagaaattctactgtgagcaaaatgctataacaacattgcatgctacagagaaatcttccgtgaaaggaagagtcagtctatgtggcaaacttaattgtcttattttaagagattgccagttggtcaggtgcagtagatcatgcctgtaatcccagcactttgggagactgagacaggtggatcacttgagcccaggagtttgagaacagcctgggcaacatggcaaaactccatctctacaaaaaatacaaaaattaactgggcatggtggtgtgcacctgtagtcccagctactcgggaggcttaggcaggaggattgcttgagcccaagagttcgaggctgcagtgagctatgatcatgccactgcaactccagcctgggtgacagagcaagaccccatgtctttaaaaaaa

SEQ ID NO: 273982 - DNA, 534 bp, Homo sapiens
tccttaggaatcctgggtagaaggaattttctggatattcgagtctatcctctagctccaggtcattgtcagtggcccctgaaacatattattattatatgttaatgaatatttctccagtagtaaaaagtgagagctgcacttattgaattcacattatacatcatactttggattaaagttttacctatggtaaatttcatttattcttcaatatatgcctattgggtattatcaacttcattttacaaacgaagaaattgaagttcagcaacattaaatatcatgccccaagtcacacagctattgagccgcttgtctgagaattctatccaggcgtgtttatgaggtatgaaccacagtccctgccttctggatgtgtgccatattttgcctactagtgaagggactcatttttacatgctccttggtccaaagagtagaaaatggcctaatttcagcaagcaataatgaactgcagtttgtgttaatcatttgaagctgctgataaaattggggattagcaactcaact

SEQ ID NO: 273983 - DNA, 759 bp, Homo sapiens
aacatgtctcagctcttcctgaggacaagattttggctgggatccttgctgttgtcactgcaatactcggaatggctgtgtgactttggctgtgtgactttacagcaatgacacagaaacgaccaggacagatgaaaaaaatccagggaaaagctatttaggggataatattgagactattaagactttcataatgtttttctctgaacacagacatttttagcattattagcaatgcaagaccatcctgggaaaggctaccaccaatattctgtgaggcccatggttgcttatgttagagcattgcgcccagcctaaccaggcctccacgcctgccccatccagtgcctcatgctaatgaagcagcaatgccaaaaatccagtattattcaatttactccatatcatcacgcttttatggcctatacaagtaatctaaaaatctgtgatagaatctggttcttgatatctgagtccccttccaaagccactgtcataaatttagccaggaatgagtcaagctgttcattaggtacaagtgcaagttgacatccaaattatcagggaccctctcttaacaccattttggttggatacagctttaaattagctgtaactgtaacttggcaaagattttcaataataacaaagggtaaaaattgccatcatattttgccatttaatcagcacatgttccaaggagccaaggaataaaatcaaagacaaaagggcaaggtgtcgtcttgccttatcttttta

SEQ ID NO: 273984 - DNA, 443 bp, Homo sapiens
tatacctgtacagaaaaagttgtagaaaggcttaaaaggaaaaacaaaagagtgactgaataatgtaccttgattccttgatttttctcagttactatgatgatttttgtcatctgttgaaaaaggtttctgctaaatttaattatcagatcatcatctcaaatcttcaaagttcctttttttgtctttctctattaacagacaaattaaaagggaaggatcaagtatatgaaatgaaattgtgatgctccaggaacagttttaggtcttacgtttctcattggaagaaaagtcctctgtcaaaaagaaaattttgaaaagtttaaattatctaaaaatatacagtgcccctaaacttaacatatataatgagtgtatggcctggaaatccaatctcttcataggctatttgcacatgcaatatcaggaccatacttacagtt

SEQ ID NO: 273985 - DNA, 376 bp, Homo sapiens
cttttagttcaaattctcactcacagggatctcactgactcctggctaaaggaggaggagaaatcacaagcacatcaattgctccctcctgatccaatcagtttgtgtcttgattgtggcttcctatggcctcttaagcaagatcttcaacacagcaatgtcatgagggctggcagacactccaactgtgtctacgcaaagatgagtaaaccatgttagagtttaaaaaatcttattttcaggcagtgtgagataatttgccctcaatcaacatggactacctttacatagagaaataaattttagaaatcatctggcgtattaaatcaatggaaaataggatctgataacaaagcattgtctattccagctgaaa

SEQ ID NO: 273986 - DNA, 665 bp, Homo sapiens
aaaggaatggtctgcacattttgttagttttgtttctgttgattttctaatcgaaggaaggaaatgagcccgtaatgatctactccttaaagcttgaacacagataaaacgacatccgatcccatcttaatgtggctttgaaataccctttcctaatacttcctgagccctcttcagatgcctttacatcatcagagcctttagttgccatttttgcttgtggttgcattatggcttttcaagcagctgctgtggtttttgaattgtttcagtatttttgttataaattaatatctgcattttgaaatgcagatccactcacccccaaactaatttttgatttttgcttatcatattgatagtaatgaaaaaaaagaaaaagaaaatgaagtgccttagaaagcgtcagtgtgaattgctttcacaaaatgacactttgatgtggttatagacttatttttattcttgtttcattttaactagtgtattttgaaaatcttgtctgttgatggcatttgggatggtagtgttttcgctgttcgtgggatttttctttgtattcatatcttaagtggcacggtctgtttggcctgcagagctggaactatggggagggccgcgctgagcgttgagtggagacatggagcctgcatccccacagagca

SEQ ID NO: 273987 - DNA, 465 bp, Homo sapiens
caaagtatacaaaaatgtagctctgctcaccaaatactaggaagaaagtaaagggtttggttagttatagtgaaaatgttgtcacacagtatgggaatttgattacatattttttatgttttccttctacatatgcacatggattatgtctttgttcactgttaaatctttagtgcctcacctatagcaggtgttcaaaagatactcagttcaagagaaccatgctgaaagaaagcaaagaaatagataaaccatgggataaccagcagctaaattggacttaacacttgcttttgtaaaaaaaaagtttcattggaactcagctagtctacttttaccttttctctatggttgctgccttcatactgcaaggcagattggagtatttgtaacagagaccctctcaaagcctaaaatatttactatttgaaagtccttttcaaaaacagccaacctttgttataa

SEQ ID NO: 273988 - DNA, 364 bp, Homo sapiens
gccttgctggcactgcctacatggattccagctttgggtgccgaggtgcctggttctacatcaccttgtgcctgctacctagaatagacctcccgtgcctgcctctttgcagacaaactgccccagccttgtccactgtcttgctgttgggtggagggggttctgtatggggacaaaagacagacgggcaggctgtggctggagctgtgtgcagactccattgcagcctctgggtcctgctctgtaaagggtcctgtgctgagggaccatcctcttccggggtctagagaggcctctggcctgggtgtaggatgtcagacctgagggccaccccagaagccactccacggaggccatgccccta

SEQ ID NO: 273989 - DNA, 427 bp, Homo sapiens
caagttgagaaccactgagttagatcagagaggtggcatttaagatgagaaaaaggaattcaaatcaggaaatactcaatctacatatttctttgtgttttataaccacctaagaattgtgtgcttcgggccaggcatggtggtgcatgcctgtaatcccaaatcccagcactttgggaggccgaggcgggtggattgcttgaggtcaggagttcgagaccagcctggccagcatggtgaaacaccttctctactaaaaatacaaaaaaaaaattagcctgacatggtggcagatgcctgtaatcagtcccaactactcgggaggctggggcaggagacttgcttgaacctgggaggcggagtttgcagtgagctgatagcataccactgcactccagcctaggtgacagaacaagactgcatctca

SEQ ID NO: 273990 - DNA, 892 bp, Homo sapiens
ggacacacaaccagaagcaaagacagcagctgacctgtagctgatgacggagtttcgctcttgttgcccaagctggactgcagtggcgcgagcctggctcactgcaaactctgccttccggtttcaagcgattctcctgcctcagcctccggagtagctgggactacaggcacacaccacgcccagagaaaaacagatcttcaacagttttttgatggaaataaacaatttcaagttgagacaacacatcagcttcatgcattccttcagcttgaagtcaactgggcctgggttgaatctggttctgttttgttgttgtttcattttgttttttagcatttgactatgtacagtctctatttctaagtcttgatttcctcatttataaaacaaagcaactaaatgatatcaaatacccttgttttgaaaatcaaagaataagcacggcacccaagacaactttttgtatcacaggcacacatgaatgcttttttccttttccttttcttatcataaaaacctatattttatgacttttacatttattcctagatgctctcatatgcattatctcatttttacaataacattataaatataaacactgttatgctattttacagatgagagacttgaagcacagaagggtaaaactacctttaacttctaaagaaattttgtgagaagcatctgagactcttgacagttaaaatccctatcatttcagaaagtgcaactggggatcacctgtttttaaataattctagttgagaatagtcaaaggtcgcatttatgaaggaagattggcatttttaaggttcccaatgatttcatcaaggttatttagtactcctaagcctcagtttcttcacttgcaaaataagaataccaa

SEQ ID NO: 273991 - DNA, 555 bp, Homo sapiens
agatgggagatatgaagtaggagactgatgtttagcaggccacttaacatacttgagactcagttccatgattcgttaagtaggaaccaataagctgagtatcactggctccccatgaatataaaaggatgtatgttatactactatttccaagaactttcctacaaagtgtctgtgacggattgaattatttttctcaacttgttactcccttctttccatacgaggattacatatccctttcccattggcattggtgacttattttggccgatgaaatgggagtgtatgtgatacactcctcatacataggtacctaatggcagaacttgtaaaacgtaggaagtctgtgcccgtgttcttcttcatgtcccctctaccgtgtcccagccaatggctattcctgcagcctaattctcagaataaaaagtgaggggaagcaaatcctaaccggacacacaaccagaagcaaagacagcagctgacctgtagctgatggtatctgtaaacaatttatttatgtgaataataaatagttgttgtaaacactcagta

SEQ ID NO: 273992 - DNA, 1009 bp, Homo sapiens
ccaagaactttcctacaaagtgtctgtgacggattgaattatttttctcaacttgttactcccttctttccatacgaggattacatatccctttcccattggcattggtgacttattttggccgatgaaatgggagtgtatgtgatacactcctcatacatagacggagtttcgctcttgttgcccaagctggactgcagtggcgcgagcctggctcactgcaaactctgccttccggtttcaagcgattctcctgcctcagcctccggagtagctgggactacaggcacacaccacgcccagagaaaaacagatcttcaacagttttttgatggaaataaacaatttcaagttgagacaacacatcagcttcatgcattccttcagcttgaagtcaactgggcctgggttgaatctggttctgttttgttgttgtttcattttgttttttagcatttgactatgtacagtctctatttctaagtcttgatttcctcatttataaaacaaagcaactaaatgatatcaaatacccttgttttgaaaatcaaagaataagcacggcacccaagacaactttttgtatcacaggcacacatgaatgcttttttccttttccttttcttatcataaaaacctatattttatgacttttacatttattcctagatgctctcatatgcattatctcatttttacaataacattataaatataaacactgttatgctattttacagatgagagacttgaagcacagaagggtaaaactacctttaacttctaaagaaattttgtgagaagcatctgagactcttgacagttaaaatccctatcatttcagaaagtgcaactggggatcacctgtttttaaataattctagttgagaatagtcaaaggtcgcatttatgaaggaagattggcatttttaaggttcccaatgatttcatcaaggttatttagtactcctaagcctcagtttcttcacttgcaaaataagaataccaa

SEQ ID NO: 273993 - DNA, 161 bp, Homo sapiens
agccaccagcctgtcactgactgcaggtggccacctagagcaatctggggactggatgagccttgaggacatcacgctaagagaaacagaccagccaaaaaaggagagctaccccttacttctctttcatgaggtctctagagcagtcactcattgaggga

SEQ ID NO: 273994 - DNA, 207 bp, Homo sapiens
tcgaccactaactttgctgtttaaatcaccgctttgaaaatatcttggttaacgttaaatattttgtgcttagaggtataataaacactgtagttagtggggataatgccatgaatattagcaagctgaattaagctactaatccatttaaagaaagatgggttacggaagaagcaagcctctgaagcatttgctttaaatctaaat

SEQ ID NO: 273995 - DNA, 421 bp, Homo sapiens
agttatcaaactacttggactttaaaatagctgtgatcagccggatgcagtggctcacgcttgtaatcccagcactttggaaggccaagatgggcagatcacttgaggccaggaattcaaccagcctggccaacatggtgaaaccctgtatctaccaaaaatacaaaaactagctgggtgtggtggtgtgtgcctgtagttccagctacttgggaggctgaggtggaaggatcgcttgagcccaggagttggaggttgcagtgagctgagattgtgccgttgccctccagcctgggtgacaaagtgagaccctttcccccctcccaaaaaagaaaaatagctatgatcaatgattaatatgttcaagaaataaataacagaataatttcaccagggtatgtaaaaaatgaatcaaacggaa

SEQ ID NO: 273996 - DNA, 483 bp, Homo sapiens
gttcccctgaagggagcactctttctgctgcaggcagctcccagttatccgaaacaccgtcaaacccaaggcctagcagctcatttctggtttcgagctatgcttgggggaccactttcttgattccaaagtgtatcccgtggcctcaagaagaagacaaatagaatcaattgcttttgtccctttgatggaagcatttaaatgtgaggtcctgactgtggcatgagagaaagttggacgccctgtcccactaacggttgtttctgatgattctacaccccactctgtctcctcctgacaaccacagccatctgagcacctggggttcatgtaagaacagaagtgcaagcctcattcatttaaatgctcttcaaggatatgccctatgtaaataagaaatgagtgtgcaatgaattaagacagtatacattcaattacaaaaccacgagttgtgaaaaataaattatgaatatgcaaaggaaa

SEQ ID NO: 273997 - DNA, 583 bp, Homo sapiens
tccttaatattggaatccctgactttcagatggtcacagcctgcccaaaatgaaggctacatttcccagtctcccttgcatgtgtgaccaggtgcgaccatgtgattaagttctccgcaatggttgaagagtagaagttatgcacgcaactccagaatcatgcccctcaagggaatgagcacatcctccaatattttccactttatcttttccacctccacctgacaatgaaacctggagcagccatccagtctatgatgttaagaatccgggtacctaatgccgtccagccaccatgcttaccctggacatagtctgaacctagtttaacttttacatgagaaagaaatttaagttgcttgggttactttattttggcctttctgttaccatagcctgaactgcatcggtgatactatgacataataagaaatatatatttggtctctgaccgtgcacacaacttctaaaacccttggaatttctggagtgttaagaatgtttttttgaggccaggcatggtggctcatgcctataatccaaacactttgagaggctgaggtgggaggattgcttgaggcca

SEQ ID NO: 273998 - DNA, 328 bp, Homo sapiens
tgtctgtagaatcaccctaaaatgctttaagcttctctacagaaaataacttcctggctgggcgcggtggctcacatccgtaatcccagcactttgagaggccaaggcgggcagatcacctgaggtcaggagtttaagaccagcctgaccaacatggagaaaccctgtctctactaaaaatacaaaattagctgggcgtggtggtgcatgcctgtaatcccagctactcaggaggctgaggcaggagaattgcttgaacctgggaggcggaggttgtggtgagccgaggttgcaccgttgcactccagcctgggtgacaagagagaaa

SEQ ID NO: 273999 - DNA, 350 bp, Homo sapiens
aacaaaacacaggactctaaggttattgtcacataggctgtgtggctgacgtctgctacaatagaaccataactcttctcaggatggtagggttttgatgtaacctatacttcccgcacatgtaccctcaaacttaaaataaaagttggaaaaaagaaaagaaaaagaaagaaaagaaactctgcttgaggcgccaggctgctgtcctgtggaattcaaactcgaggctgcaacatcaacttttaccgtatctccagcctgccggcctgctctccaaattccaaaactgccagcctctgcaatcctgagagccaattactgaaaataatttgctccccatcccccgcccc

SEQ ID NO: 274000 - DNA, 429 bp, Homo sapiens
agttagaggagcaagagtggaatcaaacaaagcgtcttaatgcctgggtctcaaaactcagaacaaaattgctttcaccatattctatcacctaaaggaaatcacaagccagtccatctttaatgatcagagaattagattccactttgggatgtgagtagatgcagaaaattgtggccatttatgtaaatcctaatctggcctcaaatccttttctgtgatggaatgagaaagcctcaaaatctttgtgagttcagccctccaagcagccactcccaacttttagacaagacacaaatttgtcatccatggtgcaagacaataactagtgttagtctgctcatttatgagtagaataatcacagatatgattgctataacctaataaaatgatatatcctaataaaatgatatattctaatatggtaa

SEQ ID NO: 274001 - DNA, 402 bp, Homo sapiens
cttctgaaaatgatttctattacaggtattcagagaaagccaatgaagacacgaagagtgggtgcagaacctcccgagagaaagagatcccactgtcctgagctcacgggcacccacctagccccgtcctgagatggaccctgcccacctgtgatgctgacatcccccctctcagctgacttagagcccccgtggcgggtaggatgctccctgctgcactgccctgcaggccacccagaaccatccagaaccacccagaaccatccagaaccatccagaaggtccattctcctcctcccgccttgctgccctttcctctgccaggaacatccttccctaactgtccaggcacaagactcctagatctccaaaacttaggttaagtaggagcccccttgggtg

SEQ ID NO: 274002 - DNA, 266 bp, Homo sapiens
gaaaatgttgagtataaatttcactgatgattaagatctggattcaacatttgttatgaaattgtcattactaataggatatcacatgatgatttagtcattgtaacctttgagtcatgaacactattcctttgacaaacagcatatgtttgtgatagtacacagatgtaaaatttcattttttcttcccctcaacaccataactaaagtaaaggaaatctgccttaaaagagacattatccagtgacataaatctgactaaatga

SEQ ID NO: 274003 - DNA, 435 bp, Homo sapiens
caataacagttttccaaaagataaaaacacaaagaatgagagaagaatagtttcttctaatttcccctatcttaacctttttcccattaaaaaaaaaagtgcagcttgccaccagtactcacttaattttacataaacatgcttttcgaggctgaagcaaatctgattgattttcaatgtgaaagtaaaacataaaaattgttcttggagttatttctaaacagaactaacatcagaatcatctgaatcatcagaattgtctatttcggaaaaattggattcatcaaatgaatctctggccaacaactgttggagaccaatgttaacaccatgtgtaggaatgctgtgttttccaggatttgacattttcagcgatcaagaattactatattttgtaaataaaaataccactactaaaagcagaatgctctaaat

SEQ ID NO: 274004 - DNA, 429 bp, Homo sapiens
tgtttacgatgtgatacatgaaatgaagggcacaggcaagacggggcaggaggacagaggactaacgggtctctccgagttaggagtccaggaaagcttcctagaaaaagtgcgccttgttctgggctataaaagtcttgggtgaggagggctgggcacggtggctcacgcctgtaatcccagcactttgggaggccgaagcgggtggatcacgaggtcaagagattgagaccatcctggccaacatggtgaaaccccatctctagtaaaaatacaaaagttagctgggcgtgatggtgggcgcctgtagtcccagctactcgggaggcagaggcaggagaacggcttggacccgggaggtggaggttgcagtgagctgagatctctccactgcactccagcctgccaacagagcaagactctgtctca

SEQ ID NO: 274005 - DNA, 2627 bp, Homo sapiens
  misc_feature (2107)..(2107): n is a, c, g, or t
tatatatagagcacctggcacagtgcccggcagagggtgggtttgtagattccctctgtaacttctcagccttgtttgcacactggcttttttgtcctgctggcttcctggcctctgcttcgtggccttgcgacttcatgcttaagcacggagcagggttggaaggaagaaacatggagtagtggcccctgactggaagcttcttcggacaggtgtacaacccttccagagcccctgtagttgctgccactgtcactgctgctgctgcaacctcaagataaggatcacactgcccaagttcagcctgctgtctgggtgtcagcctggagcccaggcagcacggtggccattcattgctgcttgtcagagaagaatgcagctatcttctttcctgcgtgtgctggcagccgtctgggtggcattagtaacccagccaccccgtgggccttctccacttcagctcaggtctttgctgagagcctgagttgtagacggaggctgtgaatgcgggcttggtgaagtgggctgagcacgccagcagatgggtgggcgatgggcttcagcagtgtcccactgctgactgtcagtctgggagtggtggcgtccccttcttccctctgcctcacagaagttgcctcctgaagttgccgccttagtctgaaactggggggtgcaggggtgtaggggtagcgggcagctttgcagaggagaggttaggcaggcaggcaaagcttgatgggttttgtgttttgcagagcaccgtggcctcctgggatgctaaggtcaccctcaggtcatcccaggtgtttgctcatggcaactcgcttccctggcggttgtcaaagcccctccaggcccatgcttgtcttcaccaaggcctttctttctccttcagaggcccctgggagcagctcctgagctggtgctgaggagcctcaaggtacaagatgggaaagaaattggaggccacaggctggacacctgattggaacaagagctatagcctgagcgtccaggtgtccagccaagttcccaacccatcttccctgagccgcttaaatttacattgttctcttgctccctggaggaatggcaagttttctgttttcctctccctacatggatccatatcttcctatagccacacagaaggtgccaagtaaatgtttgttgaatgaatgactgacctctggacaagaggttttcctgcttccccattgattccagctgatctctgggcttctttccatggctaccgaaggaagagtaaagtttctcttcaagcagccgtgcctctgggctctcagctgtgcccatctttctcttccccacagggaggatgtcccatcccagagcctccctgggcccctgcctctgctggcccatacgtgtgtgggctgggattctgtcctcctgtccttgtcctcatctgctccctatggttttgctccttcttccatccccccactcatctgggaccctccagccactaagagactccacagcagccctaggccagctctagcctagtgtcttccctttgctaggtccccactctcctgcatgaggcgtccacgccaggcactgtcttcactgtgtaatgtcacccactccatcttagggatgcttgggtcatattttgaagggggggtgtttgagacctctcccttctctcttcccccatctcacctccacgccttcggagagagaagtgatcatgtgaccgcggaaacagggatcagaaaggaaatcaaataacaggaattccatcctggacactggggcctgacaaagagctcttggaccagtgctggatgcaatttgggcggtttggtttgaatgggggaaatatgagtttccagaacagggtatttgaaatcatggctactcagaaaattgaggcagtggtcactctggctgtaaatgcggcactctgtgattgtcaagacctttgtaattgagggtgccttggctgggtccaggatatacttcatcataagccatatctggagccagcatgaattacaggggacaggaattcccattcatcggtcacttcccacatggggctagggatttcgtgtgtacactcattccatcttctcangtggctctgtgaagtaggttttgatattccctttttacagatgagagagtggagactctgaaaagttaaataactggcccagatttagttagtaaacagcagaggtggactttgacccgttgctctcactggccccaaagcctgtgttcatgttacacactggtcccctcccactccaggtgtctgtactttttgtgtcacctttgagaaaggtggtcttttagtttctttagccacacggtgagcagcttggactctggggatacactaaacttgccagctctcttcaatcctcacatcctgtgtttcattgctagtgtccctccaggatggatattccagtcctcgcagctcagggctctgcactccccatgaaagaagcataacaattagcaccaaaagcaagctactggggaggctgaggcaggagaattgcttgaacctgggaggcggaggttgcagtgagccaaaatcacaccattgctctctaacctgggagacaagagcgaaactccatctc

SEQ ID NO: 274006 - DNA, 613 bp, Homo sapiens
tatatatagagcacctggcacagtgcccggcagagggtgggtttgtagattccctctgtaacttctcagccttgtttgcacactggcttttttgtcctgctggcttcctggcctctgcttcgtggccttgcgacttcatgcttaagcacggagcagggttggaaggaagaaacatggagtagtggcccctgactggaagcttcttcggacaggtgtacaacccttccagagcccctgtagttgctgccactgtcactgctgctgctgcaacctcaagataaggatcacactgcccaagttcagcctgctgtctgggtgtcagcctggagcccaggcagcacggtggccattcattgctgcttgtcagagaagaatgcagctatcttctttcctgcgtgtgctggcagccgtctgggtggcttttgcaaagatgaccggcatagggcatgccagctccttgagacgggcttcaacaatggttcctgcttgggtgtcccagcgggcgcctatggcaaaaacacagcggttgcaattgtgtggcagcttgctactaatgataatgatcaagttgtttgatgcaataaacattcaacattctggttttgtcataaaa

SEQ ID NO: 274007 - DNA, 635 bp, Homo sapiens
ctggaaatcagctccttcgactaaaaaaggtggacacagccacgctgcgctctgagctgtcgcgcattgatagccagtggactgacctgctaaccaatatcccagccgtccaggagaagctccaccagctccagatggataaactgccttcccgccatgccatttctgaagtcatgagttggatttctctaatggaaaatgttattcagaaggatgaagataatattaaaaattccataggttacaaggcaattcatgaataccttcagaaatataagggttttaagatagacattaactgtaaacagctgacagtggattttgtgaaccagtccgtgctacaaatcagcagtcaggatgtggaaagtaagcgtagtgataagactgattttgctgagcaacttggagcaatgaataaaagttggcaaattctgcaaggtctagtaactgagaagatccagctgttggaaggcttattggaatcttggtcagaatatgaaaataatgtacaatgtctgaaaacatggtttgaaacccaggaaaagagactaaaacaacagcatcgaattggagatcaggcttctgttcaaaatgcactgaaagactgtcaggatctggaagatttgattaaagca

SEQ ID NO: 274008 - DNA, 794 bp, Homo sapiens
tgcctgatgtttaacttcaagctttcagaaaggctccagatggataaactgccttcccgccatgccatttctgaagtcatgagttggatttctctaatggaaaatgttattcagaaggatgaagataatattaaaaattccataggttacaaggcaattcatgaataccttcagaaatataagggttttaagatagacattaactgtaaacagctgacagtggattttgtgaaccagtccgtgctacaaatcagcagtcaggatgtggaaagtaagcgtagtgataagactgattttgctgagcaacttggagcaatgaataaaagttggcaaattctgcaaggtctagtaactgagaagatccagctgttggaaggcttattggaatcttggtcagaatatgaaaataatgtacaatgtctgaaaacatggtttgaaacccaggaaaagagactaaaacaacagcatcgaattggagatcaggcttctgttcaaaatgcactgaaagactgtcaggatctggaagattttgattacagcaaaaaaaaaacacaacaacaaataaaaaaaattttttgggcccgccttggcccctcaaaaaagtttttaaaccatttttttgtgggcgcggggcccccattggtttgttgacactggccaagcggtttccacaggaaacctggtctagcactggttggttttcccccaataaaaagccccgggggaccgggtgtttaaaaacccaggggtcggggcttacgggcttcacaggaccgcggatctattaccccggg

SEQ ID NO: 274009 - DNA, 450 bp, Homo sapiens
tcaaggaagtaatacatattgacatcattgaaacagcagcaccctctgagaggcaagcatttagtaggattttaaagaaacttgagaactgttacataaggtgatgaattgggcatagcatgtaaaattatatttaagcaaggaaatgatctctggtgttttaatattcaacttgattgcttcctcttgggttctgtgtttcccactgtgtgacctgagctgtcagaaaaccttaagaattttctttgcatcatttttccatgcagtttgtgtacatgtctcatgtacctcgtggcagccactggttttgttcatcaaatggtgggttgtgggatgctctcctgcagtctccctctaattaaagaggttaaattgccgtttgctcagcctttagttcctttccacagcttcctaggctcttaaaaattagcactatattcctttcagatt

SEQ ID NO: 274010 - DNA, 421 bp, Homo sapiens
ttgagaagactcattaggcctagagtttcttctagttgaagtaataatacttgttttcctcatcaagtgtttgaaggcagatctcagttaaccatggccccaggaccatagatgagttgattggcttctttatcttcatgaaattgacataagcagtacctactctggcaggtctgttcttctagaaattactttacaatacatattttgcaacacaatgtacaatgcaaatatgctatgcatatggactatgttatactaattagattcagcatctatttagagagtgtttctaattggtttctctacttgggaaaataagtcgagggtaagaagtcttactgtgaatttaaatcaaattaattgtagccttttatatcagttatgcctaataaaatgttattttcttgaattaattaat

SEQ ID NO: 274011 - DNA, 536 bp, Homo sapiens
ttgaattgcttttgcatctttggcaaaaatcagttgagcatatctgtgtgaatctgtttctggattttttattctgtttcattgatctatgtgtccatccttccgccaacatctgcaaaaccagttctgaggccccaggaaggaatcggctctttgagcctcagaagggtacagctgtgcgtggccacagggaacacactccaggctactggggtctagtgatgaggcacttttgtcaggacgtggtccacagagaggagaaaagaaatgttctttagtctcagaggccaagacagacgcatgggaggagagggagatggcaaggacctggataactggaggcgtgatgaatggagagtctggtgcaggatccatgccacgggaggaggcccctgtggagagtgagaccttgggcggttagggctggccggactgggccccctgctcctcacagtgtgacctaaagccgcggcctggtatctagtgctttccagcgtagcccaggaaggcgcgccctccttcggcagaaacacctt

SEQ ID NO: 274012 - DNA, 1029 bp, Homo sapiens
gcggcaagagtacccagaaagtgccctctccgcgggggtctgcggccaaggaggatcctgctcgtggaatagctaccaaatcggcctccagcccaccccaggggcggggtagagaaagggcaaactgtgaccgggacttgtgcacccgattaattgaatattaatcaccccaaggcctaggccaaccgccacccagagagtggcagctgcagaacccaaagacgtggagccgggctgggggtggggaagggaggccgccacagctcccgccccgccggcagtttaactgcttccgcagcctcaggcctcccggtgcgaccccggctgcgactcggatccgtttattccaaatgtcccagcccacgccgtgcccagagtgtggcgacacgaggccaaactgcccacctactgaaaatctgtctgtgtgccgagcacgcgctccccatccctctaccaaatgcctggctggcgcgtcatccctggctttgatggacggagtcttgctgtgttgcccaggctggagtgcagtggcatgatctctgttcacttcaacctccgcctcctgagttcaagcgattctcctgcctcagcttcccaagcagctggactacagcagggatgacggcgctcctggaggctggctgggaagctggtcagggtcccaggactctgacacccccaatggcccttgtagccttggggagtcctgtgatccaaggctggaggactgagtcccctccaggtctcatagcagacgaatagcagcttcacccaggcctgttttgtcgtggccccattcagaggccgccctcctctgtggtttagagcatgccctggaatccctagcacaaccaggggttacctcctgctggctgaccccttcctgtgctgcgggctggaatatagggtttaaccctgttataacccagaggaacacaaaaggaggaacatcaggctttatggagagactggaaatgaagtggaggttttccttgctcatgaaacctggctcaccctacaggtagtccc

SEQ ID NO: 274013 - DNA, 496 bp, Homo sapiens
gcggcaagagtacccagaaagtgccctctccgcgggggtctgcggccaaggaggatcctgctcgtggaatagctaccaaatcggcctccagcccaccccaggggcggggtagagaaagggcaaactgtgaccgggacttgtgcacccgattaattgaatattaatcaccccaaggcctaggccaaccgccacccagagagtggcagctgcagaacccaaagacgtggagccgggctgggggtggggaagggaggccgccacagctcccgccccgccggcagtttaactgcttccgcagcctcaggcctcccggtgcgaccccggctgcgactcggatccgtttattccaaatgtcccagcccacgccgtgcccagagtgtggcgacacgaggccaaactgcgtagcaacgacgcctgattggctgcgctggtcccttcgcaacgaggcgattggctgcctggtatccaggagaccgacgtcaaactcggactggga

SEQ ID NO: 274014 - DNA, 339 bp, Homo sapiens
gtgacatttgtgttgtgcctgattacactgtgagccccactcaccctctctgtggctcctgggggcacttgtgagtgcatctgtcacctggaatcacctcaggttccctaccgtgttacctctctcctgctctggctcccactcgtaagggacatcagtagggccggtgtcatgaatagccactatttttttttctttgagaaggaggctcactctgtcatccaggctggagtgcagtggcaaaatctcagttcactgcaacctacacctcttgggttcaggagaatcacttgaacccaggaggctgggttgccgtgagctgagatcacaccattgcac

SEQ ID NO: 274015 - DNA, 441 bp, Homo sapiens
agtaggccaattagcagacaacaggtgaaaccaacagggtttcatctactccaatagtaggtgattacaaggtgcacagtaaaatctgaagagtccataaacttttgaaaatgatcagccagggctcccttccaggccagggccccaacactatagcaaaagggctgatagtaaaccaaacctcaaaaggaccaagacaacagagagcatggaaagaaatggtgcagataaaagtgggagagggaagcaaaatcaggaaatttaagaacacaagctacggtattatgttaacaccataagaaaacaagcggtagctctgtgaaatcagaaaaactccctgaatcaagcctctttctaaaagttaaggctaactaatgccacataaaaataaacacttgaagtactgaagtcagatttcatgctgttattaaaaaaaaaaaa

SEQ ID NO: 274016 - DNA, 458 bp, Homo sapiens
ctaaatattttatggtgatgctattgcaaacataattgatttttaaatttcatagttcagtgggtttctcctggtatataaaatatatacaatttttatacattaatattgtgatatttgagctgtctaaaattactcgtttattctatcaattttgtacattcctttggatattctatgtaaattttcatatcattaggaaatataggtggttttacttctacccttctaatgtttatacattttatttctttctcttattgcaatgagtatggcctctagtaaaacagtgggtgagttgtgagactatacatcattacctttgtcttaattttaggaggagaattacattcaatatttgaccattaagttagatattagctgtagcattttctagcacctttatcaggttgaagaaattttcttcttttcccggttttctaagagtcttttttgaa

SEQ ID NO: 274017 - DNA, 670 bp, Homo sapiens
ttattctattttacctctaacagaagtttaaggttcgtgtaagtttcgttcctctctgattgtaggggagacgcccagagcgccatttggaggagagaacctggcatcctttccttaccttgatttcaggtacccagctcctagcaaatgtgtcttcctcccagggttctttggggtaaagaatttggtgagaaggagctgaatgttatggctgcgtttctcagccacttgctcggagccaagcatcctctcaccctttctttcaactggtagccagaaaatacgggttgagcatcagggattctcaaccgtgtcaagctccagccctgcctgttgtgacagacgtttcctgatgcctgttgctctctggaatgaaggtcatgggcagtattacccacacagccattcaaaatcagtcggcttcgtgacctgttgtgaaaggatggcgattgccgtgccagcacgtgacatggactcggatgcctgcgcacacaggtgcaccttccagaaggtgaggtcagcccgagcgcccaccgccatgtgagtgcgctgctgcagtgaccagttgctggaatgttctgaacagagcccagtgccacccactttgatgtgcgctattgttagatctccggaaaaatcagagtgcattaaattcctgcaaaaattctgt

SEQ ID NO: 274018 - DNA, 325 bp, Homo sapiens
acatgcccatggttggccctcaccgacgaggtccagcctcgggtcgccaagcagccgcctgctcgctgccagtgagccctccctttctcagcccacggcccctgccccggtggacttccaccacctgacctgcaggcacgcttccaggagctcagaggccactgccctggcggatgacaccctggaagcacacactcccccttgacagagagctttgcacatcagcagagggcaagccagcagcaaacttcgcaggccctggctggcaaacagactccagcctggaccccaggcccataggagaagcttcaccctggcagggtca

SEQ ID NO: 274019 - DNA, 377 bp, Homo sapiens
ttttagatttcttagtggggcaacaaggatgcatgcttatgtactgtgacgtggtaggagaagtgggccaatatgagaggtggagataaaactcgactgtcttccatggcatatttacttttacttgatgctaaatcaaatgaaacaagaccttgtacagctgttattaactgcctttgaaaatttggccctttttttcccaggaacttgaaataaaaatgccaacaaatggttcttgtgtattttggtagaaaaaaacttattttccttttcttttgattgaaaaaaaattattgttgatctttgaaaatgaatcaaggctttaaagaggattatagtagatatttcattctttataaaactttccttaatgccta

SEQ ID NO: 274020 - DNA, 484 bp, Homo sapiens
acccaccttggcctcccaaagtactaggattacaggcatgagccaccatgttcggccagtgcatgtctttttaatattctgtgtgacaaaaataagagtaaaatacctgtgctacacatcatagtataacaggagtctcacagtgcttgtgtgattgagttgtgagctgaacttgctgctttttccatggaatactatttttacttaaaaaaatctgacaaactatgcttactctgtcttgtgtttttgtcaacaatttttgtgaaaacaaagtgagcctgtcactttaagagacagaatttgttgccaatgataaaaatctcagctttcaagcgaaaagtgaaattttggaaaacgaatatccaccacattgagcttgacaactttgcaatacttaaaagactttcctgaggagattggtggtaatattaacaaatgttactgttgacactgaataaatgcagaaataatgacatggaataat

SEQ ID NO: 274021 - DNA, 4852 bp, Homo sapiens
gtgggcagccgcgcagcgggaagagccggccgaagcgtggcggccacagactgtgggtaccgggtccgagggactcgcgcttttctctccgtgccatggcgccagcgaaagccacgaacgtggtgcggctgctactaggctccacagcgctgtggctttcgcagctcggctccgggacggtcgccgcgtccaagtcggtgactgcccacttggccgcgaagtggcccgagaccccgctgctgctggaggcaagtgaatttatggcagaagaaagtaatgaaaaattttggcagtttttggaaactgtgcaagaattagcaatttataagcaaacagaatcagattattcttattacaacttaatcctgaagaaagctggacagtttctagacaatttacacatcaaccttttaaagtttgctttctctataagggcatactccccagctattcagatgtttcagcagattgcagctgatgagccaccaccagatggttgtaatgcatttgtggttattcataagaagcacacctgtaaaattaatgagattaaaaagctgctgaagaaagctgcttcaaggactagaccttatctatttaaaggagatcacaaatttcctacaaacaaagagaacttaccagtggtgattctctatgccgaaatgggtactagaacatttagtgcatttcacaaagtattgtctgaaaaagctcaaaatgaggaaattctgtatgttcttcgccattatattcagaaaccaagctcacggaaaatgtacttatctgggtatggtgtggagctagcaattaagagtacagaatacaaagcactggatgatacccaagttaaaactgtgactaatactactgtagaggatgagactgaaacaaatgaagttcaaggatttctctttgggaaactaaaagaaatatattcagatcttagagataatctgacagcattccaaaaatacctgattgagagtaacaaacaaatgatgcctttgaaagtctgggaactacaagatcttagttttcaagcagcttctcaaataatgtccgctccagtttatgatgccattaaattaatgaaagacatttcacagaacttccccataaaagccagatctctaaccagaattgctgtaaatcaacatatgagagaagaaataaaggaaaatcaaaaggatcttcaagttagatttaaaattcagccaggcgatgctcgtctatttataaatggccttcgtgttgatatggatgtttatgacgcttttagtattttggatatgctgaaattagaaggaaaaatgatgaatggccttcgcaatcttgggatcaatggggaagatatgagcaaatttttaaaattaaattcacacatttgggaatatacttatgtattagatattcgacattcttctataatgtggattaatgacttagaaaatgatgatttgtatattacatggcctacaagttgccagaaacttctgaagccagtatttcctggaagtgtaccttccataaggcgcaattttcataatttggttctgtttattgatccggcccaagaatataccttggattttataaaacttgctgatgttttctattctcacgaagttcctcttagaattggttttgtgttcattcttaatacagatgatgaagttgatggagcaaatgatgctggagttgctctctggcgagctttcaactatattgcagaagaatttgatatatcagaagcatttatttctatagtacacatgtaccaaaaagtgaagaaggatcaaaatatactcactgtggacaatgtgaagagtgttctccaaaatacatttcctcatgctaatatttgggatattttgggaattcattctaaatatgatgaagaaagaaaggctggagcaagcttttataagatgactggcctgggtcctttgcctcaagctctttataatggtgaaccctttaaacatgaagagatgaatattaaagaactaaaaatggctgttcttcaaagaatgatggatgcatctgtatatttacaaagagaagtttttttgggcacattaaatgatcgcacgaatgcaattgattttctaatggataggaataatgttgtaccccgtataaatactttgattttgcgtactaaccagcagtacctcaatttaatatctacatcagtaactgctgatgttgaagatttctctactttctttttcttggattcacaagataagagtgctgtaattgcaaagaacatgtattatttaacccaagacgatgagagtataatttctgcagtcactctctggattattgcagattttgataagccttctgggagaaaacttctttttaatgcattaaagcacatgaaaacaagtgttcatagtcggttggggattatttataatcctacatcaaaaataaatgaagagaacacagctatttctagagggattttggcagcttttcttacacagaagaacatgtttttgagaagctttcttgggcaactggcaaaggaagaaattgctacaactatttactctggagataaaattaaaacattccttattgaggggatggataagaatgcttttgagaaaaaatataatactgttggagtgaatatttttcgaactcaccagttgttctgtcaagatgtacttaaattacgtcctggagaaatgggtattgtcagcaatgggagattcttaggacctttagatgaagatttttatgcagaagatttttacttgttggaaaagataacatttagtaatttaggagagaaaattaaaggcattgttgaaaatatgggaatcaacgcaaataacatgagtgactttattatgaaagttgatgcccttatgtcctctgtgcctaagcgtgcatctcgatatgatgtcacatttcttagggagaatcacagtgttataaagacgaatcctcaagagaatgatatgttcttcaatgtcattgctattgttgatccattaacaagagaagcacagaaaatggcacagttgttggttgtacttggcaagattatcaacctgaagataaagttgttcatgaactgtaggggcaggctttcagaagcccctttagaaagcttttaccgttttgttctggaaccagaactgatgtcaggggctaatgacgtttcttctcttggaccagtggcaaaatttttggatattcctgaatcacccctcctaatcctcaacatgattactccagaaggctggttggttgaaacagtgcacagcaactgtgaccttgataatattcacttaaaggatactgagaaaactgttacagcagaatatgaactagaatacttactactggaaggacaatgctttgataaagtgacagaacagcctcctcggggtctgcagttcacactaggcacaaaaaataaacctgctgtggttgatacaatagtgatggcacatcatgggtattttcaattaaaagcaaacccaggtgcttggatactgaggttacaccaaggaaaatctgaagatatttatcaaatagttgggcatgaaggaactgactctcaagcagacctagaagatatcattgttgtattaaacagcttcaaaagcaagatactcaaagtaaaagtgaaaaaagaaacagacaaaattaaggaagatatccttaccgatgaagatgaaaaaacaaaaggactgtgggattccattaaaagtttcacagtaagcttgcataaagaaaacaaaaaggaaaaagatgtcctaaacattttttcagttgcttctggtcatttatatgaacgttttttaagaattatgatgctttctgttttgcgtaacaccaaaacaccagtgaaattctggttgctaaaaaattatctctcaccgacatttaaagaagtaattcctcacatggctaaagagtatggattccgatatgaactagttcaatataggtggccccgttggcttcgtcaacagactgaaagacagaggattatttggggttacaaaattcttttccttgatgttcttttcccactagcagtggacaaaatcatttttgttgatgctgaccagattgtgagacatgatctaaaagaacttcgagatttcgatctggatggagctccttatgggtatactccattttgtgatagccgcagggaaatggatggatatcgtttctggaaaacaggatactgggcatcacatcttttaagacggaaataccatatcagtgctttatatgtagtggatctcaagaagttcaggagaattggagcaggtgacaggctcaggagccagtatcaagctctcagtcaagatccaaacagtctttcaaacctagatcaggatctccccaataatatgatttaccaagtcgccattaagtctcttcctcaagactggctgtggtgtgaaacctggtgtgatgatgaatccaaacaaagagccaaaacaattgatctgtgcaataatcccaaaacaaaagaatccaaactaaaagctgctgccagaattgtcccagaatgggtggagtatgatgctgagataagacaactattagatcatcttgaaaacaagaagcaagatacaattttgacacatgatgaactctagcactggtgtatatgagaaggaaggcgaaagcatgacaggaaacctgccgcctgctggggaagtctggagcccctgctgagacgatttggaagtctcgttaagatcagtgacatattctttaattttaaaaaattgtaattatttaaaacagttatttaatgtattgaatgagtttaagttatataataaatgaccattgagtattt

SEQ ID NO: 274022 - DNA, 1561 bp, Homo sapiens
gtgggcagccgcgcagcgggaagagccggccgaagcgtggcggccacagactgtgggtaccgggtccgagggactcgcgcttttctctccgtgccatggcgccagcgaaagccacgaacgtggtgcggctgctactaggctccacagcgctgtggctttcgcagctcggctccgggacggtcgccgcgtccaagtcggtgactgcccacttggccgcgaagtggcccgagaccccgctgctgctggaggcaagtgaatttatggcagaagaaagtaatgaaaaattttggcagtttttggaaactgtgcaagaattagcaatttataagcaaacagaatcagattattcttattacaacttaatcctgaagaaagctggacagtttctagacaatttacacatcaaccttttaaagtttgctttctctataagggcatactccccagctattcagatgtttcagcagattgcagctgatgagccaccaccagatggttgtaatgcatttgtggttattcataagaagcacacctgtaaaattaatgagattaaaaagctgctgaagaaagctgcttcaaggactagaccttatctatttaaaggagatcacaaatttcctacaaacaaagagaacttaccagtggtgattctctatgccgaaatgggtactagaacatttagtgcatttcacaaagtattgtctgaaaaagctcaaaatgaggaaattctgtatgttcttcgccattatattcagaaaccaagctcacggaaaatgtacttatctgggtatggtgtggagctagcaattaagagtacagaatacaaagcactggatgatacccaagttaaaactgtgactaatactactgtagaggatgagactgaaacaaatgaagttcaaggatttctctttgggaaactaaaagaaatatattcagatcttagagataatctgacagcattccaaaaatacctgattgagagtaacaaacaaatgatgcctttgaaagtctgggaactacaagatcttagttttcaagcagcttctcaaataatgtccgctccagtttatgatgccattaaattaatgaaagacatttcacagaacttccccataaaagccagattaagaatgaatatattgatatgcctctttcagtcaactttaaatgtcaagaatttgagaagtcgtcatttatataataaaacatgaaatatatatgggtgtgtataaatgtcatatctgtttagccataatattttaattaatggccgttataaaaattattagatcaaatacaaataaagtaaaataactttagtcttgatcagacagttgattagctctattgatgctaagtcagtataactgttcagaggttctgatgcaaaactctgctgttaatctgtaattaagaaaaaattataaaatatgctaacattgcttaatggctaaattgtaggcttgagcatatctctaaaaccacttggtagacaatctgtaaatgtttgttgaaatgaaatatttgctaaataaatgaaaaatttgccttattaaat

SEQ ID NO: 274023 - DNA, 1260 bp, Homo sapiens
gtgggcagccgcgcagcgggaagagccggccgaagcgtggcggccacagactgtgggtaccgggtccgagggactcgcgcttttctctccgtgccatggcgccagcgaaagccacgaacgtggtgcggctgctactaggctccacagcgctgtggctttcgcagctcggctccgggacggtcgccgcgtccaagtcggtgactgcccacttggccgcgaagtggcccgagaccccgctgctgctggaggcaagtgaatttatggcagaagaaagtaatgaaaaattttggcagtttttggaaactgtgcaagaattagcaatttataagcaaacagaatcagattattcttattacaacttaatcctgaagaaagctggacagtttctagacaatttacacatcaaccttttaaagtttgctttctctataagggcatactccccagctattcagatgtttcagcagattgcagctgatgagccaccaccagatggttgtaatgcatttgtggttattcataagaagcacacctgtaaaattaatgagattaaaaagctgctgaagaaagctgcttcaaggactagaccttatctatttaaaggagatcacaaatttcctacaaacaaagagaacttaccagtggtgattctctatgccgaaatgggtactagaacatttagtgcatttcacaaagtattgtctgaaaaagctcaaaatgaggaaattctgtatgttcttcgccattatattcagaaaccaagctcacggaaaatgtacttatctgggtatggtgtggagctagcaattaagagtacagaatacaaagcactggatgatacccaagttaaaactgtgactaatactactgtagaggatgagactgaaacaaatgaagttcaaggatttctctttgggaaactaaaagaaatatattcagatcttagagataatctgacagcattccaaaaatacctgattgagagtaacaaacaaatgatgcctttgaaagtctgggaactacaagatcttagttttcaagcagcttctcaaataatgtccgctccagtttatgatgccattaaattaatgaaagacatttcacagaacttccccataaaagccagatctctaaccagaattgctgtaaatcaacatatgagagaagaaataaaggaaaatcaaaagtatattccagaatttcttccgaggtagtatggttttcttcataggataaagaataaaggctgtgagttaatta

SEQ ID NO: 274024 - DNA, 375 bp, Homo sapiens
ttttttgcataggatagctttgtttattccaagtcttttgtggttctatataaatttcaagattgttttttctatttctctgaagaatttaattggtattttgatagggaatacactgaatctgtagattgctttggttagtatggacattttaacaatattgattcttccaatccatgaacacagaatatctttcctttgtgtgtgtgtttgccttcaatttcttgaaccaacattttatagctttcactgtagagacttttcacttttttggttaactcccaggtattttatttctagctgttgtaaatctagctgttgttactttcttgatttctttttcacattgttcagtgttggcatatgtaaatgata

SEQ ID NO: 274025 - DNA, 205 bp, Homo sapiens
caagagcatcaggcctcttgttaccggatagaattgtgttttggtgactaggcacagtggctcatgcctgtaatcccagcagtttgggaggccaaggtggccagatcacttgaggtcaggagttcgagaccagcctggccaacatggtgaaacgctgtctctactaaaaatacaaaaattagctgagcgtggtggcatgcacttg

SEQ ID NO: 274026 - DNA, 338 bp, Homo sapiens
acaggcagaaaaagccacaatctcctacttgcctaaagatctagtagtttttcaagaataaatgctgctcaattttttgcctgcattttgtcaatttccagtttcctgaaatggttggttttgataaataattttgtctagttttatatattttttggttggttgttgcttttttttttttttttacagaaagaaattgcctgcctctttgtgctgccataactggaaggccttctcctcattattattattttttgagatggagtttcgctcttgttgcggtgagctgagaccgcgccactgcactccagcctgggcaacaaaagtgaaactgtctc

SEQ ID NO: 274027 - DNA, 412 bp, Homo sapiens
atgaatcagtaagggagaaagaccatcaaaatttttcctgtacttatggatctcaaaaattcttcattaaaaataatttttaagctgactgtctcaagtttctgtagggacagctattatgtaaagaaatctccttctgactctattttagcccacctaataaaatctgatggcagcacatggattgcttcagggaaaatagtttcggggttaaaaaaagacttagaattaaactttatatcttgctccaaaaggactctgtctctgagagtatatggaaacgatgtttttggccatgaattaaagaactgttttatgaagatggttcagatctaagatttgaagaggccattactttaactagaagcttgtaatatgtactcataagtaactgtgaagaccccctcctcca

SEQ ID NO: 274028 - DNA, 445 bp, Homo sapiens
actttttttttctttcttttttgagatggagtctcactctatcgctcgagctgaagtgcagtgtcgcgatctccgctcactgcaacctctgtctcctgggttcaagcaattctcccacctcagcctccccagtagctgagactacaggtacctgccaccacacccggctaattttgtagttttagtagaggcagggtttcgccatgttggccaggctggtcttgaactcctgacctcaagtgatccaccccccacttggcctcccaaagtgctgagattgcaggcttgagtcactgggcccctgcctgcttaacttaatactaaataacatatgagagagtacaatgaaacaacttaggaagttttttcttttagttttcttcatttctctagtaagccagtatatctccagccaaacaattcactgtgtttttttagaaaaagt

SEQ ID NO: 274029 - DNA, 106 bp, Homo sapiens
cccacaacgtccaacgcaccccctcgaagcacagcctgtccttcttttgagctggctctgtgtgatgaagggacacccagcaaatggcccagacccatgggcattc

SEQ ID NO: 274030 - DNA, 321 bp, Homo sapiens
tttcatttgatgtggcaaaaattaagtactgcttcagatgaagaggtagaagaataaagcctgacattgaatggaaggtagtaaaatgaactcacattagttccaggcgcagccctcatgctgtgacagctcaggagttttgatagaaaaggtagtgcctctgagtggaaaagaactgaaacccaaagaattcaggcaccgattcctaaactgtcccagccagccttgcctcttacagagcagggtgacctggagccagcccctaagccccccagggcttctgtggatgggagatctgtgccaacctgaagccaaatctca

SEQ ID NO: 274031 - DNA, 207 bp, Homo sapiens
ctgtgaggcagaggctgggcctgtacatgccctcgggaagcaggaggctgggcctggagaggccgacttgaggcagttttgctcctgcagaggccacttacagacaagagctgggtgtgaagaggctgacttgaggtcgattttggcctgcagaagccaccggtagctaggagttggccctggagaggctgacttgaggacaatttt

SEQ ID NO: 274032 - DNA, 390 bp, Homo sapiens
gcttcgaccatgaacctgagtggaaatagcccctccttgatggcccggagaagagtcctgctaagccctaagctgagccgcagtcccatctgtaggtgaaaggaaggaggctgagggacatcagggacttgcccaaggtccctcagctgggaagtgagcagaggagggttaaatcccaggcttccctggtgccataacctgggtgtcatcccctgcaccagatgggcacactgcttctgtccagagccaggtaacctggcaaaaaagctttttaggctttgcaggccatgtggtcgctatggcaactgctcaactctgccgctgatcgagaaagcagccatagtctctgtaaacaaaggaccgtggcttgttccagtaaaactttactta

SEQ ID NO: 274033 - DNA, 248 bp, Homo sapiens
ggcaaggccccttttaaatccttcctagaactcattcaccttatgaagttcaaatttcattaactttcttttcttagaactcagcaaattcatgccatttgggtcttccttttgcctgggaactctgtgccctcagttcttcacatggcctctccttgtcattcaaccctgatctaagtcacctcctgcccgaggtccttcttgaccatctcgtctaaaatagcctccttcccttcacctgctattac

SEQ ID NO: 274034 - DNA, 460 bp, Homo sapiens
ccgaagagaaggaaaactttactgggaaggagataacttgaaaataattttattctgctgtttaaacttcgttataacaaatgtttcactcctaaaatgtaaagaattttgccaggcatacttgtgggagatgtatcaaaccttaacattttgccatttttctatggagcctgtttttttgattgctgaaagtgtgtatccatgcacaatagttgtttttgttatgcaagttttaaagctctatataaataacactccgtctatattgttataaaagttgctttttgcccttgtcagtattcatgttacatgttatgtaactttagttcattgtttactgctatacagtatgtcacttaattagtataacataacatgtccactctctcaatgatgggcatttattttcgtatttttgttattagaaacaatgccgaaataaatattcttatacatgtga

SEQ ID NO: 274035 - DNA, 477 bp, Homo sapiens
cgggtcgactactaatactaattcgcggccgcgtctatctcagtttaaattgtaattattattggattattttgggaggtcacactcatttatataattctgtaccagtggagtcatctctgttgagtaatgccattgagtgttaaatagattatatttttggcttaaaattccagaacttgtggctgggcgcagtggctcacgcctgtcatcccagcactttgggaggccaaggcgggtggatcacctgaggtcaggagttcaagaccagcctgaccaatatggtgaaaccccatctctactaaaaatagaaaaattagcttggtatggtggcgggcccttctagtcccagctacttaggaggctgagacaggagaattgcttgaacctgggaggtggaggttgcagtgagccgagattgtgccactgcacttcagcctgggtgacagagcaagactccatctcaaaaaaaaaaaa

SEQ ID NO: 274036 - DNA, 503 bp, Homo sapiens
agcaggagaaaagtctcacagccagggagcagcatgcggcactgtcactaagtgcctccttcaagagttcacaatttgctctcagccaagcttcattccaagaatgagagtttgctcaagctggaaggggtctgaacagcatcgagtcccttactcatcctctccatcagctgggagggaagctgaggtcctgagagggaagagggctgctcgcagtcagtctaatgtgccattaggattttagtctagtctagtgggtaagcattcagggcccggagtcagacagacctgagtacaagtcctagtgacaccatttactagctgtgtgacattctgcaaaccagctgacctcgtaaactctttctgtaagatgaggatctcactaatgtcagcctcagagggtggtgagaactcagtgaactaatgcatgagaagcacttacacagtgtctaacctgcaatgagcttgcaataaattgcgtgttattctttcaaaaaaaaaaa

SEQ ID NO: 274037 - DNA, 668 bp, Homo sapiens
ggaatactggaattactgcataatttatgtgtggcaaaggccatagtgcaaattaaatgacatgatctttgaataagatcaagactccttttgaaaggctgtttgatcagggaacctgcattgctctaccaccttatttcatggctatgagcatcaaattttagggagttgattctgacctataacaaatttagtgccttagctatgcactgatacctccagtttaaccactacttatttggtattccaagaactacccatttgtcttttttacagttttgaaattttcttacaaaagcaatacaacactggaacttttgggcccatgaagtccaagaggactttattaacattaaaacctaggggtttgctgcaacttggcctggttttctagactgtacaaaacaccacctatcttacgatttatattgagggacaagtcttgtgtttctgcatgggccagatcctttgagtggagatatttacaaccaagttaaaactgtttgtataagaatgtgtggctgggcgcgatggctaatgcctgtaatcccagcacttcaggaggctgaggcaggtggatcacctgagattgggagttggagacaggcctgaccaacatggagaaaccctctctctactaaaaatacaaaattagttgggcgtggtgg

SEQ ID NO: 274038 - DNA, 684 bp, Homo sapiens
ggaatactggaattactgcataatttatgtgtggcaaaggccatagtgcaaattaaatgacatgatctttgaataagatcaagactccttttgaaaggctgtttgatcagggaacctgcattgctctaccaccttatttcatggctatgagcatcaaattttagggagttgattctgacctataacaaatttagtgccttagctatgcactgatacctccagtttaaccactacttatttggtattccaagaactacccatttgtcttttttacagttttgaaattttcttacaaaagcaatacaacactggaacttttgggcccatgaagtccaagaggactttattaacattaaaacctaggggtttgctgcaacttggcctggttttctagactgtacaaaacaccacctatcttacgatttatattgagggacaagtcttgtgtttctgcatgggccagatcctttgagtggagatatttacaaccaagttaaaactgtttgtataagaatgtgtggctgggcgcgatggctaatgcctgtaatcccagcacttcaggaggctgaggcaggtggatcacctgagattgggagttggagacaggcgccaccacgcccaactaattttgtatttttagtagagagagggtttctccatgttggtcaggcctgtctgtcgacg

SEQ ID NO: 274039 - DNA, 331 bp, Homo sapiens
ctttttgccttgtaattactatcactgccctggtccaatttacttgagaaatcaattgaagtaaattttacctaaaatcaacttaaaaaaacagtaattatcctgaaagatattttataatattgataacttgagaataaaatgccaatggaccgattacaaatatttatatatttgcaaaataaatttaaaaagaaaagagcaaatcttctgttccttttggtatttgctcattctaatccctctgcatgattgcttattttttagttttaaaaagttttgtcacttccatgcaccccaagtatgacttaaatgaatgtcgagaaatgtt

SEQ ID NO: 274040 - DNA, 320 bp, Homo sapiens
atccgaaaaatttggaaagaaaaaaaaaaaaagacactaacccacattgggtctgccttcccaattacacttcaagtttcctggaggaaaaggttatcttctgcttctctgctaagtcttctcatagatactaagacagcaagctagtaattaaaactgcttacagctaaacaataaatgtttagtgaacaatctggatcaactcaatttcaccagtttaagcaatactctgctggtctttcatagccagtctgtggtatacttattactaatgtttcggtttcatatgtctattaataaaaatggattttcacaccaag

SEQ ID NO: 274041 - DNA, 355 bp, Homo sapiens
gttttttaatttatttactctctttatttacaactgttctttcaaatgatgatgataagaataaccataattagccagacgcggtgtctcacgcctgtaatcccagcactttgggaggccgaggcgggcagatcacgaggttaggagatcgagaccatcctggctaacacggtgaaaccccgtctctacaaaaaataaaaaaaaaatagccgggcatggtggggggcgtctgtagtcccagctgcttgggaggctgaggcaggagaatggcttgaacccgggagacggagtttgtagtgagccgagattgcgccactgtactccagcctgggcgacagagtgagactccatttca

SEQ ID NO: 274042 - DNA, 327 bp, Homo sapiens
gtgtcaaagtacgtggaaaactgaagctttaagcaaaagatggcttgggtatatatttaacctagcttctgttgaagcatcactagtctgcaaataccacatttctctagtgaccatcttcatgtctctgagccttaaagaatactggttaaaacactaacagatattatgtttctgaatatgtgctttatttgctagttatcctatttctaatgacatattcagtagatttgtttatgttgtaaaatgaagtgctatcaatttattgttatcatgaacagtcagaataaatattgaaacctcttatttgggcaaaaacatgatctg

SEQ ID NO: 274043 - DNA, 401 bp, Homo sapiens
gagtgtaagaatagaagccccccagtttagttaaattatattagtagtctagacaatttgttcatttcacaataagagtgatagaaattgtgataagtacttggattcatgatgtattttgaagttacagttagtagccctttgctgatggatatggaagcgtgagggagatgaatcaaagatgactcctaaactttgagccagagaaactgagtgagtggtgtcatttactgatatgaaggaagctgggtgggacatattcttcaggataaaatatttggtgtcagggttcatcagtttcagcatgtgatttattaatatttacatagtctttgggtgctttggatatttggattccagtcctttatgtgaatttctgtttgaaggtggaaacagcttct

SEQ ID NO: 274044 - DNA, 399 bp, Homo sapiens
ttttttttgagacggagtctcactctgttgcccaggctggagtgcaatgggtgcaatctcggcccactacaatctccacctcccaggtgttcaagtgattctcctgcctcagcctcctaagtagctgggattacaggtgcccaccaccacgcccagctaatttttgtatttttagtagagatgaggtttcaccatgctggccaggctggtcttgaactcctgacctcaggtgatccacccgcctcggcctcccaaagtgctgggtttataggcgtgagccatcacgcccagccccagctgtacttataaatgtaacatatatgctagtaattcaagtcacagatcaactagaaatttcctataaaattgactttaaccccaattaaataaaaaaggggg

SEQ ID NO: 274045 - DNA, 414 bp, Homo sapiens
aaatcacaatatggatatagtttttaaatctccattttaaagtggctgtatcaatgtttttgcccctccattgtgtgtgatttgatgtttaaagtgataaacatctgtcttagctctaagaaaatggaccagagtggtttcttgccttacccaacctgtggcagaactgcccaacaactttcatagtattttaataccgttgttataacatatattttatttttttaatttggcatttgttattacagatattggttactctctgcatatctccaccctcaaattattactaacacccctccttgtgtttacattaagcaatttactgttataaagattaactttgtaaataaactatatataaaatctcccccaaaatacaaatatatttattcctaattattttcacaaata

SEQ ID NO: 274046 - DNA, 659 bp, Homo sapiens
tgcagggtccagagataagcaacatcacaatagccaccaagggtcccaagaaggggagaaaccagggcatccattggttgacaatactccaaagtcctgtgtcttggagctcttgtgcctggcactgtatctggtctcgaagctccttaaccttttttggtgacaattctgtattgattaacaaaatagtaacactcttctcctagaaaaagacaggttccacttctttcagctgttaataaatttaaggctttccaattctggagggctactgctgctaaagagttaagctagctttgtaaggtgaccagtgaatctgcaactcgttccatgtcatcatttaactcttgtgataatttgtaatatgttggggtgatcagacccaacaccaggctgtgggggctacgaagtccggcggagtcaaaggaatgagataagttaagagtgcaagaagtgggaccagggggtcaatgctagtatggaggctgtgaaggccctgagctcttgaagcctgcactatttattggtgatcaaacaaagaagcaggtggtgaggatgtgggggttcaaagaaagcagtgtatcaagtgtgtgatctacagctgtgacagtttagcattttctttgaagcatatggaacatgttctgctacttgagata

SEQ ID NO: 274047 - DNA, 218 bp, Homo sapiens
gaaagtcaagggctctctcggcaagcctgagaaccaatgccttatcgctgcctggaaaatgctgagatgtgttcacagcgttaagaggctgagcccaggcacccgtgtctggctggtaccgccccatcccacaggccgctctcccacacaagagtgctcaaagacacattggtgtgcttgtccgagcaggctggggaggacggacaccgtggcttttt

SEQ ID NO: 274048 - DNA, 184 bp, Homo sapiens
cccagggctgggaagacacttgactaaggttctagagttacgaggatcaagatctaaaaccacatctggccgggcacagtggctcacgcctgtaatcccagcactttgggaggccgaggcaggaggatcacttgaggtcgggagttcgagagcagcctgggcaacgtggtgaaaccccatctct

SEQ ID NO: 274049 - DNA, 242 bp, Homo sapiens
ccatgttggccaggctggtctggaactcctgacctcaagtgatccacccacctcggcctctccacccggcctgggcctcatctttgaggggcctgctaagcttctttctatcctgcaagcttcgtagagctctgactttgagtcttgctctgtcccggaataggagaagacagaggcgtggcactgtgggctgaaagcaacagatttaggggaaactatctttaagactaagccttctttct

SEQ ID NO: 274050 - DNA, 506 bp, Homo sapiens
tatattgactattctaggtctttggttctccttataaattaataatcaacttgtaaatatttgcaaaatgtttgcaaaactctataaagaagattaaaaatagaaggttagtggtttcctggagggagggagagaggagggttgaataggtgaagcactagggattttttagggtggtgaaaatatcctgtacaatattgtaattgtggccaaatgacactttgccaaaacgcattgaactttgcagttcaaagagtgaaaatccatataaattttaaaaatcatttaagagtttgggagaatgtcaggatgaaatgcaaaatgtgacaatataatttctttattatttatttatttttatttttattttattttactttttaaattttttattattatactttaagttttagggtacatgtgcacaatgttcagatttttctgcatccttgccagcatctgtaaattaattgggttatatggtcatttttatgatattgattctt

SEQ ID NO: 274051 - DNA, 808 bp, Homo sapiens
tattattctcactaaaaaattttttattttactaagaataatttgtcatttcagacaaaactaacatttttccatggttgctactatttctacttcttgaatacccaatttaaggtttagtcctcattgaacattaaaatggcatagatagatataaataatagatataaataagatacaagtataaagttactaaggttttctttttttcttttgagaccaaatctcgctctgtggcccaggctggagggcagtggtgcgatcctggctcactgcaacctccgcctttctagttcaagtgattctgtgtcagcgttaggccgctttggcctcttaaagtgctgagattgcaggcgtgagccaccacacctggcccttttacaaaattgaagaaatgaaagggttaccccgcccaaaaaaaaaaaaaaaaagattacactggaaggaagtcacagattaaggatcaagactgttgagtctttaggttccaaaagcttcacctacatttttcttatatgtatttggatattaaagaaaataagttacatatacaccatggaatattattcagccatttaaaaaaaataaaatcttgtcatttgtagcaacatggatggaactggaagtcatcatgttacgtgaagtaagtcaagcacagaaagacaaaacttggatattctcactcacatgggagcttaaaaagtggattttggccaggcgcggtagctcatgcctgtaatcccagccccttgggaggccaaggcgggtggatcacctgagctcaggagtttgagaccagcctggccaa

SEQ ID NO: 274052 - DNA, 379 bp, Homo sapiens
aggctgctgaccctgaggctgctgctgggcgccctgctggtctggaccgctgcctacgtgtacgtggtgaaccccacacctttcgaggggctggtgccacccctgctgagccgtgccaccgtctggaagctccgggccctgctggaccccttcctgcgcctcaaagtggacggcttcctgcccttctaggccagaggcccagcggccccagcaaggaggccaggcgaccagcactgccccggatgcccagtggccgtgccagccccctgcacatggcaccactgtgcaccatccttgccagaagctgcagagaagggtggaggtggggtctgtcctgagggctgggcctgtggctggacatagaatcatgacataagtg

SEQ ID NO: 274053 - DNA, 1177 bp, Homo sapiens
tatgacaaggcagtactgagttcaatgtaaagttacccagtcattctgctctccctctctcccaagagtacgaaatttccgaaatggtaggctactgtgctgcgaggagtgaggggttgctaccatcatttcataccatctctccaaccctcttcaatgcctcatccaatgatatgaagttaaaaccagagctatttctgacacagcaatttttgagcgggcatttgccaaaatacgaacaagttcacatcctcccagtaggaagaatagaggaacccttctggcaaaatttcaagcatctacaagaggaggttttccagaaaataaagacactggctcagctctcaaaggatgttcaggatgtcatgttctacagtatcctggccatgctcagagacagaggggctctacaggacctgatgaacatgctggaattggacagctcaggtcatttggatggccctggtggtgccatcctaaagaaacttcaacaggattcaaaccatgcatggtttaacccaaaggaccccattctttatctccttgaagccataatggtgctgagtgacttccaacacgatttgctggcctgttccatggagaagaggatcctgcttcagcaacaggagctggtaaggagcatcctggagccaaacttcagatacccctggagcattcccttcaccctcaaacctgagctcctcgccccactccagagtgagggtttggccatcacctatggcctgctggaggagtgtggccttaggatggagctggataaccccaggtcaacctgggatgtagaagcaaagatgcccctgtctgccctctatgggactctctcgttgctgcagcagctggctgaggcctaagccctccctgatgggcagtcagtccagagatgctggccctcgcccagtctatgctgtgagtgtccttatgggtgcaagagatagggctgtgcctctctgcgtttccaggtggagtagagacagtaatgggtagagactttaggaaatgttttggggtggtggaatactctatatattgacaagagtttatatattgacaagagtttatatatttgtcaaaactcctcaaatagtatgttaaagacgtaagcgtttcactatgtataaattttacttcaaaataataaaaacaaatactgactcta

SEQ ID NO: 274054 - DNA, 2725 bp, Homo sapiens
ttcggcacgagccacatgtaggcagttcagaggtgcttcccagggccctggcgctagtgcctgtccctcctgctgaagttgcctttcctggtgtccagtgattgaattctaaattcagcacatataccagaggaatacgagccaaagaagttgttccagctagagttgctgggaatccatgaatcaaagacttgctcagctagttctgtatgtgaaaggaaatgggtgtgactctgaggaagcctttttaattctgattcaggagatacataattagatgccacttgattttgttccacagactttttgctgaggacttgagagctaaggttctgtgatccagaactagttccagacttactcttctggaaatgaacagggccctcctgtgcttatttttccaggatactgcattggaaattgagtcagggacccattggtgagaagagaacagtgaacagaatcacattgatctggtcctggagtttgtctgacaatttctacttgaccgcaggaggtctgaagattggaaggggccctactcaattgtgctatttttctctcttttttttttttttgagacggagttgcccaggctggagtgcagcggcatggtctcagctcactgcaacctctgcctcccgggttcaagcagttctctgcctcagcctcccaagtagctgggattacaggtgcctgccaccattcctggctaatttttgtattttcagtagagacagggtttcaccatcttggcctggctgatcttgaactcctgacctcgggatccaccggcctcagcctcccaaagtgctgggattacagacgtgagccaccgtgcccggccaatcctgctatttctctacaggacaaagggatatataatctgcaacatgccctccatgttggaacgcattagcaaaaatttggtcaaagagattggaagcaaagacctgacacctgtcaaatacctattgagtgccaccaaattacgtcagtttgttatattacgaaagaagaaggattctcgttcatcattttgggaacaatctgactatgttccagttgaattctccctcaatgacatcctggagccaagttcttcagtcctagaaactgttgtgacaggaccgttccacttcagtgacattatgatccagaagcataaggctgacatgggtgtgaatgttggtatagaagtgagtgtgtcaggggaggcctctgtggaccatggatgctccctcgagtttcaaattgttaccatcccatcaccaaacctggaagactttcaaaaaaggaaactgttggatccagagccatcatttctgaaggagtgccggaggagaggggacaacctgtacgtggtgacagaggctgttgaactgatcaacaatactgtgctgtacgatagcagtagtgtgaatattttagggaaaattgctctttggattacctatggcaagggtcaaggccaaggagagagtctcagagtgaagaagaaggcgctgactcttcagaaaggcatggtgatggcttataagagaaagcagctggttatcaaggagaaagccattctcatctcagatgatgatgaacagagaacctttcaagatgagtacgaaatttccgaaatggtaggctactgtgctgcgaggagtgaggggttgctaccatcatttcataccatctctccaaccctcttcaatgcctcatccaatgatatgaagttaaaaccagagctatttctgacacagcaatttttgagcgggcatttgccaaaatacgaacaagttcacatcctcccagtaggaagaatagaggaacccttctggcaaaatttcaagcatctacaagaggaggttttccagaaaataaagacactggctcagctctcaaaggatgttcaggatgtcatgttctacagtatcctggccatgctcagagacagaggggctctacaggacctgatgaacatgctggaattggacagctcaggtcatttggatggccctggtggtgccatcctaaagaaacttcaacaggattcaaaccatgcatggtttaacccaaaggaccccattctttatctccttgaagccataatggtgctgagtgacttccaacacgatttgctggcctgttccatggagaagaggatcctgcttcagcaacaggagctggtaaggagcatcctggagccaaacttcagatacccctggagcattcccttcaccctcaaacctgagctcctcgccccactccagagtgagggtttggccatcacctatggcctgctggaggagtgtggccttaggatggagctggataaccccaggtcaacctgggatgtagaagcaaagatgcccctgtctgccctctatgggactctctcgttgctgcagcagctggctgaggcctaagccctccctgatgggcagtcagtccagagatgctggccctcgcccagtctatgctgtgagtgtccttatgggtgcaagagatagggctgtgcctctctgcgtttccaggtggagtagagacagtaatgggtagagactttaggaaatgttttggggtggtggaatactctatatattgacaagagtttatatattgacaagagtttatatatttgtcaaaactcctcaaatagtatgttaaagacgtaagcgtttcactatgtataaattttacttcaaaataataaaaacaaatactgactcta

SEQ ID NO: 274055 - DNA, 423 bp, Homo sapiens
tagtgtgaatacactcaccgatcaatagaggagaacaaatggtctcagagagagacccacacatttagtacgtggagaaggtgatgtcttgagtcagtgggaaaatatgaactattgaatgaatggcattggaacagctagttagccatctggagaaaagtatccattcctactaccagaaaacaaatccaaatggattgacggtttaaatgttaaaaataaaaccataaaaatactagaacgagaataagcacaattttttataaccttggagtggaaaaggcttttctaaccaggactcagaaatccaaaatccataaatgaaaagattgacaggttcaactacagaattttttttttcttttttggcacggcaaagaacaccagaagtcaaaacaacaaaacaaatgacaaaaaacaagc

SEQ ID NO: 274056 - DNA, 370 bp, Homo sapiens
cttccagagctatgacaagttccactgtggatggcaaggaaatgaggggggcagcaacctgttaatgagactcaagagtgtcaagacccatttttgttatctggattttcaaggccgagttcaaacatgaggatcctggaaaggttggcagacgtctgcggaagctaccttctctgttgtaaaagtccacaaatgagaagtggctgcagtgtataaacctgtggacagctcttcttgtactgtcacccactctcatagctcaccatcctcaggcaccctcttatctctgctcacagagtacccacctgaaatgcctaacctgctaactccacccagtgaaattctgtgaatcccacaaggtgtgtcttat

SEQ ID NO: 274057 - DNA, 304 bp, Homo sapiens
gagttgcagcccacagctatggccaggagacagaggaggggagtgatgggagggagcggggaacagctgtcctctgtcacaggatctagctgccgtcaatccaggaagaactgcacgggacaggcagtgttaggcaagttagtaaacagtttgcctcataaacactgaccagcagtggaaaatatctgacctagatagatagtggactgtgagcaccttaggggcaaggaccacgtctaatttgcttttctgttctcaaaaaagtaggcctcaaatatttgttgttgttgtttttgagacagag

SEQ ID NO: 274058 - DNA, 185 bp, Homo sapiens
atatgtgcttgttgaacaaagttgaactcttctggagagatggctaggccccctctgacctggcatggggtggcatgaagacagggggataaatcccgtttcaaattggggtctgaaccccttttcaaattggggttcagcgtttttacagtttcaacaataaagatttgaaaacttctggttca

SEQ ID NO: 274059 - DNA, 680 bp, Homo sapiens
aggcagctgggcccccgggacagcaaccaggggactgccctggccctggatggcagccgggaccggctcacaagcttctgtttggagcagttctgttggcagccccccgcctccagtggagatgtgacacgactctttcttgcctgccaaacgttctctgattctttggatcatcgatcctaacacagcaaaggcggtattgttgctgtcctttcaaggttaatccaggatcagaaaagtctaatcatttctctgtggtttttggaatttccaaagagcacccagattttaaccctcagtcctcggggttgtccggctgcggctgtgctgctgttgagcattaagctcattccacttcacatgtaaacttgtttctatgcattcacctcctgggagactccacattcctgagagaactgcatggttatgaactcttactcgtgtgcactaaagtgcacgtgctgtgtgtgtactgaccctctgccctgtgggagccacgtgctgtggggagaacagaccagcagcagatgggactcctcctccaggaacctgctaccagctaggcgtggtggtgcaagcctatacttctggcactttgggaggctgtggcaggaggatcacttgaggccaggaatttgaggccagcctgggcaacatagtgagaccacgtctctttttga

SEQ ID NO: 274060 - DNA, 398 bp, Homo sapiens
tatttatgtgaacaaagatgtggatgttttgatagggattacattagatctgtagattgcttcaggacattttgataatattaaattcttctgatccaggagcatggaaaatctttccatttgtttttgtcctcttcaatttctttcattagtgctttgtagttttccttgtagaggtctttgaccttcttggttaaatttatttctaggtattttatattttttatagctattgtatatgggatttctatcttgatttattcttcagctagtttattagtgtgtgtagaagtgctactgatttttgtatgtcgattttctatcctttactgaatttatttatcagatctaagagtttttgttggagtctttaggttgttatagatatgagaatatgt

SEQ ID NO: 274061 - DNA, 333 bp, Homo sapiens
taacttcagggcctggactctagtctgaggggaagcctggacaatgggttttttaaaggtccctggtgattcttacatgcatccagggttgagacccactgttctaaaacatagccctgatctgtcatcttcattttccacccatttctttctttccaaatatatctttagagggattgagatgccttcatgtagcttttcacatgttccttttttacatgtaatttactacttccctctgtactcctccccatagaaccttctctcgtcacagtcctgtgcctctttaaagactcacccccaatgccaccttcccttcatgttgttcttttc

SEQ ID NO: 274062 - DNA, 458 bp, Homo sapiens
actattttacagttctgggcgtcacggaatcttgcatgaagagcccctaacctggcccgggtggaggctctgcttcctcagtgtcagcatcattcacagcaggcatgtccctcctgcctccaagagagtcaccagcagcttcctcctccacatctgttctctctctctctctggccattcactgtgggggaagtcagttccatgccctgagtccattcaggcagcttgtgaagaggcccacatggccaatagccagtgaggaactgaggcctgcagtgaccacttggatgagcttggaagcacgtcctccagccccagtcaagtcttgaggtgagaccacagtcctggccaacaggtgactacaacatcacgggaaacccaaagccattcagctaagccactctcagattgctgatccccagaagctgcatgagataataaatgtttgttgttttaag

SEQ ID NO: 274063 - DNA, 403 bp, Homo sapiens
gtgatcctcctgccttagcctcccaaagtacttggaattacaggcatgagccaccacacctgtcctatgtcacactatttcttaagcaatctatattatgaaaaaaatatgagacattgccattgctagaaaggctaaggcaggaggactgcttgaacccaggaggttgaggctgcagtgagctgtgatcatgccactgtactccagtctggacaacagagtgagactgtctttttttttaagacatttatggctgcattatgtcatagtatctagtatggatgtattatcattcacttaagcatttccatatcactggacatcaattgtctgtgattattattattattattattgagacagagtctcagtctgtcacccaggctggagtacagcgatgtga

SEQ ID NO: 274064 - DNA, 287 bp, Homo sapiens
gggcagcaattttaaaggtacccttaacagctaccaagtcatctaaaacatatttttgaagctttattgcagtgaaatttgttatattctctcttataaatagtttggtgtataataaagatatgtgtatgttaagggtttaattcttctcttgatgctttccatagcatgtggaataccaattctagattatacagtataagaattaatatttaaacattgacttgaacaggttgggcttgctttcatgaattgtcaggaggctagctagtcaaaattcaaattaa

SEQ ID NO: 274065 - DNA, 648 bp, Homo sapiens
cttctgtttgagcctcctgagtagtgggactgcaggcatgtgccactatgccccattatgtatttttagtagagatgagatttcaccagattggccaggctggtctcgaactcctgacctcaaatgatctgcctgcctcggcctcccaaagtgttgggattataggcatgagccaccatgcccgcccgcttcgtcttttcactggactaatgaagatacaggtgtggaatggtttcacagcatgcccaacctcatgaggcttgttgggtcagagcttgtgccagatgccagtcttctgccttccagtcttatagttgttacgctatagccttctgcagtggatggtaacgtggccaaaataagcctttggttttggagtattcgtaaaatgaaagtggtgccatctaccttaatgctgggggaatatatttcaattgactcaagtcttcattgctgaatgatatcttaaaaaaaaaaaaggtatttggcctgatattttcacagtggttctgcttgaaatgtaaaattccaatttctaaatgtaataccaagatttatcctaaattaacaataagcagggtttctaatagctttccatatatgtctgggtgtataatctccgatttggacgcgtattgtgcgtgaggt

SEQ ID NO: 274066 - DNA, 349 bp, Homo sapiens
gcaaaatgccttgtcctaatgtttgtaaaatacaccaacctcacacagcccacatcggattcattttccatcagcacttccaaaagcaatcttgtgctgggcaaagagacaaatttcaccctgaagaactgttttgggaaattggaaggtcaaacccttccccaacgatttcagcggacaaagtcaaataagaaaatctcagattccaagagttttgttttgtttttgtcttgtacaactagaccaaaacaagtcataagaaatagatttaaaaaagattgaattttgctctatatgccccttttatgcagaagaaagaccccacaccactaaagactttttacaagca

SEQ ID NO: 274067 - DNA, 372 bp, Homo sapiens
  misc_feature (28)..(28): n is a, c, g, or t
ctacgtgcttgatctgtctcctcctaangggcatgcagaaccccagcttttaagttggtctccgcagaggacaactgcattctccagcctcctgtacagcagagagtgccatgtgactaagaccaagttctaaccagtgggatcaaagcagggaagtgttgccttctttgccccttcctgctggctggaatatgacaaaacggctgcagcatgagcaaccttcttgggccctgaggtggaagccacctgttggttgaccgaccagatggtggagtgaccagatagaaggggcctggtgattgtggattctgccacactacctctggtcccctatacctatgtgaaaggaaaagaaatgtctgccatgttcgt

SEQ ID NO: 274068 - DNA, 387 bp, Homo sapiens
ccaacactggcccaaagagagaagcaggggcccgcccaggtgactgccaggcactgtcagccacactgacagggagagcggcccagatgagaggcccaggaaggcactctgcctttgcaacgtcctggcctgtctccatgaccacaggtgcccagtggtgccagggttgccagacagtggtggtttagttgtgtgcaagaactactctgcacagcaagaatgattggttgagactgacagatcgcaaacacactgcattcaggaacccttcaccctctcttagaaatggctgagggtctcagcgggctttcattcatatgagtttatctatcaatatttacggtagtagaagttcaagtgaaaaataaataaatattcatttatctt

SEQ ID NO: 274069 - DNA, 155 bp, Homo sapiens
actacacatctgggagtcatgctcatcctcactccttctcaccctgtatgcaatctgcctaaatcctgtggacctagatcctctctcagaaccatctcctgaacctggccctcctctccaccccctctgccatcctcctcatcaagaggcctctg

SEQ ID NO: 274070 - DNA, 272 bp, Homo sapiens
ggatcagagtcggcaggtgaaagctgggagtaagggtgccagctatagaatctggccagggtttgaatgctgctctgccgccaggagctgtttgactttgagcaagttacttaatctctctgaacctccatttatataaaacgagatatggcaatacttactccatggggaagtaagtttctagctcacagcaagccttcaacagcagcgatgattatttagctggagaagaaaggagctgacagcagtggttacaggagtgagaaagtggg

SEQ ID NO: 274071 - DNA, 289 bp, Homo sapiens
ggccctgcacgcttgatggcacccacagatgcctgccctgtaccctccatggtaaacagttcttgatccttctccagcatccagcagtcaccctgaaactggctggggtcatggatgctcaacctcatcctcaaaggcctagaacagagcagctcaattgccacttatttattctgatgaagtcagtcagtcaaaacgcgaggatttttggtctcagctcctccactggcttgttgctttgtgcctggagagttcaacaactgttaaatctttcagctttcactcaagt

SEQ ID NO: 274072 - DNA, 328 bp, Homo sapiens
tccagtcagtgttttgtaaccagaatagaggaggtctcatggaaatttgaatggagaaaaatggagagagaactcaatcacatggagtgcagtaggagccatgtaccaaactgaaaaggctgtagtcacatcaggtagtgccatttttatgcctcaagtacacagttagtttgtgcaaaataacattaccattaaatccatttaatgttaattttatgtgtgcaatactttaaatatgttttgggacaagctaaatctataaggagtgtatacctaaatatgtatttatttggatttaagaaactgtataataaaagtaacttaagtc

SEQ ID NO: 274073 - DNA, 329 bp, Homo sapiens
gaccgctcctcccccagcctggctgccgccgtgcagtttgatctcagactgctgtgctagcaatcagcgagactccgtgggtgtaggaccctccgagccaggtcagtgttttgtaaccagaatagaggaggtctcatggaaatttgaatggagaaaaatggagagagaactcaatcacatggagtgcagtaggagccatgtaccaaactgaaaaggctgtagtcacatcagacaatagctgaagaatgtgagaaagaaaaatccaaagcacacaaatgagactgtgcagtgaagaggccacagagacaaccatactgtctttttgtatc

SEQ ID NO: 274074 - DNA, 1920 bp, Homo sapiens
gcggggcagaacataggttgccttagagaggttccccggtgtcccgacggcggctcaagtcagagttgctgggttttgctcagattggtgtgggaagagcctgcctgtggggagcggccactccatactgctgaggcctcaggactgctgctcagcttgcccgttacctgaagaggcggcggagccgggcccctgaccggtcaccatgtgggccttctcggaattgcccatgccgctgctgatcaatttgatcgtctcgctgctgggatttgtggccacagtcaccctcatcccggccttccggggccacttcattgctgcgcgcctctgtggtcaggacctcaacaaaaccagccgacagcagatcccagaatcccagggagtgatcagcggtgctgttttccttatcatcctcttctgcttcatccctttccccttcctgaactgctttgtgaaggagcagtgtaaggcattcccccaccatgaatttgtggccctgataggtgccctccttgccatctgctgcatgatcttcctgggctttgcggatgatgtactgaatctgcgctggcgccataagctgctgctacctacagctgcctcactacctctcctcatggtctatttcaccaactttggcaacacgaccattgtggtgcccaagcccttccgcccgatacttggcctgcatctggacttgggaatcctgtactatgtctacatggggctgctggcagtgttctgtaccaatgccatcaatatcctagcaggaattaacggcctagaggctggccagtcactagtcatttctgcttccatcattgtcttcaacctggtagagttggaaggtgattgtcgggatgatcatgtcttttccctctacttcatgatacccttttttttcaccactttgggattgctctaccacaactggtacccatcacgggtgtttgtgggagataccttctgttactttgctggcatgacctttgccgtggtgggcatcttgggacacttcagcaagaccatgctactattcttcatgccccaggtgttcaacttcctctactcactgcctcagctcctgcatatcatcccctgccctcgccaccgcatacccagactcaatatcaagacaggcaaactggagatgagctattccaagttcaagaccaagagcctctctttcttgggcacctttattttaaaggtggcagagagcctccagctggtgacagtacaccagagtgagactgaagatggtgaattcactgaatgtaacaacatgaccctcatcaacttgctacttaaagtccttgggcccatacatgagagaaacctcacattgctcctgctgctgctgcagatcctgggcagtgccatcaccttctccattcgatatcagctcgttcgactcttctatgatgtctgagtcccttgatcattgtcctttacctcacagtctctaggattcctgactcaggctgacctctctctctggtcccagactgcctccttgcccaggcctctctcactcttcatactcctccagattttgttctcagcattttcctttctctgtgatcattggcatcctgggcgtttcttgccctctgctgactactgattggattttacctatggctttctgcaacttgctactctctccctctccatcccatctttgcagcctcatagggtgggatacagcagctttttttgcagttatccacactcacatttcagagtcctgactctcaaggaaccactggtttttgggatagaacttgggccagggctaggaacacaggctccacggtgacatgtcatttgattgtaaattaagtgttctgattagtaagaactaagcagggggccacatgctctcaatggagacaataaagtgttgtctttttctta

SEQ ID NO: 274075 - DNA, 2775 bp, Homo sapiens
gcggggcagaacataggttgccttagagaggttccccggtgtcccgacggcggctcaagtcagagttgctgggttttgctcagattggtgtgggaagagcctgcctgtggggagccgggcccctgaccggtcaccatgtgggccttctcggaattgcccatgccgctgctgatcaatttgatcgtctcgctgctgggatttgtggccacagtcaccctcatcccggccttccggggccacttcattgctgcgcgcctctgtggtcaggacctcaacaaaaccagccgacagcagatcccagaatcccagggagtgatcagcggtgctgttttccttatcatcctcttctgcttcatccctttccccttcctgaactgctttgtgaaggagcagtgtaaggcattcccccaccatgaatttgtggccctgataggtgccctccttgccatctgctgcatgatcttcctgggctttgcggatgatgtactgaatctgcgctggcgccataagctgctgctacctacagctgcctcactacctctcctcatggtctatttcaccaactttggcaacacgaccattgtggtgcccaagcccttccgcccgatacttggcctgcatctggacttgggaatcctgtactatgtctacatggggctgctggcagtgttctgtaccaatgccatcaatatcctagcaggaattaacggcctagaggctggccagtcactagtcatttctgcttccatcattgtcttcaacctggtagagttggaaggtgattgtcgggatgatcatgtcttttccctctacttcatgatacccttttttttcaccactttgggattgctctaccacaactggtacccatcacgggtgtttgtgggagataccttctgttactttgctggcatgacctttgccgtggtgggcatcttgggacacttcagcaagaccatgctactattcttcatgccccaggtgttcaacttcctctactcactgcctcagctcctgcatatcatcccctgccctcgccaccgcatacccagactcaatatcaagacaggcaaactggagatgagctattccaagttcaagaccaagagcctctctttcttgggcacctttattttaaaggtggcagagagcctccagctggtgacagtacaccagagtgagactgaagatggtgaattcactgaatgtaacaacatgaccctcatcaacttgctacttaaagtccttgggcccatacatgagagaaacctcacattgctcctgctgctgctgcagatcctgggcagtgccatcaccttctccattcgatatcagctcgttcgactcttctatgatgtctgagtcccttgatcattgtcctttacctcacagtctctaggattcctgactcaggctgacctctctctctggtcccagactgcctccttgcccaggcctctctcactcttcatactcctccagattttgttctcagcattttcctttctctgtgatcattggcatcctgggcgtttcttgccctctgctgactactgattggattttacctatggctttctgcaacttgctactctctccctctccatcccatctttgcagcctcatagggtgggatacagcagctttttttgcagttatccacactcacatttcagagtcctgactctcaaggaaccactggtttttgggatagaacttgggccagggctaggaacacaggctccacggtgacatgtcatttgattgtaaattaagtgttctgattagtaagaactaagcagggggccacatgctctcaatggagacaataaagtgttgtctttttcttaaaaaaaaaaaaaaaaaaaactcgagactagttctctctctctcctaaatcattgataatttaaatattttttaaagccaccttaatttaggtagctcttggaatcgatgtttgaattcactagccacattttcttcatgatatgcctcgtggcaaacaaagatgtttccttaagatgaatcttacatttcccatagaaaataacccatttcctttggcactgcagttgccctcaaactgcttgcagttgtattcattttagtacaacaaaggttttcataatatgggaggccaagtctatgatactgcctcaaagagaccctattgtgtagatgcatcatcttctctcatttgatccatagagcataggcaaagatgtcaacctcaggccttagagaaaagtggaaatgttattatgacagccgtccatgagttatcgctttgtatgaagttaaatacagtcatgcgttgcttaacagcagggatacattctgagaaatgcattgttaggcaattccgttgtgcgaacatcctagtgtacttacacaaacctaggtggcatagcccacaacgtacccaggctatatggtaaacctgtacagcatgttactgtactgaatactgtaggcagttgtaacacaatggtatttgtgtatctagacatagaaaacatacagtaagaatatggtattataatcttacgggaccactgtcaaatacgcggtctgtctttgaaaagttgtaatgcggcgcatgactataaatacctagctggttagcatttacattccttgccagggagtttgaaatttatactatagaaataactttaggttttaggtagagttaaagaggtaaagcacatgttgccacaacccaggaaagtatttttaagaaagattggattttcctacctttagagatct

SEQ ID NO: 274076 - DNA, 426 bp, Homo sapiens
cctctctcaactcttcagtactcctccaagaatttttttggtttcccctccgagcaccaaattttttcccccattttcctttctctgtgatcattggcatcctgggcgtttcttgccctctgctgactactgattggattttacctatggctttctgcaacttgctactctctccctctccatcccatctttgcagcctcatagggtgggatacagcagctttttttgcagttatccacactcacatttcagagtcctgactctcaaggaaccactggtttttgggatagaacttgggccagggctaggaacacaggctccacggtgacatgtcatttgattgtaaattaagtgttctgattagtaagaactaagcagggggccacatgctctcaatggagacaataaagtgttgtctttttctta

SEQ ID NO: 274077 - DNA, 1949 bp, Homo sapiens
gtggaggcggacggagctaaaactgacgtggaaccggaatgtgagcggtgtcagacacgtggtacaaggaggcattcatcttggaaccgggcaattggcatttccgctctggattggtgtgggaagagcctgcctgtggggagcggccactccatactgctgaggcctcaggactgctgctcagcttgcccgttacctgaagaggcggcggagccgggcccctgaccggtcaccatgtgggccttctcggaattgcccatgccgctgctgatcaatttgatcgtctcgctgctgggatttgtggccacagtcaccctcatcccggccttccggggccacttcattgctgcgcgcctctgtggtcaggacctcaacaaaaccagccgacagcagatcccagaatcccagggagtgatcagcggtgctgttttccttatcatcctcttctgcttcatccctttccccttcctgaactgctttgtgaaggagcagtgtaaggcattcccccaccatgaatttgtggccctgataggtgccctccttgccatctgctgcatgatcttcctgggctttgcggatgatgtactgaatctgcgctggcgccataagctgctgctacctacagctgcctcactacctctcctcatggtctatttcaccaactttggcaacacgaccattgtggtgcccaagcccttccgcccgatacttggcctgcatctggacttgggaatcctgtactatgtctacatggggctgctggcagtgttctgtaccaatgccatcaatatcctagcaggaattaacggcctagaggctggccagtcactagtcatttctgcttccatcattgtcttcaacctggtagagttggaaggtgattgtcgggatgatcatgtcttttccctctacttcatgatacccttttttttcaccactttgggattgctctaccacaactggtacccatcacgggtgtttgtgggagataccttctgttactttgctggcatgacctttgccgtggtgggcatcttgggacacttcagcaagaccatgctactattcttcatgccccaggtgttcaacttcctctactcactgcctcagctcctgcatatcatcccctgccctcgccaccgcatacccagactcaatatcaagacaggcaaactggagatgagctattccaagttcaagaccaagagcctctctttcttgggcacctttattttaaaggtggcagagagcctccagctggtgacagtacaccagagtgagactgaagatggtgaattcactgaatgtaacaacatgaccctcatcaacttgctacttaaagtccttgggcccatacatgagagaaacctcacattgctcctgctgctgctgcagatcctgggcagtgccatcaccttctccattcgatatcagctcgttcgactcttctatgatgtctgagtcccttgatcattgtcctttacctcacagtctctaggattcctgactcaggctgacctctctctctggtcccagactgcctccttgcccaggcctctctcactcttcatactcctccagattttgttctcagcattttcctttctctgtgatcattggcatcctgggcgtttcttgccctctgctgactactgattggattttacctatggctttctgcaacttgctactctctccctctccatcccatctttgcagcctcatagggtgggatacagcagctttttttgcagttatccacactcacatttcagagtcctgactctcaaggaaccactggtttttgggatagaacttgggccagggctaggaacacaggctccacggtgacatgtcatttgattgtaaattaagtgttctgattagtaagaactaagcagggggccacatgctctcaatggagacaataaagtgttgtctttttctta

SEQ ID NO: 274078 - DNA, 1850 bp, Homo sapiens
gcggggcagaacataggttgccttagagaggttccccggtgtcccgacggcggctcaagtcagagttgctgggttttgctcagattggtgtgggaagagcctgcctgtggggagccgggcccctgaccggtcaccatgtgggccttctcggaattgcccatgccgctgctgatcaatttgatcgtctcgctgctgggatttgtggccacagtcaccctcatcccggccttccggggccacttcattgctgcgcgcctctgtggtcaggacctcaacaaaaccagccgacagcagatcccagaatcccagggagtgatcagcggtgctgttttccttatcatcctcttctgcttcatccctttccccttcctgaactgctttgtgaaggagcagtgtaaggcattcccccaccatgaatttgtggccctgataggtgccctccttgccatctgctgcatgatcttcctgggctttgcggatgatgtactgaatctgcgctggcgccataagctgctgctacctacagctgcctcactacctctcctcatggtctatttcaccaactttggcaacacgaccattgtggtgcccaagcccttccgcccgatacttggcctgcatctggacttgggaatcctgtactatgtctacatggggctgctggcagtgttctgtaccaatgccatcaatatcctagcaggaattaacggcctagaggctggccagtcactagtcatttctgcttccatcattgtcttcaacctggtagagttggaaggtgattgtcgggatgatcatgtcttttccctctacttcatgatacccttttttttcaccactttgggattgctctaccacaactggtacccatcacgggtgtttgtgggagataccttctgttactttgctggcatgacctttgccgtggtgggcatcttgggacacttcagcaagaccatgctactattcttcatgccccaggtgttcaacttcctctactcactgcctcagctcctgcatatcatcccctgccctcgccaccgcatacccagactcaatatcaagacaggcaaactggagatgagctattccaagttcaagaccaagagcctctctttcttgggcacctttattttaaaggtggcagagagcctccagctggtgacagtacaccagagtgagactgaagatggtgaattcactgaatgtaacaacatgaccctcatcaacttgctacttaaagtccttgggcccatacatgagagaaacctcacattgctcctgctgctgctgcagatcctgggcagtgccatcaccttctccattcgatatcagctcgttcgactcttctatgatgtctgagtcccttgatcattgtcctttacctcacagtctctaggattcctgactcaggctgacctctctctctggtcccagactgcctccttgcccaggcctctctcactcttcatactcctccagattttgttctcagcattttcctttctctgtgatcattggcatcctgggcgtttcttgccctctgctgactactgattggattttacctatggctttctgcaacttgctactctctccctctccatcccatctttgcagcctcatagggtgggatacagcagctttttttgcagttatccacactcacatttcagagtcctgactctcaaggaaccactggtttttgggatagaacttgggccagggctaggaacacaggctccacggtgacatgtcatttgattgtaaattaagtgttctgattagtaagaactaagcagggggccacatgctctcaatggagacaataaagtgttgtctttttctta

SEQ ID NO: 274079 - DNA, 2845 bp, Homo sapiens
gcggggcagaacataggttgccttagagaggttccccggtgtcccgacggcggctcaagtcagagttgctgggttttgctcagattggtgtgggaagagcctgcctgtggggagcggccactccatactgctgaggcctcaggactgctgctcagcttgcccgttacctgaagaggcggcggagccgggcccctgaccggtcaccatgtgggccttctcggaattgcccatgccgctgctgatcaatttgatcgtctcgctgctgggatttgtggccacagtcaccctcatcccggccttccggggccacttcattgctgcgcgcctctgtggtcaggacctcaacaaaaccagccgacagcagatcccagaatcccagggagtgatcagcggtgctgttttccttatcatcctcttctgcttcatccctttccccttcctgaactgctttgtgaaggagcagtgtaaggcattcccccaccatgaatttgtggccctgataggtgccctccttgccatctgctgcatgatcttcctgggctttgcggatgatgtactgaatctgcgctggcgccataagctgctgctacctacagctgcctcactacctctcctcatggtctatttcaccaactttggcaacacgaccattgtggtgcccaagcccttccgcccgatacttggcctgcatctggacttgggaatcctgtactatgtctacatggggctgctggcagtgttctgtaccaatgccatcaatatcctagcaggaattaacggcctagaggctggccagtcactagtcatttctgcttccatcattgtcttcaacctggtagagttggaaggtgattgtcgggatgatcatgtcttttccctctacttcatgatacccttttttttcaccactttgggattgctctaccacaactggtacccatcacgggtgtttgtgggagataccttctgttactttgctggcatgacctttgccgtggtgggcatcttgggacacttcagcaagaccatgctactattcttcatgccccaggtgttcaacttcctctactcactgcctcagctcctgcatatcatcccctgccctcgccaccgcatacccagactcaatatcaagacaggcaaactggagatgagctattccaagttcaagaccaagagcctctctttcttgggcacctttattttaaaggtggcagagagcctccagctggtgacagtacaccagagtgagactgaagatggtgaattcactgaatgtaacaacatgaccctcatcaacttgctacttaaagtccttgggcccatacatgagagaaacctcacattgctcctgctgctgctgcagatcctgggcagtgccatcaccttctccattcgatatcagctcgttcgactcttctatgatgtctgagtcccttgatcattgtcctttacctcacagtctctaggattcctgactcaggctgacctctctctctggtcccagactgcctccttgcccaggcctctctcactcttcatactcctccagattttgttctcagcattttcctttctctgtgatcattggcatcctgggcgtttcttgccctctgctgactactgattggattttacctatggctttctgcaacttgctactctctccctctccatcccatctttgcagcctcatagggtgggatacagcagctttttttgcagttatccacactcacatttcagagtcctgactctcaaggaaccactggtttttgggatagaacttgggccagggctaggaacacaggctccacggtgacatgtcatttgattgtaaattaagtgttctgattagtaagaactaagcagggggccacatgctctcaatggagacaataaagtgttgtctttttcttaaaaaaaaaaaaaaaaaaaactcgagactagttctctctctctcctaaatcattgataatttaaatattttttaaagccaccttaatttaggtagctcttggaatcgatgtttgaattcactagccacattttcttcatgatatgcctcgtggcaaacaaagatgtttccttaagatgaatcttacatttcccatagaaaataacccatttcctttggcactgcagttgccctcaaactgcttgcagttgtattcattttagtacaacaaaggttttcataatatgggaggccaagtctatgatactgcctcaaagagaccctattgtgtagatgcatcatcttctctcatttgatccatagagcataggcaaagatgtcaacctcaggccttagagaaaagtggaaatgttattatgacagccgtccatgagttatcgctttgtatgaagttaaatacagtcatgcgttgcttaacagcagggatacattctgagaaatgcattgttaggcaattccgttgtgcgaacatcctagtgtacttacacaaacctaggtggcatagcccacaacgtacccaggctatatggtaaacctgtacagcatgttactgtactgaatactgtaggcagttgtaacacaatggtatttgtgtatctagacatagaaaacatacagtaagaatatggtattataatcttacgggaccactgtcaaatacgcggtctgtctttgaaaagttgtaatgcggcgcatgactataaatacctagctggttagcatttacattccttgccagggagtttgaaatttatactatagaaataactttaggttttaggtagagttaaagaggtaaagcacatgttgccacaacccaggaaagtatttttaagaaagattggattttcctacctttagagatct

SEQ ID NO: 274080 - DNA, 1284 bp, Homo sapiens
gatcccttacagcttcacgatcaccaagcccttccgcccgatacttggcctgcatctggacttgggaatcctgtactatgtctacatggggctgctggcagtgttctgtaccaatgccatcaatatcctagcaggaattaacggcctagaggctggccagtcactagtcatttctgcttccatcattgtcttcaacctggtagagttggaaggtgattgtcgggatgatcatgtcttttccctctacttcatgatacccttttttttcaccactttgggattgctctaccacaactggtacccatcacgggtgtttgtgggagataccttctgttactttgctggcatgacctttgccgtggtgggcatcttgggacacttcagcaagaccatgctactattcttcatgccccaggtgttcaacttcctctactcactgcctcagctcctgcatatcatcccctgccctcgccaccgcatacccagactcaatatcaagacaggcaaactggagatgagctattccaagttcaagaccaagagcctctctttcttgggcacctttattttaaaggtggcagagagcctccagctggtgacagtacaccagagtgagactgaagatggtgaattcactgaatgtaacaacatgaccctcatcaacttgctacttaaagtccttgggcccatacatgagagaaacctcacattgctcctgctgctgctgcagatcctgggcagtgccatcaccttctccattcgatatcagctcgttcgactcttctatgatgtctgagtcccttgatcattgtcctttacctcacagtctctaggattcctgactcaggctgacctctctctctggtcccagactgcctccttgcccaggcctctctcactcttcatactcctccagattttgttctcagcattttcctttctctgtgatcattggcatcctgggcgtttcttgccctctgctgactactgattggattttacctatggctttctgcaacttgctactctctccctctccatcccatctttgcagcctcatagggtgggatacagcagctttttttgcagttatccacactcacatttcagagtcctgactctcaaggaaccactggtttttgggatagaacttgggccagggctaggaacacaggctccacggtgacatgtcatttgattgtaaattaagtgttctgattagtaagaactaagcagggggccacatgctctcaatggagacaataaagtgttgtctttttctta

SEQ ID NO: 274081 - DNA, 1186 bp, Homo sapiens
cttcttagcccggcgcgggggctcacgcctgtactcgcaacactttgggaggccgacgtgggtggatcatgaggtcaggagtttgagatcagcctggccaatatggtgaaacccgtctctactaaaaatataaaaattggccgggcgcggtggctcacgcctgtaatcccaccactttgggattgctctaccacaactggtacccatcacgggtgtttgtgggagataccttctgttactttgctggcatgacctttgccgtggtgggcatcttgggacacttcagcaagaccatgctactattcttcatgccccaggtgttcaacttcctctactcactgcctcagctcctgcatatcatcccctgccctcgccaccgcatacccagactcaatatcaagacaggcaaactggagatgagctattccaagttcaagaccaagagcctctctttcttgggcacctttattttaaaggtggcagagagcctccagctggtgacagtacaccagagtgagactgaagatggtgaattcactgaatgtaacaacatgaccctcatcaacttgctacttaaagtccttgggcccatacatgagagaaacctcacattgctcctgctgctgctgcagatcctgggcagtgccatcaccttctccattcgatatcagctcgttcgactcttctatgatgtctgagtcccttgatcattgtcctttacctcacagtctctaggattcctgactcaggctgacctctctctctggtcccagactgcctccttgcccaggcctctctcactcttcatactcctccagattttgttctcagcattttcctttctctgtgatcattggcatcctgggcgtttcttgccctctgctgactactgattggattttacctatggctttctgcaacttgctactctctccctctccatcccatctttgcagcctcatagggtgggatacagcagctttttttgcagttatccacactcacatttcagagtcctgactctcaaggaaccactggtttttgggatagaacttgggccagggctaggaacacaggctccacggtgacatgtcatttgattgtaaattaagtgttctgattagtaagaactaagcagggggccacatgctctcaatggagacaataaagtgttgtctttttctta

SEQ ID NO: 274082 - DNA, 1862 bp, Homo sapiens
gcggggcagaacataggttgccttagagaggttccccggtgtcccgacggcggctcaagtcagagttgctgggttttgctcagattggtgtgggaagagcctgcctgtggggagcggccactccatactgctgaggcctcaggactgctgctcagcttgcccgttacctgaagaggcggcggagccgggcccctgaccggtcaccatgtgggccttctcggaattgcccatgccgctgctgatcaatttgatcgtctcgctgctgggatttgtggccacagtcaccctcatcccggccttccggggccacttcattgctgcgcgcctctgtggtcaggacctcaacaaaaccagccgacagcagatcccagaatcccagggagtgatcagcggtgctgttttccttatcatcctcttctgcttcatccctttccccttcctgaactgctttgtgaaggagcagtgtaaggcattcccccaccatgaatttgtggccctgataggtgccctccttgccatctgctgcatgatcttcctgggctttgcggatgatgtactgaatctgcgctggcgccataagctgctgctacctacagctgcctcactacctctcctcatggtctatttcaccaactttggcaacacgaccattgtggtgcccaagcccttccgcccgatacttggcctgcatctggacttgggaatcctgtactatgtctacatggggctgctggcagtgttctgtaccaatgccatcaatatcctagcaggaattaacggcctagaggctggccagtcactagtcatttctgcttccatcattgtcttcaacctggtagagttggaaggtgattgtcgggatgatcatgtcttttccctctacttcatgatacccttttttttcaccactttgggattgctctaccacaactggtacccatcacgggtgtttgtgggagataccttctgttactttgctggcatgacctttgccgtggtgggcatcttgggacacttcagcaagaccatgctactattcttcatgccccaggtgttcaacttcctctactcactgcctcagctcctgcatatcatcccctgccctcgccaccgcatacccagactcaatatcaagacaggcaaactggagatgagctattccaagttcaagaccaagagcctctctttcttgggcacctttattttaaaggtggcagagagcctccagctggtgacagtacaccagagtgagactgaagatggtgaattcactgaatgtaacaacatgaccctcatcaacttgctacttaaagtccttgggcccatacatgagagaaacctcacattgctcctgctgctgctgcagatcctgggcagtgccatcaccttctccattcgatatcagctcgttcgactcttctatgatgtctgagtcccttgatcattgtcctttacctcacagtctctaggattcctgactcaggctgacctctctctctggtcccagaattttcctttctctgtgatcattggcatcctgggcgtttcttgccctctgctgactactgattggattttacctatggctttctgcaacttgctactctctccctctccatcccatctttgcagcctcatagggtgggatacagcagctttttttgcagttatccacactcacatttcagagtcctgactctcaaggaaccactggtttttgggatagaacttgggccagggctaggaacacaggctccacggtgacatgtcatttgattgtaaattaagtgttctgattagtaagaactaagcagggggccacatgctctcaatggagacaataaagtgttgtctttttctta

SEQ ID NO: 274083 - DNA, 1857 bp, Homo sapiens
gcggggcagaacataggttgccttagagaggttccccggtgtcccgacggcggctcaagtcagagttgctgggttttgctcagattggtgtgggaagagcctgcctgtggggagcggccactccatactgctgaggcctcaggactgctgctcagcttgcccgttacctgaagaggcggcggagccgggcccctgaccggtcaccatgtgggccttctcggaattgcccatgccgctgctgatcaatttgatcgtctcgctgctgggatttgtggccacagtcaccctcatcccggccttccggggccacttcattgctgcgcgcctctgtggtcaggacctcaacaaaaccagccgacagcagatcccagaatcccagggagtgatcagcggtgctgttttccttatcatcctcttctgcttcatccctttccccttcctgaactgctttgtgaaggagcagtgtaaggcattcccccaccatgaatttgtggccctgataggtgccctccttgccatctgctgcatgatcttcctgggctttgcggatgatgtactgaatctgcgctggcgccataagctgctgctacctacagctgcctcactacctctcctcatggtctatttcaccaactttggcaacacgaccattgtggtgcccaagcccttccgcccgatacttggcctgcatctggacttgggaatcctgtactatgtctacatggggctgctggcagtgttctgtaccaatgccatcaatatcctagcaggaattaacggcctagaggctggccagtcactagtcatttctgcttccatcattgtcttcaacctggtagagttggaaggtgattgtcgggatgatcatgtcttttccctctacttcatgatacccttttttttcaccactttgggattgctctaccacaactggtacccatcacgggtgtttgtgggagataccttctgttactttgctggcatgacctttgccgtggtgggcatcttgggacacttcagcaagaccatgctactattcttcatgccccaggtgttcaacttcctctactcactgcctcagctcctgcatatcatcccctgccctcgccaccgcatacccagactcaatatcaagacaggcaaactggagatgagctattccaagttcaagaccaagagcctctctttcttgggcacctttattttaaaggtggcagagagcctccagctggtgacagtacaccagagtgagactgaagatggtgaattcactgaatgtaacaacatgaccctcatcaacttgctacttaaagtccttgggcccatacatgagagaaacctcacattgctcctgctgctgctgcagatcctgggcagtgccatcaccttctccattcgatatcagctcgttcgactcttctatgatgtctgagtcccttgatcattgtcctttacctcacagtctctaggattcctgactcaggctgacctctctctctggtcccagactgcctccttgcccaggcctctctcactcttcatactcctccagattttgttctcagcattttcctttctctgtgatcattggcatcctgggcgtttcttgccctctgctgactactgattggattttacctatggctttctgcaacttgctactctctccctctccatcccatctttgcagcctcatagggaaccactggtttttgggatagaacttgggccagggctaggaacacaggctccacggtgacatgtcatttgattgtaaattaagtgttctgattagtaagaactaagcagggggccacatgctctcaatggagacaataaagtgttgtctttttctta

SEQ ID NO: 274084 - DNA, 1457 bp, Homo sapiens
  misc_feature (1413)..(1413): n is a, c, g, or t
gcggggcagaacataggttgccttagagaggttccccggtgtcccgacggcggctcaagtcagagttgctgggttttgctcagattggtgtgggaagagcctgcctgtggggagcggccactccatactgctgaggcctcaggactgctgctcagcttgcccgttacctgaagaggcggcggagccgggcccctgaccggtcaccatgtgggccttctcggaattgcccatgccgctgctgatcaatttgatcgtctcgctgctgggatttgtggccacagtcaccctcatcccggccttccggggccacttcattgctgcgcgcctctgtggtcaggacctcaacaaaaccagccgacagcagatcccagaatcccagggagtgatcagcggtgctgttttccttatcatcctcttctgcttcatccctttccccttcctgaactgctttgtgaaggagcagtgtaaggcattcccccaccatgaatttgtggccctgataggtgccctccttgccatctgctgcatgatcttcctgggctttgcggatgatgtactgaatctgcgctggcgccataagctgctgctacctacagctgcctcactacctctcctcatggtctatttcaccaactttggcaacacgaccattgtggtgcccaagcccttccgcccgatacttggcctgcatctggacttgggaatcctgtactatgtctacatggggctgctggcagtgttctgtaccaatgccatcaatatcctagcaggaattaacggcctagaggctggccagtcactagtcatttctgcttccatcattgtcttcaacctggtagagttggaaggtgattgtcgggatgatcatgtcttttccctctacttcatgatacccttttttttcaccactttgggattgctctaccacaactggtacccatcacgggtgtttgtgggagataccttctgttactttgctggcatgacctttgccgtggtgggcatcttgggacacttcagcaagaccatgctactattcttcatgccccaggtgttcaacttcctctactcactgcctcagctcctgcatatcatcccctgccctcgccaccgcatacccagactcaatatcaagacaggcaaactggagatgagctattccaagttcaagaccaagagcctctctttcttgggcacctttattttaaaggtggcagagagcctccagctggtgacagtacaccagagtgagactgaagatggtgaattcactgaatgtaacaacatgaccctcatcaacttgctacttaaagtccttgggcccatacatgagagaaacctcacattgctcctgctgctgctgcagaacctgggcagtgccgtcaccatcaccaaacgataccagcacgaccnacacaacaaagatgacagagacccaagaacaatgaccaaaacca

SEQ ID NO: 274085 - DNA, 1337 bp, Homo sapiens
gcggggcagaacataggttgccttagagaggttccccggtgtcccgacggcggctcaagtcagagttgctgggttttgctcagattggtgtgggaagagcctgcctgtggggagcggccactccatactgctgaggcctcaggactgctgctcagcttgcccgttacctgaagaggcggcggagccgggcccctgaccggtcaccatgtgggccttctcggaattgcccatgccgctgctgatcaatttgatcgtctcgctgctgggatttgtggccacagtcaccctcatcccggccttccggggccacttcattgctgcgcgcctctgtggtcaggacctcaacaaaaccagccgacagcagatcccagaatcccagggagtgatcagcggtgctgttttccttatcatcctcttctgcttcatccctttccccttcctgaactgctttgtgaaggagcagtgtaaggcattcccccaccatgaatttgtggccctgataggtgccctccttgccatctgctgcatgatcttcctgggctttgcggatgatgtactgaatctgcgctggcgccataagctgctgctacctacagctgcctcactacctctcctcatggtctatttcaccaactttggcaacacgaccattgtggtgcccaagcccttccgcccgatacttggcctgcatctggacttgggaatcctgtactatgtctacatggggctgctggcagtgttctgtaccaatgccatcaatatcctagcaggaattaacggcctagaggctggccagtcactagtcatttctgcttccatcattgtcttcaacctggtagagttggaaggtgattgtcgggatgatcatgtcttttccctctacttcatgatacccttttttttcaccactttgggattgctctaccacaactggtacccatcacgggtgtttgtgggagataccttctgttactttgctggcatgacctttgccgtggtgggcatcttgggacacttcagcaagaccatgctactattcttcatgccccaggtgttcaacttcctctactcactgcctcagctcctgcatatcatcccctgccctcgccaccgcatacccagactcaatatcaagacaggcaaactggagatgagctattccaagttcaagaccaagagcctctctttcttgggcacctttattttaaaggtaacagggtaacaaggaggtaaggccctaggctgccatcctgaccttgaggaatggggaacctagtcctacatcagatccaaggggaacttgaaagcattaaatagatccacattcctaaagcata

SEQ ID NO: 274086 - DNA, 680 bp, Homo sapiens
gcggggcagaacataggttgccttagagaggttccccggtgtcccgacggcggctcaagtcagagttgctgggttttgctcagattggtgtgggaagagcctgcctgtggggagcggccactccatactgctgaggcctcaggactgctgctcagcttgcccgttacctgaagaggcggcggagccgggcccctgaccggtcaccatgtgggccttctcggaattgcccatgccgctgctgatcaatttgatcgtctcgctgctgggatttgtggccacagtcaccctcatcccggccttccggggccacttcattgctgcgcgcctctgtggtcaggacctcaacaaaaccagccgacagcagatcccagaatcccagggagtgatcagcggtgctgttttccttatcatcctcttctgcttcatccctttccccttcctgaactgctttgtgaaggagcagtgtaaggcattcccccaccatgaatttgtggccctgataggtgccctccttgccatctgctgcatgatcttcctgggctttgcggatgatgtactgaatctgcgctggcgccataagctgctgctacctacagctgcctcactacctctcctcatggtctatttcaccaactttggcccggcatacttcggggatcctctatgattctaacctacag

SEQ ID NO: 274087 - DNA, 242 bp, Homo sapiens
tgctgggtgacttagaggatcccagcggccgccttctttttttgcagttatccacactcacatttcagagtcctgactctcaaggaaccactggtttttgggatagaacttgggccagggctaggaacacaggctccacggtgacatgtcatttgattgtaaattaagtgttctgattagtaagaactaagcagggggccacatgctctcaatggagacaataaagtgttgtctttttctta

SEQ ID NO: 274088 - DNA, 256 bp, Homo sapiens
cgagtttatacctccgtgtctccctttctgcgtgattcttactccagtccatttctccttgcagatcctgggcagtgccatcaccttctccattcgatatcagctcgttcgactcttctatgatgtctgagtcccttgatcattgtcctttacctcacagtctctaggattcctgactcaggctgacctctctctctggtcccagactgcctccttgcccaggcctctctcactcttcatactcctccagattttg

SEQ ID NO: 274089 - DNA, 878 bp, Homo sapiens
gcggggcagaacataggttgccttagagaggttccccggtgtcccgacggcggctcaagtcagagttgctgggttttgctcagattggtgtgggaagagcctgcctgtggggagcggccactccatactgctgaggcctcaggactgctgctcagcttgcccgttacctgaagaggcggcggagccgggcccctgaccggtcaccatgtgggccttctcggaattgcccatgccgctgctgatcaatttgatcgtctcgctgctgggatttgtggccacagtcaccctcatcccggccttccggggccacttcattgctgcgcgcctctgtggtcaggacctcaacaaaaccagccgacagcagatcccagaatcccagggagtgatcagcggtgctgttttccttatcatcctcttctgcttcatccctttccccttcctgaactgctttgtgaaggagcagtgtaaggcattcccccaccatgaatttgtggccctgataggtgccctccttgccatctgctgcatgatcttcctgggctttgcggatgatgtactgaatctgcgctggcgccataagctgctgctacctacagctgcctcactacctctcctcatggtctatttcaccaactttggcaacacgaccattgtggtgcccaagcccttccgcccgatacttggcctgcatctggacttgggaatcctgtactatgtctacatggggctgctggcagtgttctgtaccaatgccatcaatatcctagcaggaattaacggcctagaggctggccagtcactagtcatttctgcttccatcattgtcttcaacctggtagagttggaaggggtgcgcgagacaggtttcccctaccagg

SEQ ID NO: 274090 - DNA, 1799 bp, Homo sapiens
gcggggcagaacataggttgccttagagaggttccccggtgtcccgacggcggctcaagtcagagttgctgggttttgctcagattggtgtgggaagagcctgcctgtggggagcggccactccatactgctgaggcctcaggactgctgctcagcttgcccgttacctgaagaggcggcggagccgggcccctgaccggtcaccatgtgggccttctcggaattgcccatgccgctgctgatcaatttgatcgtctcgctgctgggatttgtggccacagtcaccctcatcccggccttccggggccacttcattgctgcgcgcctctgtggtcaggacctcaacaaaaccagccgacagcagattttgtggccctgataggtgccctccttgccatctgctgcatgatcttcctgggctttgcggatgatgtactgaatctgcgctggcgccataagctgctgctacctacagctgcctcactacctctcctcatggtctatttcaccaactttggcaacacgaccattgtggtgcccaagcccttccgcccgatacttggcctgcatctggacttgggaatcctgtactatgtctacatggggctgctggcagtgttctgtaccaatgccatcaatatcctagcaggaattaacggcctagaggctggccagtcactagtcatttctgcttccatcattgtcttcaacctggtagagttggaaggtgattgtcgggatgatcatgtcttttccctctacttcatgatacccttttttttcaccactttgggattgctctaccacaactggtacccatcacgggtgtttgtgggagataccttctgttactttgctggcatgacctttgccgtggtgggcatcttgggacacttcagcaagaccatgctactattcttcatgccccaggtgttcaacttcctctactcactgcctcagctcctgcatatcatcccctgccctcgccaccgcatacccagactcaatatcaagacaggcaaactggagatgagctattccaagttcaagaccaagagcctctctttcttgggcacctttattttaaaggtggcagagagcctccagctggtgacagtacaccagagtgagactgaagatggtgaattcactgaatgtaacaacatgaccctcatcaacttgctacttaaagtccttgggcccatacatgagagaaacctcacattgctcctgctgctgctgcagatcctgggcagtgccatcaccttctccattcgatatcagctcgttcgactcttctatgatgtctgagtcccttgatcattgtcctttacctcacagtctctaggattcctgactcaggctgacctctctctctggtcccagactgcctccttgcccaggcctctctcactcttcatactcctccagattttgttctcagcattttcctttctctgtgatcattggcatcctgggcgtttcttgccctctgctgactactgattggattttacctatggctttctgcaacttgctactctctccctctccatcccatctttgcagcctcatagggtgggatacagcagctttttttgcagttatccacactcacatttcagagtcctgactctcaaggaaccactggtttttgggatagaacttgggccagggctaggaacacaggctccacggtgacatgtcatttgattgtaaattaagtgttctgattagtaagaactaagcagggggccacatgctctcaatggagacaataaagtgttgtctttttctta

SEQ ID NO: 274091 - DNA, 828 bp, Homo sapiens
accgctccaagaactttccctttgcccctggatgtccacccaggaccagtatggttccagaacaggcgtgccaagtctcggcgtcagagtgggaaatccttccaacctttggctaggccggagattatcctcaaccactgtgctcctggaactgaaacgaaatgtctgaagccccagctgcctcttgagacattggttcaaagctggactcatgggaggaacacatcttttctgcctttggtaacttttgaggattctgggagaattcgggataagctctgaggagccatgactgacagcctgggagagacacatcagcatactgtcctttctgacttccatgctaaggacatgtccttgttaaccttgatgatggttttgacagcacctctcacatttgaaggtaccccgccactttgtcaatgacgttttaagcccacactcccaccccagagttcccgcattcgtttttacctgtgttctctccaagcctgcacattccattggtctgcatccctatgccttcttgccaggcctgtttttagtttttggactggttgttcagaactcattattttcttcacaagaatgcctcagcttgactcagtttccccttgtgtttgacagctgccattttctcctggtccctccaaggcttataatcttaaagtcactctaccccgtctcttcaaccctcatcctaggtttattactttttaaaattgggcctgtcatcttcacgttcaatcatagctccaatgactctgcatgcagattatttcgacagcccccttgcctctagcttctcaactacttaaaaaaaattac

SEQ ID NO: 274092 - DNA, 1276 bp, Homo sapiens
atggccacagccgagtcccgtgcgctccagtttgccgagggcgccgcgtttccagcgtaccgggccccccacgccggcggggcgctcctgccgcccccgagccctgcggcagccctgctccctgcgccgcccgcgggccccggcccagcgacctttgcgggcttcctcggccgggaccccgggccggccccgccgccccccgccagcctgggctcgcctgcgccccccaaaggcgcggccgccccgtcggcgtcgcagcgccgcaagcgcacgtctttcagcgccgaacagctgcagctgctggagctcgtcttccgccggacccggtaccccgacatccacttgcgcgagcgcctggccgcgctcaccctgctccccgagtccaggatccaggtatggttccagaacaggcgtgccaagtctcggcgtcagagtgggaaatccttccaacctttggctaggccggagattatcctcaaccactgtgctcctggaactgaaacgaaatgtctgaagccccagctgcctcttgaggtagatgtgaactgcctgcccgaaccaaacggggttggagggggcatctctgactctagctcccaaggtcagaattttgaaacctgttcccctctctctgaagacattggttcaaagctggactcatgggaggaacacatcttttctgcctttggtaacttttgaggattctgggagaattcgggataagctctgaggagccatgactgacagcctgggagagacacatcagcatactgtcctttctgacttccatgctaaggacatgtccttgttaaccttgatgatggttttgacagcacctctcacatttgaaggtaccccgccactttgtcaatgacgttttaagcccacactcccaccccagagttcccgcattcgtttttacctgtgttctctccaagcctgcacattccattggtctgcatccctatgccttcttgccaggcctgtttttagtttttggactggttgttcagaactcattattttcttcacaagaatgcctcagcttgactcagtttccccttgtgtttgacagctgccattttctcctggtccctccaaggcttataatcttaaagtcactctaccccgtctcttcaaccctcatcctaggtttattactttttaaaattgggcctgtcatcttcacgttcaatcatagctccaatgactctgcatgcagattatttcgacagcccccttgcctctagcttctcaactacttaaaaaaaattac

SEQ ID NO: 274093 - DNA, 1021 bp, Homo sapiens
ggctggtactggtctgggatttagggatccgaacagctgcagctgctggagctcgtcttccgccggacccggtaccccgacatccacttgcgcgagcgcctggccgcgctcaccctgctccccgagtccaggatccaggtatggttccagaacaggcgtgccaagtctcggcgtcagagtgggaaatccttccaacctttggctaggccggagattatcctcaaccactgtgctcctggaactgaaacgaaatgtctgaagccccagctgcctcttgaggtagatgtgaactgcctgcccgaaccaaacggggttggagggggcatctctgactctagctcccaaggtcagaattttgaaacctgttcccctctctctgaagacattggttcaaagctggactcatgggaggaacacatcttttctgcctttggtaacttttgaggattctgggagaattcgggataagctctgaggagccatgactgacagcctgggagagacacatcagcatactgtcctttctgacttccatgctaaggacatgtccttgttaaccttgatgatggttttgacagcacctctcacatttgaaggtaccccgccactttgtcaatgacgttttaagcccacactcccaccccagagttcccgcattcgtttttacctgtgttctctccaagcctgcacattccattggtctgcatccctatgccttcttgccaggcctgtttttagtttttggactggttgttcagaactcattattttcttcacaagaatgcctcagcttgactcagtttccccttgtgtttgacagctgccattttctcctggtccctccaaggcttataatcttaaagtcactctaccccgtctcttcaaccctcatcctaggtttattactttttaaaattgggcctgtcatcttcacgttcaatcatagctccaatgactctgcatgcagattatttcgacagcccccttgcctctagcttctcaactacttaaaaaaaattac

SEQ ID NO: 274094 - DNA, 494 bp, Homo sapiens
tgcaggaggtttcctatgagtggtctcaggaccagcccctgcgaggggtgagggaagcagaagtgggcagggggaataaactatgatccagttgcaacagcagactcagccaatcctgtggggagctctggaactggactctttccagttgaggcaagacggctggaaccctgtgccccttcatcagtgagtaataggatgcaggctgcctccaggtaagggatgtatctttgggtgagactgcttcttaggaccaatggtaattctggagaggggctcagcaagaggctacaatatctacatcttgcagcagctaggggaagtagtgctcccatcctgatggcacatctgggcagcatgtcccttcactttttctctccaatgagagagaagaaaagagattaaaaataaaatagcccctttgttttatatttgaaatgattgctcttgtgattataatttgcaaccttaatataaaatgcactgaattaaca

SEQ ID NO: 274095 - DNA, 268 bp, Homo sapiens
accccctccttaggcaacctggtggtcccccgctcccgggaggtcaccatattgatgccgaacttagtgcggacacccgatcggcatagcgcactacagcccagaactcctgacctcaagtgatcctcccgccttggcctcccaaagtgctggcattacaggcgtgagccacccttcccggccactgcttttatcttgatgtataactgagttgatgctagatttcaattccttctttgtccttttactattctgtcctatagccacc

SEQ ID NO: 274096 - DNA, 1200 bp, Homo sapiens
cagccatgcgagatttctctcactgtcatgatctttgcaaaggcagtttcagaactatatttggctcacagcgctggaggctgggaaatccaagggcatggtggcagcttctggcaagggcttttttaccacatcataacatggtgaaaagcagaagggcaagaaagcttgtgcaaaagagacaaaacatgatagccttccctcaaaacaacctactcttgaggtagctaatccagtcccgtgagaggaagaattcacttacttccaccagaattcatctgaaagagcaacattagtccctcttaaagatctaatcacctcttaaaggcctcacctcccaaaaccaccataccaggaccaggtaccagatttccaacacatgaattctgagggacacattcaacccatagcaagacccctgtaggccatgtcgcagggttaaattgtattccaaatgagattggatgccattagattttaaacagctttttaaaaactaaaaaagtgtttcactcttgctgcaatggggatatagacagacaagagtagaaagcagagaaactagtaaggaggtacactattcatttatcagtctagaggagaaatgataggggatgtgcattgggtgccagcagtagaattgaagacctgtggtcagagtcaggttatattcagaatttgctgacagagtagatagagattaggagagaatttttttgtttgagcaagggtgtgaatgatggtagataagacaatggggaggagcaggtttgagggatgggaatctagggtttttgaaggctatcttaatttttaaatgcatggttctggcatttattacttgtggaatattgaacaaattatttcaatttcctcatctgtgaaactgggttggtaatagtatgtatgctatatggtttacatgaaaattaaatgtattaatgccctgaagcacttaaaacacaactggacacatactgtgttctcagtaaatgttagctattgttgctgctactgttaatattattactattacccataatcataatattagtgtatgtccacatgagatattgaagaggcaataggatttatgagtctggaactcaggagagaaatcaggactggagataaactttgagagttattagcatacagatgggtattgaaaaccatgggactgggtgagatttcctatgg

SEQ ID NO: 274097 - DNA, 251 bp, Homo sapiens
acatacgtttaataataatacatatgtataaagcaaaataatgatgatagctaatatttcgggcctcaacatatactagtgtttttatatgcgttgtatttaattaaaaaaaaacttaaaggaatcacatagacctccgtttaaatttaggctctaccacttgcagctgccagaagtttgatttatataatctttcattgccaaaacgggtcagattcagaaccagcctcttcagggtaactgtgaggatc

SEQ ID NO: 274098 - DNA, 361 bp, Homo sapiens
cttcttattgtctgaggatctttttctaaacctctgttgaattcattcattcaattagccaaatatttattgagcacctaattgtaagccaagctgagagtacacaagtgacaaaaatgaacaacattgctgtgctcatgacacctccattctagttgggtgaaacagatggtaaacatttaaatcaagaaataagataatttcatatagataatttttatagacagaaataaaataatttctcctaaggaaataaagtatgatgggatagtgacagtgaaggtataattgtaaagggttttttttgtttaatagccctattgaaatataattgacataagataaatggcatgtatttaaa

SEQ ID NO: 274099 - DNA, 237 bp, Homo sapiens
aaaggtaccacttagtcctcatgttaacccaagtatcttctattattagctcccattttgcagaggaagaaactgaagtgcaaggagtttttaaaatttgcacaaggtcacagccagagcatgacagagccaggtcccccagataccaaagttcagacttttagccactgtaccagactggacatggtgtgccttatcctaaagtatctatcgtagagccctgttttaagaatggaa

SEQ ID NO: 274100 - DNA, 664 bp, Homo sapiens
ttttcagaagagatatgttgcatattttgcacaagtgaaacatctctacaactggaatctccctccaagacggatactctttataaaacacttcattatttattcgattcctcgttatgtacgtgatctaaaaatccaaatagaaatggagaaaaaggttgtcttttccactatttcattaggaaaatgttcggtacttgataacattacaacagacaaaatattaattgatgtattcgacggtccacctctgtatgatgatgtgaaagtgcagtttttctattcgaatcttcctacatactatgacaattgctcattttacttctggttgcacacatcttttattgaaaataacaggctttatctaccaaaaaatgaattggataatctacataaacaaaaagcacggagaatttatccatcagattttgccgtggagatactttttggcgagaaaatgacttccagtgatgttgtagctggatccgattaagtatagctcccccttccccttctgggaaagaattatgttctttccaaccctgccacatgttcatatatcctaaatctatcctaaatgttccttgaagtatttatttatgtttatatatgtttatatatgttcttcataaatctattacatatatatagataaaaaaaaagt

SEQ ID NO: 274101 - DNA, 571 bp, Homo sapiens
ttttcagaagagatatgttgcatattttgcacaagtgaaacatctctacaactggaatctccctccaagacggatactctttataaaacacttcattatttattcgattcctcgttatgtacgtgatctaaaaatccaaatagaaatggagaaaaaggttgtcttttccactatttcattaggaaaatgttcgaatcttcctacatactatgacaattgctcattttacttctggttgcacacatcttttattgaaaataacaggctttatctaccaaaaaatgaattggataatctacataaacaaaaagcacggagaatttatccatcagattttgccgtggagatactttttggcgagaaaatgacttccagtgatgttgtagctggatccgattaagtatagctcccccttccccttctgggaaagaattatgttctttccaaccctgccacatgttcatatatcctaaatctatcctaaatgttccttgaagtatttatttatgtttatatatgtttatatatgttcttcataaatctattacatatatatagataaaaaaaaagt

SEQ ID NO: 274102 - DNA, 371 bp, Homo sapiens
gatgaaaattttaacctaagaaagttggtgcaaatataaatgaaacaagattaagcatatattgatggtcctgtccaggtgaggtggcttacacctgcaatcctagcactttgggaggccaaggcaggtgaactgcttgagctcagaagttcgagaccaagctgggcaacatggcaaaactccgtctctaccaaaaaaaaaaaaaattagccaggcatggtggtgtgtgcctgtagctcagctactcgggtgggtaagaggtgacaggattgcttgagcccaggaagttgaggctgcagtgagccaagattgtgccactccatcctgggtgacagagcaagacctatctctacataaacaaacaaataggt

SEQ ID NO: 274103 - DNA, 584 bp, Homo sapiens
cttggcatttgctcttccctctgccttgaattgctacccctgatacccaaatgatggtctctcttctgttccaatctctgctgaaatgtcaccttgtcaataatgtcttcccagatcacttgtagtgatcatccattaggaacagtgttgacacccacccccaaaccaccaccccctattaacttcctgccccatttctcttgcagccctcattatcattcagcatgccaaataccatccttatttgtgtatttgtctccttcattgctagattgtaagtttgatgagggcaggatttttttccactttgtcactgctttatctccaacgactcttacagagtaagcacacagtaaatgcctgttaaaagaacgattgaattgcatgaggacaaagaaacttttattttactgtcgtaacgccatgacttcctccaaatctccatgtggatctctatgccagcttttttctgcctctacttaattttctccaagaccttccttggaaatatctgtatgcttaggaagttttaatagtaaagagtggagtaacagctaaaaataaaataagttatgaaatataaa

SEQ ID NO: 274104 - DNA, 273 bp, Homo sapiens
ccttcaaaattgtaattcttgttggaaaactgttctacgattgtcgaatctttcctgatggtacagtgctgcgtaatgaacatgatgaaacttaaaaaattgtgttcctcctagaacttcttgggcatcagtttctgttgtctttaatggtaaacagtgctcaggatgtgaactgaacagacctcggcatgacttttttgaatgaaaccttgtcaccactccagcatggagctaagtgggcaatctctggataaatggttctgaatcctggct

SEQ ID NO: 274105 - DNA, 426 bp, Homo sapiens
gtcccagatggatctggccttagctttggatttccattctcatctgagtttccccatatccctggtcactgggtgaagacagcctgtccttgagccagggatctgcgctcaccttcctttccctttgagacacttgggtagaaatatttgagaagcatggtgacccccctggattttttagctctgtcactctgtgagaatctgcattcatagcccaatccttatggagcgactgaccagggatccctcctctcatcatgcgggttcctttctcctattatgcatctgccacaagtgaaaggaacactgtaagcatcttccctggaacaggaggccatctgccactccacgtataaagatgctccttcccgcagggaggctccacgtgtcccagatccatttccccttgtgatggctccagacaca

SEQ ID NO: 274106 - DNA, 466 bp, Homo sapiens
tagacattctgtgtcttctggaagcacacatgaaacagtgccaggctaacctgttagcttgcaagtaaagcctcagacccattacagtttttgagagttaccagttcaagtttatcatggtcagcatttagtaaatgtctctggctagccaaacatttttagctttccaggatcccaagtagcaggcttaaactgacatttcatctttggttaaatgaaataagtgataacagtgtaaattttgtagcccccaggcatatgtaacataataccaaggcctccacattgtacaactccgggtgctctgttcatatcatagtctatgaatatgaaatatagctgctctaactattataagatttcatcatatctaacacccttaatagtagaacacacctttactttaggtgtaacagaaataaaaaagaaacttccaactaaactatgataaaatgctcttctgtca

SEQ ID NO: 274107 - DNA, 481 bp, Homo sapiens
ctggttcaaatggactattttatccatttatatttattgcagttactcataaacttaatttataatcatcatcttttttttgctttctatttatttgtctcactttaaaaaatatagtcatgctgatcatttaagggtttagttgaaggtaaatttctccagcagaatttgcatttgtttctgacaggtgtcaggggtcactaccatcttgagaacctttaaattattttctcagggtttgggggtttatccaaggagtgggaattccatccataagtccatgttagggccggcttgtattcacgaatcttcatctgactcctttcaccaagagtttacttgtcatctccctcaaaggagtggattttttcccaaatgtcctctgaaagtgaagatttatactgggtccttcactgtaactctccagcttaagtggctctaggcttcatttactgtctttcacatagttattaagtgcagt

SEQ ID NO: 274108 - DNA, 512 bp, Homo sapiens
ctcttgaacaccatctttctgtccactccactcccttctcctgccccctagccctcaagttttctggggcccccacccctagaaaacaggcacagtgcctgtgtgaagaggttggtttcgatctgtttcctctagattgtgccttcatcagcctggccacggctgtggggctaacgtaggcagcaggtggtgagaccgttgaggggaagggctacagaaagacaaagttggagtttcaggtagtacagcaattgatgaaatctggcaggaaaatagcatgaggagggaccccagtcacgaacagaaaaaagggatatgccctgggcttttcttgaaaaggttgcaccaatttatgtttgcctcgatcctgtaggagagcatccttaccagcattgggtatctgtatttcagcatgtttttgctaattggagaggtgaaaaatgacattttgcagtgggtttaatttgcatttcttatattattagagcacttaaacaattttttcaagtatt

SEQ ID NO: 274109 - DNA, 247 bp, Homo sapiens
cgccggccttcctcactgccatggagatctgaccatcctcattctgggccaaagaaaacaggatccacttccccatattccagaaagcccactgtttccatgtcagtggaatttccatctaatgctgtcattgctgctgtgatcagcccagatgtttgccagcgctgcttctttgtggtcaacagaaacgaactcagcaaaatgtaattttaaaaaagtaatgtgtattatttttcctgagttatac

SEQ ID NO: 274110 - DNA, 475 bp, Homo sapiens
tcgggaaaatgcaaatcaaagccaccttactactgcaagaatgtctctaatcaaaatatcaaaaaataatagatgttggcatggatgtggtgaacaggcaacacttctacactgctggtgggaatgtaaactagtacaaccactatgaaaaacagtgtgaagagattccttaaagaagtaaaagtagaactaccattgatccagcaaccccactattgggtatctacccagaggaaaagaagccattatacgaaaaaaatacttctacatgcatgtttatagcagcacaattcacagtcggaaaactatgaaaccagcccaaatgcccgtcagtcaacgagtggataaagatatttctcgtcattttcacagtaccgggtattaagttgggaaaccttataggaacattttagaactctgtctaccagaccctcaataaatgttgttagtttatcgtgctatttccgaagaagct

SEQ ID NO: 274111 - DNA, 518 bp, Homo sapiens
tctggtgagaagtcaggatagtgattatcttagtgctctgggggagggtggctctggtaatattctatttcttgatctgagggctggtgtcccagacgtattcactctacgataatttaccaagctgccctctggggattggtggcttctctgtatgaatattacactcaattaaaaaaacaaaaacctaacagtcaaagtactgggattacaggtgtgagccaccgcgcccggctgagattttcataatgtgtttgagacatgctgtttatttcttctttttttttacttttaattgaaatattgtatacatagcaaaaagtcattcctgtcataaatgtacagctcaaaattttcatgaaatttaatcattaaccagattgaaatgaaaaccacaacaaaacccatgactggaagccatccccgataagtcttctgcggccagcttcctgtggtgagcctccccatcaagggtaactgcagcctccttggaaataaaggagatcaggactccaaaa

SEQ ID NO: 274112 - DNA, 479 bp, Homo sapiens
ttcagtactccttggggagatgaatttgaggatctcctcctagcttctcattcagccaccttgtgatcattaaactctctgctgcaaaccctgctgtctcagaatattgctaagctactgtgcagcaggcataggaacctgatggtcctgtaataaagtcatgtcaaaattacaaatggaagtgagggtggagctggtcagggttgagctgggtttttaatgggaacctgggagtgaagcaagacttgctgaacatgttgggggttattgagtgggtgtaagaggaatctatctaacattgcactgatgcccttttggttttaatccttatgaccaagtatgagtctttcaaaacaatttgtataatcctccttatttttcctttcaaaaccttcaacttcctttatctccccaaataatctcgcatctattgccacttctttgcttacttcataataaacatttttttttacagagtc

SEQ ID NO: 274113 - DNA, 547 bp, Homo sapiens
tttttttttttgtaataagcaagagtatagagattaaatagggtcttgggtccacttaaattgcccacaggtcaaaacattctgagaaacaacgctgccagtgattaaaaagagccaatttagaggctaatttagtaatttattaattaatttactaatttcttaaatgtatttagaggctactttagtagttatcctccctgttaggcaggcacaaaaagatccttggcctctgtcccttctctttacctctcacgttgactgttgatctggtggattctacttccttcaataccttcacagctgtccccttcttacaagtcccactgccactggctgtcttcaccccaggagatgcagtgccttcatccctgctccccctctctccgccttccatctgcccaccaccattctcaatgtgggctttgactgggtcattccccttctcagaaactttcaattgcttttaaaaaatgtattctcaaatcctggtccgctgttccaggctcccatcccttgcccttctgcccctgcagcttccgaatca

SEQ ID NO: 274114 - DNA, 657 bp, Homo sapiens
gtaaacacatcatttttgtgacatttttcaagatatacaccaaaaggaccaggtaatggtgactcatgcctgtaatcccagcaccctgggagaccaaggcaggcagataccttgaatccaggagttcaaaaccagtctaggaaaaatggcaaaaccccatctctactaaaaatacaaaaaattagccgaacatggtggtgcatgcctgtagtcccaactactcaggaggctgaagtgagaggatcaccagagtctgggaggtcaaggctgcaatgagccaagattgcaccactgcactccagcctgtgcaaccagagtgagaccctgtctaaaaaaacaagaaagaaaaaaagaaaagaaaaaagaaaaagaaaaaaatatatacaccagaaatgtttgtcagtttagggttgagggtttgacctattttggacaatgcaggagtaaactagttaccatctgaatacttggaataataaaataaggcctttcagtaatttgatattgctttctacagagctggggccccctgggcatgatgctatattctgaagaactgaggctttattccatccagcagtattcactactacttgcatatgattatgagaataacccttcgagttttttgttttgttggttttttttagtctagac

SEQ ID NO: 274115 - DNA, 528 bp, Homo sapiens
gcaaaggaaagcaagtgatagtgtattttttaattgttaattttatcacttatcaaaaaaggcttgaaccattgactttaatagaatactgattactctgataattttgggatgagaaaacaaacatatcaatacttggaacacagtctctttctccatcccatcctgctaccagaaagaagaataacctatcagtcacctaatgggcaaagaacacattgattaggaaatagctgtcacttatagttgaaagactcaaggcagatgtgacaatataacaaatgtatgattctcttaggcagctagaaaattagaaacaggccattaaaatgtacatgctagttagtaagaggaaatgccactggccaaatcatttgtaggttagagtccctatgtaatgacatatgtttaatattaaagctatctgtgaatatatttttctttcagagtcttcgcttcactcttcttaacttctgccattcctgttattatccagcttgccgttctccaaattacatatcttcctca

SEQ ID NO: 274116 - DNA, 945 bp, Homo sapiens
cacaggtacccaggccctggaaatcctggaaatgccctgctccttctcctcatgccctaggtcccctgtgagtcccagggattctttctttgccacatccattcctgctgtctcatgtctagcctcactccaggctcttgttgtcctcagcctgaataatcacaaaatttcctaactcatctctaggtaactggcccacctttgagccagcgggtctcaccacgccttctccccaccagaactctccagcggctccccatcattttcaggatcagactcaaaccccgtaaaagtctgatctctgaaacctcaccatccactcttccttgtcactcttcaccttccctcctactctggtcacactgcataacacgcattctctttccaggtttccacctcactcctcgtgcctgtctatctttgtcatctctgttgccgtgtgtctaaatcctattagctcagaaggtccatgttcgatgccacctcttccaggcagcctcacatgcgggtgcatccttcatccctccccactgtggtcccacagtccgcttccgtggtttatgtcctcactcaactggaaactccttgaggacagtggtcttatctgactacctttcgcatttccatggtatccaaataaagccttgtacacagtaggtgctcgatgaatgcttgttgtgtacctatgtgagcaagtgggtgagtgagtaatggagtgctttgttcaccttatgggacattgaatgggatgggagggacatgcgcaaagttggaaaatgccgaatgctgtccagatgccctggaacccttgtctagaggttgctgttggggtcatgggattggtgaggctttgagtggaactcctccgaccaggctgtgtgcctggctccagctcctggtcatcctcaaagccaggaatccagcctcctcagtaccagcatcccg

SEQ ID NO: 274117 - DNA, 295 bp, Homo sapiens
gtcctcatcttgcctccaggcaaaggtctgctcatcttttgagctgtacatacatatcacctcccctcctatgctggccacaacctccaggtgcctcctcaaacaccttttcatacttgacgccttcatgttacctactgtaattatttccccacgagatgtggaacttttctgagtgcgaaactaagcctttctcactttgcatctccagtctccagtatctggtacaagttttgacacagagtgggtattcagtatgagttcatttaataaataactttcatcactctcaagg

SEQ ID NO: 274118 - DNA, 1274 bp, Homo sapiens
aagtatccgttcttggctgcctttctttaattgcgtttccagtactctctcggtgattctactcttgaacataggatgaaatttggaatcacacttctcttccacttccatccccaccctctaatgcccatattaaaaatggcggccgccgccttccgcagtaatggttgttcagcgaacaagatccgggcggaaacagtagataggcgggtgcagcggggcagaacataggttgccttagagaggttccccggtgtcccgacggcggctcaagtcagagttgctgggttttgctcagattggtgtgggaagagcctgcctgtggggagcggccactccatactgctgaggcctcaggactgctgctcagcttgcccgttacctgaagaggcggcggagccgggcccctgaccggtcaccatgtgggccttctcggaattgcccatgccgctgctgatcaatttgatcgtctcgctgctgggatttgtggccacagtcaccctcatcccggccttccggggccacttcattgctgcgcgcctctgtggtcaggacctcaacaaaaccagccgacagcagatgtgagcagcggcacacgggtccgggcagggggcaagggctaaggaaggagtggctagggcaggggcgggaaccggggtgcttgaccacacgtgaagactcagaactaacccaggcagcctggaactcggagaggtgatgagcagaacttactcgcattggggaaaggatgggtagggacccttgggtatatctgggactctggcagtggtgctttcctccctccgcccccctcaccacttaccagaataaaaaaccgggaatgagaagaccactttgggttactgtaacacctgcactagtgagtgaccacgccccctttcctcttccccctcgcccccttgctgctgggccacagcccagaatcccagggagtgatcagcggtgctgttttccttatcatcctcttctgcttcatccctttccccttcctgaactgctttgtgaaggagcagtgtaaggcattcccccaccatgaatttgtggccctgataggtgccctccttgccatctgctgcatgatcttcctgggctttgcggatgatgtactgaatctgcgctggcgccataagctgctgctacctacagctgcctcactacctctcctcatggtactatttcaccaacttgggcaacacgaccattgtggtgcccaagcctttccgcccgatacttggcctgcatctggacttggg

SEQ ID NO: 274119 - DNA, 918 bp, Homo sapiens
aagtatccgttcttggctgcctttctttaattgcgtttccagtactctctcggtgattctactcttgaacataggatgaaatttggaatcacacttctcttccacttccatccccaccctctaatgcccatattaaaaatggcggccgccgccttccgcagtaatggttgttcagcgaacaagatccgggcggaaacagtagataggcgggtgcagcggggcagaacataggttgccttagagaggttccccggtgtcccgacggcggctcaagtcagagttgctgggttttgctcagattggtgtgggaagagcctgcctgtggggagcggccactccatactgctgaggcctcaggactgctgctcagcttgcccgttacctgaagaggcggcggagccgggcccctgaccggtcaccatgtgggccttctcggaattgcccatgccgctgctgatcaatttgatcgtctcgctgctgggatttgtggccacagtcaccctcatcccggccttccggggccacttcattgctgcgcgcctctgtggtcaggacctcaacaaaaccagccgacagcagatcccagaatcccagggagtgatcagcggtgctgttttccttatcatcctcttctgcttcatccctttccccttcctgaactgctttgtgaaggagcagtgtaaggcattcccccaccatgaatttgtggccctgataggtgccctccttgccatctgctgcatgatcttcctgggctttgcggatgatgtactgaatctgcgctggcgccataagctgctgctacctacagctgcctcactacctctcctcatggtactatttcaccaacttgggcaacacgaccattgtggtgcccaagcctttccgcccgatacttggcctgcatctggacttggg

SEQ ID NO: 274120 - DNA, 1201 bp, Homo sapiens
aagtatccgttcttggctgcctttctttaattgcgtttccagtactctctcggtgattctactcttgaacataggatgaaatttggaatcacacttctcttccacttccatccccaccctctaatgcccatattaaaaatggcggccgccgccttccgcagtaatggttgttcagcgaacaagatccgggcggaaacagtagataggcgggtgcagcggggcagaacataggttgccttagagaggttccccggtgtcccgacggcggctcaagtcagagttgctgggttttgtcagcttgcccgttacctgaagaggcggcggagccgggcccctgaccggtcaccatgtgggccttctcggaattgcccatgccgctgctgatcaatttgatcgtctcgctgctgggatttgtggccacagtcaccctcatcccggccttccggggccacttcattgctgcgcgcctctgtggtcaggacctcaacaaaaccagccgacagcagatgtgagcagcggcacacgggtccgggcagggggcaagggctaaggaaggagtggctagggcaggggcgggaaccggggtgcttgaccacacgtgaagactcagaactaacccaggcagcctggaactcggagaggtgatgagcagaacttactcgcattggggaaaggatgggtagggacccttgggtatatctgggactctggcagtggtgctttcctccctccgcccccctcaccacttaccagaataaaaaaccgggaatgagaagaccactttgggttactgtaacacctgcactagtgagtgaccacgccccctttcctcttccccctcgcccccttgctgctgggccacagcccagaatcccagggagtgatcagcggtgctgttttccttatcatcctcttctgcttcatccctttccccttcctgaactgctttgtgaaggagcagtgtaaggcattcccccaccatgaatttgtggccctgataggtgccctccttgccatctgctgcatgatcttcctgggctttgcggatgatgtactgaatctgcgctggcgccataagctgctgctacctacagctgcctcactacctctcctcatggtactatttcaccaacttgggcaacacgaccattgtggtgcccaagcctttccgcccgatacttggcctgcatctggacttggg

SEQ ID NO: 274121 - DNA, 479 bp, Homo sapiens
caaaaacatttatcttgccccatgtcaccattctctaatccctttcaactctgctttataagctaccattagctccagataattatctgtcacatgaaatgtgctgtatgttacataaatatgcattttaatgtcttcgctgtactttcccaagagacaataactaaggcctaatatgtgacttcatggtcttagatgaattatttatctatagtaagcagaaaataagtttttcctttgcttaggttattacataaaagcattgttgaccacagttttttttaatgaaaaaaatgtgttttgcttaaactttgtgaaattaaaatattttaattggttatatgtgtgctacatacttccctatttatgaaatagtatatttgggtaatatagcttccacacttcaataaaacaattgaaacattacaaaattttctaacacatgaataaaatccatatgtatttctgcatagtagtaa

SEQ ID NO: 274122 - DNA, 544 bp, Homo sapiens
ccttgccattgcacactcctatctttctgaacacacaccaccccacacacacaccatacacacttgtttcattgcgcttcattttattgcacttctcgaagaatgtgttttttacaaattgaagatttgtggcaacttttcatcgagtgagtctattggcatcatttttgcaagagcatatgctcacttcctgcctctgtgacagcattttttagcaataacatatttttaatgaaggtatgtacattgttttttagacataatgctattgcacacttgactaaaatgtagcctaagtataatttttatatgccatgggaaactaaaaaaagtgacttactttattgtaatatttgctttattactttggtctggaactgcctcacactatctctgaagtatgcatgtatagcttttcataacacagatatcacatttgaccagatcctattgttactgaacaatgttgatgctaacattgatgatatcaatcactattactggaatcattatcaacatatcaataaatatttttagaacattt

SEQ ID NO: 274123 - DNA, 732 bp, Homo sapiens
aaataaagaacctgcgagtgagttcccacacgttttcctaatgggctgctgctttcctaggagtctctcgctcatagaaaaggcacacactgaaagaggaagcagatcccattgctgtggaagtcccattgttaggaagctctgcttttctggagttcaaattcgcattcatgatgctttaaaccgtcagagctgggtgggtccttctacaacaaaatcgtttgctctctctctcctagttaacaggctttcaaatattagaagatcaatgttctgaccccattaaaatttctcttttgtggaatgaaaatctctgatttaacccatcttcaagcctggtttgcatattcctctctcttccggccaccttgtctagacacactacactgaggccatgcccatcgtaaatgatgttgatatgttgtcaaaaaattggcaaaccaggcgcggtggctcatgcctgtaatcctaccactttaagaagcagaggcagacagatcaccagaggtcagaagttcgagaccagcctgtccaacatgtttaaatccgtctctactaaaaatacagaaaaaatgagctgggcgtgggggtgcacatctgtaatcccagctacttaggaggccgaggcaggagaatcgcttgaacctggaaggcagaggttgcagtgagccgagattgcatcactgcactccagcctgggtgacagagcgagacaccatcgcaaaaaaaaaa

SEQ ID NO: 274124 - DNA, 358 bp, Homo sapiens
tcaacaaaaatgtaaaggacattttggtcaacctggatactttcagttgtttcaatattttcctatcttgatcttcctcatgtggttccaaaaaattccaattcataaagataagtagcaatataataatttctataattttcttgaatagatatgtccagttttgaatttcagggaaataaaagaacctcctaatcagagacatgcctgaaagaatttgactcgaactcaaaatatctgagatgattgataagctaattacccaaatctgaccactatacattatatgtgtggaagcttcactctgtagcccatacatatgtataattattatatgccaattaaaaaaagaaatttg

SEQ ID NO: 274125 - DNA, 239 bp, Homo sapiens
agtaaattgcctgatccctagctgagagtatagaattatctctgttcagttatctgttcaaacagattcttctctctggtgccttcttctggcctgcaagagggattggcgtctgtgtcccttttgccaagaaatcagatggtaaaagagaaggtgctccacgtccccttcccaccctgacatgggacactcctgtcttatcctggcagcttttggcctccacacccacagcccagttt

SEQ ID NO: 274126 - DNA, 389 bp, Homo sapiens
catatcctctctacatctccagcaggtgcagctaaagaaatatcacgtttttcttgttgaacccaaagtgggcttcagaacccttttcaacacagagctccaggcaaccattcatgatcaactgaggtgacacatgacatgaaatctatttgtcattatgtcttcaaaaacacttccaaaagcatattcattaaagcagaattctccaaacatgtcacgttgaaaaacagtcatagctgcagattcacaatgattacaagcatattaaactcattgagaaatcctcccagacaaattctttcactgattaatcctcattttttatattgatttgtccacagaaccatttttgttatattgtttctattaaaatactatgaaattagatt

SEQ ID NO: 274127 - DNA, 805 bp, Homo sapiens
ggagagagaagggggaaatcttcatattactctcctagatgggagagtttgagatacattttctaaaacttgcttctgaatagcctggaattctggatcagttggaacagcatagtcagtatttggaagatggtgaaacactgaatttgctaatttactggtgattataggtacctgaatacagaggtgatacggcctgcatatgatccaggcagattttattcatatgctgtagtttgtagtctgaatggtcttcttcaaagtgtactattatgtatattttttggactttgttgtctttccctgtctttccttatactgttaaagctttaataccctagactctatcatatctcaggagacactgacttcatcaaacttaggtttttgtctttggcaagctatctgccccaatatttgtattcctattcctaagcctggtcattgtcagatgactcatagaagcctttaggagaagccagagtatacctagctctaggagtgcttatcagattaatgacctgatcatgaaactggcttaaaaacattagacacatatactcacacacatacacatgctgtgtagatgtttttgcccacagaaggggctgccagctgcatcaggactggccgtagtcttctctgtgctcagatatgctaaatattcatggaagttgcagctgctggagtatctcttcccagaaagctcccacaccccaactggacattccattggtcactgttaggtggtgactgctcatagcttttctctgcagcagaaatgttgctttccacatagccggga

SEQ ID NO: 274128 - DNA, 256 bp, Homo sapiens
ggctttctaaatgtcattccatagtgccagtgagccctttcatccaggttgtttcttcctcccattgacgtaatcagtgttgtctcctctgtttatcttaggctatctcagatgagaggtgattttttttctttttgcataaattagactcctttttttttttcctctgccatgagatccttctgtcctctctactggaagcaccatgtgggaggcaggaatgatgacaatatacaaatatatttcctgccacgtg

SEQ ID NO: 274129 - DNA, 344 bp, Homo sapiens
gcacccatggtgacatctgtccattcatttattcaatgtatattcatttatttagcccttttctggacactagggaaagcaatggataaaagagatgaaaatccctgcccttgtgccatttacatcttagggaagggaagataataagtaaggaaataaacaaacaactaactaagttacataccttatgtcagatggtggtaagcgcaatggagaaagtaaatcaggaaagaagaggtcgggaaagaatcagagaaggccacactgagagggtgacctatgagcaaagacctgtaggaggaaaggaagtaagtcatgcaccatctgaggcaagagcatttagg

SEQ ID NO: 274130 - DNA, 341 bp, Homo sapiens
taattccattggaatggctaaggccacaagtaagtgctctgccttctcctctgtaatgagttctctagagtcaggaaggtggccattctcacctttcccaatcaaaacagttactcctaggagtcccctattcatctctctgctctctcttccacccacctttatttgcacgtaatagaaatgcatctgaatttagttatgcctgtgcccttttgtatattttcctttgtgctttcgcttgacagaagtgtctccggttgaaaacacaggctgctgagagtgtctatttgttatactttgtatagcatttaggacaataaaacctttttgtgctcataatg

SEQ ID NO: 274131 - DNA, 391 bp, Homo sapiens
gattatttctcaaattcttaaataaaatgacaagaaattcaagtacgcttttgttacacacacacacaaaggaaacttaaatattttacttcaaattgtcagcccaggccaggcgtggtgcctcacccctgttcccagcactttgggaggccgaggcgggcaggttacctgaggtcaggagtttgagaccagcctggccaacatggcgaaaccccatctctactaaaaatacaaaaattagctggacatggtggtgtgtgcctgtaatcccagctactctggaagctgaggcaggagaattgcttgaacctgggaggcagaagttgcagtgagctgagatcatgccactgtactccgccctgggccacagagcgagactccatctccaaaa

SEQ ID NO: 274132 - DNA, 408 bp, Homo sapiens
aggattgcttgagcccagttaaaagaccagcctgggtaacatagcaagactccatctcaaaaaaaaaaaaaaaaaaaaaattaagaagagtgagtaagacccagcctagttagtcaacaggtttagttcccagctagaacagaccagagaagagtgaatggactaggaccaaatctgtcaccctctcaccctcccacctccaccccctccagctgaaatgacagattcattttagcatagaaaggtaattgggtataatctgaataataaccatcaaaatataatacatctgttaatgatgaaagccagaaagtaatgtttaaaatcagacagtgtattcaaaccactgtgttctttgccaacaataatagtgactgagggtaattttacatttgtctcgttttttaa

SEQ ID NO: 274133 - DNA, 395 bp, Homo sapiens
tcttgaactcctgacctcgtgatccgcccgcctcaccctcccaaattgctgggattacaggcgtgagccactgtgcccagctgcgacatttcatatgatatttcaggaagacataacagtcagcagagcccccaaatacctgaaaacataaacttgataggattgatggaaattaatcagttatagttagagatttcaatatcccactctcaataattggtagaacatctagacaaaattggcaaggtatggaggacttgaagaacattattaactcacttagcctgacatctgtagaatacctggtgaatgcagaatacatcctcccaattgtaggtgaacgttctctgttgatcatacattggaccataaaacaaggctccagtatagctgta

SEQ ID NO: 274134 - DNA, 577 bp, Homo sapiens
gtgacgtgtcatgtgtggggggtgtgtgtgtgtgtgactgtgtacgtggtgtgtgtgagtggggtgtgtgatcgacgctgatgtgacatgtgcatgtgtgtgaggtgtgtgtgtgtgcctgtgtacgtggtgtgtgtgagtggggtgtgtgattgatgctgatgtgacgtgtgcatgtgtggggtgtgtgtgtgtgtctgactgtgtacgtggtgtgtgtgagtgggatgtgtgatcgacgctgatgtgatgtgtgcatgtgtggggtgtgtgtgtgtgtctgactgtgtacgtggtgtgtgtgagtgggatgtgtgatcgacgctgatgtgacgtgtgcatgtgtggggtgtgcgtgtgtgtgactgtgtacgtggtgtgtgtgaggggtgtgtgatcgacgctgatgtgacgtgtgcatgtgtgtggggtgtgtgtgtgtgtgactgtgtacgtggagtgtgtgatcgatgctgatgtgacgtgtgcatgtgtggggtgtgtgtgtgtgtctgactgtgtacgtggtgtgagtggggtgtgtgatcgacgctgatgtgacgtgtgcatgtgtggg

SEQ ID NO: 274135 - DNA, 456 bp, Homo sapiens
tctagccggataacaaaaagcttcatactaaaggcctatttacatcacttccaattaccttatatatcttgtgtggttttcaacagaaaagtacaagaaatgttaaaaggcaggaaaaaaacacagcctaaagagaaaaagcaatcatcagacccagaatctgatatgacacagaatggaattatcagccatggaatataaataactgtgattaatatgttaagggctctaatagaaacatgcagatgaacatcatgcaagaacagatgtgtaatgtaatcacagacatgaaactctaaaaaagaatcaaagcaatgctggaaatcaaaagcactggaaaagaaatgaataaattatttgataggctcatcagtaaactggatatggccaagaaaagaatctgaagttcaacataactcaattaaaacttcctaaactaatatgaaaattttattt

SEQ ID NO: 274136 - DNA, 349 bp, Homo sapiens
tccacatgctaaacagagtaaacaagacctgcctcctcccctctcatcctatttctaggcagctatttagttgctgacctaatgaccctcttatttacctcagatctgcattacggtagcagttgattattatttgattccccattttctactgctccttattgttagagatacatcatgaaccctgtggggataagtggcagggaagaatttgaacagtctattgtcatagcaccaatgttatcaaactagcaataaatcctacctcaattcctatgtggttttaattctctctcattcttgcatatttctacttccaataataccataccattttagtgtgcacttt

SEQ ID NO: 274137 - DNA, 345 bp, Homo sapiens
agcccatcctgactaacatggtgaaaccccgcctctactaaaaaatacaaaaaattagccaggtgtggtggtgggcgcctgtagtcccagctactcaggaggctgaggcaggagaatggcgtgaaactgggaggcggagcttgcatgagatagacttatatgtattaacagtggaaagatgtctataatgtttgttaaattagaaaaagagcaaattgtaaaacaatatgaatagccctcttgtgtaaatgaacccatttacacaaccaaaacaaaccttatgtgtatatatagtatatgtttataaatgcatagaaaaatatctggaaagaaatcctcccaatt

SEQ ID NO: 274138 - DNA, 347 bp, Homo sapiens
agcttaaaaatttccaacataaaaaattgtgcatatccttgcatgagatataaaatatacccatgcaggctgggcgctgtggctcacccctgtaatcccagcattttaggaggccgagtcgggcagatcacaaggtcaggagttcgagaccagccttgccaacatggtgaaaccctgtctctactaaaaacacaaaaatgagccagttgtggtggcgagcgcctgtaatcccagctacttgggaggctgaggcagaagaattgcttgaatccgggaggcaggggctgcagtgaggcaagatcgcgctgctgcactccggcctgggcaacagagccggagtctgtcta

SEQ ID NO: 274139 - DNA, 376 bp, Homo sapiens
ctgccctcagccccatctgccagttcttgctctgcaaaagccacactgttgaggccgtgaaagtatagttgagccttgaacattatgggtttgaaatacgaaggtccacttaaacagagacttttttcagtaaatgtattggaaaagttttctgagatttgcaacaatttgaaaaaatctgcagatgaactgtatggcctaaaaatatttcctgcctccccttccacctcttctgcttctgccactcctgagacagcaagaccagcccttcctcttccttctcctcctcagcctattcaacatgaagataatgaggataaagacctttataattaccacttttgcttaataaatagtaaatatatttctcttatga

SEQ ID NO: 274140 - DNA, 382 bp, Homo sapiens
ctgggacagaggagggtgcagtcaggcgacaggcttatcaggactccctgcctcaatccctggggattgtccaggcaaaacctggagggcagcgggcaagctgttggatggaacagagagaccctcgcagctgactagggcccaaggggacggacactcaagaagatgtaaaattgggaggggtggtattggccattggggcaggcagggccgggaagggaagtagcaccggccgcagccccaagccagtggcttttccacaagggcctatcctgcagccggcccgctccggcttcctccactgctgaagaccctgctgtagagctgaagctgaacatgtgtttgctaaataaagattcccattcctagcgcaaaccctctc

SEQ ID NO: 274141 - DNA, 437 bp, Homo sapiens
ccttggcctcccaaagtgctgggtttacaggtgtgagcctgtaaccggcctacagtggttccatttaggaagtggaattgagcagggcagaaggatagagaagaggaacaccttcctatttcattttatgccttgctggaccatgttttggttttttgttttgttttgttttttgtttgtttgttttttaccatgtgcatatattttacaaaaaaaaaaattataaagaaaatatataggaaggtgttgtgaaacaaataacatgcacataaaaggtgatactattaaggggtcaggaatctctctctaaatctgtgatttcaatgaataaaatgaaggtgactgaggcaagatcctgcatttccagagtgacttggtgtctggcctggagagcagacattgacaaggaaagaaatgtggccacaggaggggctgtg

SEQ ID NO: 274142 - DNA, 433 bp, Homo sapiens
accctagcagcgggcatgagctaggtgcttggccatgactgaggctggctgattggccaactgagacttactcaactttgaggcctgggctcctgaagagacaggagaaaacatctaagccagtggttttcaatttttaaaaaaacctgcagtgttctttcttcaaaggacattttacatgaagctcaagatattagcagatgaaagcaaagctactctggctgaagctgggtttggggcccagagccctgcctgcttgctccacccctgcccaaacaaagccatctctgagataccttcaaggaacctgatggcttcccagagcccagtctgagaaccacggatgaggaaaccaagatccagagcggggaaatgactaacccaaggtcacactgcaactagaactgaaaattgagtggcttttccagactcc

SEQ ID NO: 274143 - DNA, 462 bp, Homo sapiens
agttttgaattttatcaaaagattagtagtcacacacaaaccacagataactttggctaattaatatagagtcaaaaatacttctataaaacaagctatttcaatcaaacatgatgtttaatatgattaaggagggctcattccactgtgaaaagacaacttagcattaagaaccacatagccaggcacggtggctcacaagtgtaatcccagcactttgggaggctaaggtaggaggatcgcttgagcccaggacttcgagaccagtgtggtcaacatggtgaaaacctccctctataaaatttacaagaactagccaggtgtggtggtgcatgcctgtagtcccagctacttgggaggttgaggtgggaggatcacttgtgcccagaagattgaggctgcagtgagccgtgatcatgccacacacttccagcctgggcaatggagcaagaccttgtttca

SEQ ID NO: 274144 - DNA, 162 bp, Homo sapiens
caccagagggaagtgaggggacacaagagggtgatgaagggacaccagagggtgatgagggggcaccagagggcagtgaggggacaccacagagtaatgagtggacaccacagggcagtaaggggacaccagatggtggtgaagggacaccagggggaagtg

SEQ ID NO: 274145 - DNA, 761 bp, Homo sapiens
tgcctcaaatccttctcctgtagaggaagaggggtgtaaatacgaggtaaatatgtaaagaaaagcatgaaccaatgacctcagtaatggttccagagaccaggactccctattctgggggtgaggataaaagtttccatgtctgatttacccttgctcagggatgaacccatttgagcccccaaattgaagcctttggatttccctatgacatgtgaattgtatttatgtaggtattctgatgaaattgcacttccctcaaaaagatgaaacttaaatgaaagaggatgaacctggaacatgtgcagtgtgaaaatttacacagcgaaggagctaagtctcagccatgatcagtctattttgagcttcctgttaagcaccaaagtgatggaataggacaaagaaaaattgtacccataataaatagaggatgacccctgtgaaaagtaaagatagagcccatattggattagaaaaagacttgatatttccctccacctttacctccttctaagtctatccaggagtaacaaaaatgatgaacatgggatcttaagtagtcaaaaaactgtaagattaggaaaggaagctgtaattgtttagaatctactatgtgctagggattttatgtgtactgactcatgcaatagatgagatgagagcacaatgaagaatacttttctccactttacaggccaaagaagcagaggctcagcttggctcaactgcatatcagtaaatgacaggaataagattcaaac

SEQ ID NO: 274146 - DNA, 700 bp, Homo sapiens
tggacactcgagaaaatggccttagtcctgattcccctctctcttacccattctcaggcaggcacaggcggagagagggagactttcccatttgctctgattatggagaggccctttgaaagtatcactctgtcctcacaaagggctaagtttcacgttaatccaaatctaacctctctcagcctcaatttccccatctgaaatgaggaactggattagtcatctcaaggggtctttctggcctttcaaatacaaagcaaactaacagataaaatctcctttcctctatcatcagggctgggctcagttaaaactcagaatgaaaagttgtcagagaagaattataaatttctattaaaatagcaattgtaaatgattattatgtttaagtaacattgactaggtttttgattagataaatttaaagaatagaacaaaaatgttatccccaacaaccagataacccatgttggatataaatacagcaatgggtgcatggatggatggatgaatgggaactacagtgcacatatcttaaattattcaaatagtccagaaaggaatgaaatgaaatgcaaaaatctctctctccatccctcctgcaaacctgactcctcatctccccctaaagctacactttgctaacagttccatgtgtatctcaccaagaaaacaacattttttacactgataccagcgt

SEQ ID NO: 274147 - DNA, 401 bp, Homo sapiens
gagactccatctcaaaaaataaaaataaaaaaaagaaggttccaatctgactgaccccatcctgtcagcagagaacaactgaggcccagccctctacatctgcatgtttcctcatcctgcctgactcctttgatgaaggcagtttggatcttgggtgccatgatggtaaaagctaagtttgtgaactttgcgtcttgggagccaagggcaatatcctgtgtatgagcctagaggaagagaacgcacttggggaggaagagccccaaccccgctgtacatcggacagcgaacagcacacaaggcgtgggccgggatcaggagggcagttccattcctggctgtgctgattactcaccctgtggccatctctttgggggccaccataaaatgatagatttgca

SEQ ID NO: 274148 - DNA, 418 bp, Homo sapiens
ttcaggtgctgccctcagctagtccctttgaagagtgcaaggtgcccagtgttcctgatcttctagtttgaatgatgagaaagagcattctacctttccaccatcacttaagtgtcctttgaaattgaatttgcatgcacatatttactgctcattctttttaagtgagtaggtgtgctgagcttcaagtctattttgagactcagcccatgttaaccccttgaggcccacttcatgataggtactgccctgtgggaatcctgtcatttagtgaagcatgaagccataatagatccacagccataccaccattggggcatctcatttcgattaattccctgaagcctttggtgctgtggtttgcagaaatcaaatggcgcaaatgagaactacaaaattaggcaggttaaatttcgca

SEQ ID NO: 274149 - DNA, 343 bp, Homo sapiens
ggccgggtgcagtggtgcaattgtaactcactgcagccttgcactcctgggttcaagcaatcctcctgccttagcctccccagtagctgggattataggcacatgccaaccacatccagctggttttaaaatttttcttttgtagcgatgtggtctggctacgttcactagcctagttttgaactcttggcctcaagtgatcctccccccttcacttcccagtgttgggattacaggcatgagcccctgctcctggccaaaattactttttaaaaagtcatcaatgttttgccgatcttttaaagtatactgatcatgagtaactactcttaaagataatttc

SEQ ID NO: 274150 - DNA, 525 bp, Homo sapiens
catagtggctcatgtccgtaattccagcacttagggaggctgaggtgggtggatagctggaacccaggaatttgagatcagcctggacaacatggcaacaccccatctctacaaaaaatttaagaactagccaggcatggtgcacacttgtagtcccagttactggggaggcttaggtgggaggatgggttgagcacgggaggtcgaggctgcagtgtgctgtgattgcaccactgcactccagcctgagcggcagggtgagaccctgtctcaaaaaattaaaaaatcatgtgtattagtgaagatttgtaaagtagaaaataatagaaataaaattgaaatcaccagtaatcccaccattttgcgataactagtattaaatataggtatatttccctctgattattttccatgtatatttttatcatcattgagatgtacatagtttttcttaatcctgcttttttcattaactacatcattgttaatttttcttaataaatatttttgaaaacttaatttcta

SEQ ID NO: 274151 - DNA, 202 bp, Homo sapiens
ttcttctgcacagaatttgctccgtggtgagcctggagatgtctctggatggggacagctccattcccagctacttctgcggggctggtggcgcagagatgggcgcaaaggctgaaagtcgcaagtcctgtgcttctggagttcaaatgcttcctttccagcgggtctccttgcgccatggggccgtgctggggtgaatctg

SEQ ID NO: 274152 - DNA, 480 bp, Homo sapiens
acattctaatcaacgtttattataaagctgtggtatacatgaatgagtctctggtataaggagatacgaatatatccaatgaataaaaataaaagccagaaatagaccctttagaagggaatctggcttaccaaagaagggaaatttccaagcagtaggtaaatactggattattcaactaataatgctgagacaactgaccatcatatggaaaacaatcaaattagatctttagggtaggaaacgattccctaagacttcaaaagaccaaactataaaagattggtaaatttgggccaggtgcggcggctcacgcctgtaatcccagcactttgggaggccgaggccggcggatcacaaagtcaggaaatcgagaccatcctggctaacacagtgaaactccatctctactaaaaatacaaaaaattagccgggcatggcagcatgcgcctgtagtcccagctcctcgggaggctgagg

SEQ ID NO: 274153 - DNA, 357 bp, Homo sapiens
aataagtccctggaacagtggctgacaaagaaggggcaacgaaaggctaagacaaaatctactaaagccatgtatcagaatgatggagcagggccaggtgatgtggcttatgcctataatcccagcactttgggagatgaaggcaggtggatcacctgaggtcaggagtttgagaccagtttggccaaatagtgaaactcttgtctactaaaaatataaaaactggccaggtgtggtggtatttgcctgtagtcccggatacttatgaggctgagctagaagaactgcttcaacccaggagacagaggttgcagcgagccgagattgtgcaacagagtgagactctgtctcaaaaaa

SEQ ID NO: 274154 - DNA, 620 bp, Homo sapiens
agctgtgggatctgggacaagtgagtcatctttctcagcctcaacctccttatctacaaaataaaggtgctagcctggaatgtcactcaatgatcactgtgcttctatctgggaaaaatacatctgtgattcagtacatctatgcagataggcccaagagattcatctttcatactcatgttcccctaaaggataatgaaaacctgactggccttaggtgacatccatgtgcaaccgtgcttgtgaaggcagcagctgagctgtgggtccctgctgcagagtaaagtgctattgttaagtgaggtaagctccacatggggtcgtgttttcatctgtgctctggaaaaggcgaagggtagagaagatggaggcttatacatatgtggccttcccacataaccccataaaggtatggactgggttagagcagtgtgcctttgaatacaagccatgaggaaacacctgatgtcatcttgttctaataatttccaggctcaaagagactcttccagatagcacagtgtaccccaccattccagatgggagggtgcttggacctcatgggtccatgtttatgatatggatgatgattgcagccttctggtagccagcaagtgagt

SEQ ID NO: 274155 - DNA, 266 bp, Homo sapiens
ttctctgccatttactagctttgcaactgtagacaagttatttactctctcagtgtcagtgaaatctgaggatttgatgtagttccacatggaaagcaagcaataaatggtagcggcggcctctggaaagattttcatccctgttaatcctctcataagatagttaagtactgttatcattcctatttcacagatgaggaaactgaggctcagggagagtgggtaagtgttctgcttcccccaacacatggctgcaggagtcgtgg

SEQ ID NO: 274156 - DNA, 583 bp, Homo sapiens
aggcctctgggcctgtgatgggaggggctgccacaatgctctctgaagtgccttcaaagccttctccccattgtcctatcagcacttggctcatcttatgcaaatttctgcatctagcttaaattcattcccaggaaagaggttctttttttgtaccacaaggccaggctgcaaattttccagttttacactctgcttcccttttaaatgtaagttccagtttcaggtcattacattgctcatgcatgtgagcacaggctgtttgaagcagttaggtcaccttgaatattttgttggttagaaattttttctgccagataccctaaatcatcactctcaagttcaaggtcccacagatccttagctctttgctaacacataacaaaagtgacattttctccagttgccaatatattcttcatctctgtctgagacctgggcctcattgtccatatgagtattttggtcacaaccattcagtaagtctctaggaagttcaaactttccctcatctttgtcctcttctgagctctctgtactcctccaacctctgcttattacccgattccaaggttgattccac

SEQ ID NO: 274157 - DNA, 215 bp, Homo sapiens
gcgaagtttgcagtgagccaagatcatgccactgcactccagcctgggtgacagagcgagactctgtctagaaaaaagaaaaaagaaaagaaaagaaaagtaaggcacttagagggtaagtggcttcactcggtactaagtaggggagtgtggatttgagccaagctgtgggttcaaaccacatcaacacctgctatgcctgactgcgtctccac

SEQ ID NO: 274158 - DNA, 388 bp, Homo sapiens
atattattagttacttttggtcaggaactttgattggtctgtattcttcagattaaaccacaaccttgtgaagtggtaatcctgattttctagagtagcagaaggtgttttctatctcctacaaagtcgaaggctgacatgaatcatcttttgttgtaaaaggctattccggtgctttgcaaacttgatggctcccagctcatacagcagaggcaaccccatttccagtatcatttgtgatcacttacaaacagcaaaggttcaagtaagcatatgggttcacaggtgtctgcacattggttcttgaatcgtaacaggcccaagcttctctttacaggtttatgttgctagacttgctactctgtggcattcaagagcatggtacttc

SEQ ID NO: 274159 - DNA, 784 bp, Homo sapiens
ttttttttttttaagtagagacgaggtttctccatgttggtcagactggcctcaaactcccgacttcaggtagtccgcctgcctcggcctcccaaagtgctgggattacaggcatgagccactgcatccagccagttgtagaattttatatttccaccaaagtgcacaaggattccaatttctccacatcctcaccaacactttttattttctgttttcttcatagtagccaggctagtgggtgtgaggtgacatctcattgtagttttgatttgcatttgtgacacatctgttcatgtgcttattgtccatgtgtgtgtcttctttgggaaaatgtctgtatgagttccttgaccattttttaattagggtgtttggttttatcgtcgagttttaggagttcctctgtgtattctgggtctcatgtcttgtcagagattacagacaagacatgtctgtacctttgtgtcatatccaagaaatcattgacaattccagtgtctcgcttttagcctgtgttttcttctaacagttttaagttttaggttttacatttagatcatgatccattgtaggttgataattgtatatggcatttatttctggattctgttttattcccttctgtatgtctgtctcgcatgccagtaccagactgtttctgttactgtaactttgtagtaagttttggaatcaggaagtgttagcccgccacctttgtttttctttttcattaccattttggctttcagggtaccgtgaaattctatgtgacttttaggat

SEQ ID NO: 274160 - DNA, 273 bp, Homo sapiens
tgaacccaggaggcagagcttgcagtgaactgacattgtgccactgcactccagcctgggtgacagagtgagattctgtctcaaaaaagaaaaaagaaaagaaaaatgagatgtctcttgacctcatcacacagcctttccccgaagcttgttcagcgccgtccccactgtggcttgagctcacttcccaggaaagaggtttctgcagacaaagctactgccacagcctggagatgcttgcttttgacttgcttgtcatcagctccgtggggc

SEQ ID NO: 274161 - DNA, 211 bp, Homo sapiens
cctgcctgtcccacaactttacatggtgatagttctgtacaagatagtttcattggaaattaattaagtcttcaagaagacaagatagtgcttataaggagacatcatcagaccaccctatttgacacaggcacaaacaccatcaccactgtacactccctaaaaagcagctgctcaaattcacacacacacaccccctcttacctacccc

SEQ ID NO: 274162 - DNA, 561 bp, Homo sapiens
aagttttagactttagaacatttcagatttcagatttttggattacgaatgctcaaccggttaagtacaatacaaatatttcaaaattcaagatcagaaacactctggtctcaagctttcagataaggaatattcaacctgtaatactttctttctcacatctagtgtcaatgtcacccactaaggaagctccatcatatactccccgtggggaggcaaggagaaaaagagctgtaagagcactatgagtccaccagcacatgtcacttgggttcctccagaaggcatccctgacctaagaacttgggtgcaagcagcttatttgtgggaaggaaatcccaggaagcacacttgaggggatcagtgaaagtgagatggggagaaaagccaactggaggttcctcactgctgtgagcacctgcagttcagtccttcagggcatgcctcagaactctcccacagaggagaaagatgaggtatctctccacttccttgttaagggttactcctggggccattacattaaaaactcttaacacttcttggctgccagcatggggc

SEQ ID NO: 274163 - DNA, 414 bp, Homo sapiens
taccaaaacgatgcctcagtctaggaagaggtgcttcctctctggaagcagctgaacacctgagctgctgtccacaggcggacggactctccaggagcccccagtgggcctcggctcctccacgtcagctcctctcttgtccctctgctggtccacgggggccgctgcagctggccaggtctcctgggagtcggagggggccatgggttccaccccagggcccacctcatcagcacagtgctctcaccatctgagcaccagcccagaggaaaaggagaaagaatgggtgatgctgatcccccaagcagaatggtaacccctccacctcccaccctcagtgcccagggcccgttgttgggtgcttttgagggtgggaggtggaggggtttccattttgatgttggagcggccgca

SEQ ID NO: 274164 - DNA, 580 bp, Homo sapiens
aaagcacccaacaacgggccctgggcactgagggcctcacgggcagctgtttgcatcacagtgaaatctacaaagttcccatggcacgtgagtggacgcttcctccacacgggaatgtccggctgccccaaggaaggctgcaataatgttgagatctttgaataggagcaagggatcaaggccgatggcctctctgagggcctcagtttccatccatgtgggcaagctcccctttgggaatctgggttatggttcccgagatggggacaagaggcatccgctgacggctatatttacaaaaatccatcaagtcgacacgcttgtgagagtcaaagcagtacagtaactcactggaaaagtgaaaaattctcaccttcacacccacagagataacgggggcggcgtgggggcaagccgaacgcatgcgtgtgctctgtgcactcaccgccgccctctccgcggctgtctggctcctgatttgcatagtgagaggcagacaccaggcttgaatcaggaggggcagcgccttgtcccagtgagtttgggtcttgagacagtgagtagcaagggtgtagaaagg

SEQ ID NO: 274165 - DNA, 455 bp, Homo sapiens
ctcccccactccccttatggatgaatgtttacccaccttaaatcttcaagccagcctcaaatgccacttcctccggcctcgagtccattcggaaccaacctacccttcagctgagcatttggaattttccaaaattctctctttcctccttcagaggagtctgcctcactcagtgtgcagcctagcttgttcatctattctctccattgtttatttagcaaagtgtctttgctatcaagagcccaatgaatatggctaagtgtccgtttgattttaaagagattaggggcagaatgtttcggtcacttatctgtttggttaacctcatatttttcacagttagttcctccaaaaaaatagattcaatccttccaactgtaatgtgaactcattttctcttaaccctatgttctctactcttaaaccaaagtgaattaattttaaaaaatcacaaa

SEQ ID NO: 274166 - DNA, 571 bp, Homo sapiens
tatttttattttttttgaaataataaattgtcctttgaaaatattccattttattttcaaaagataaagtatccttcaggtgatgagaactattcttggggaaaactttgtgtttgcatttctagaaatgaactctcagacttaactcatagttaatacaaaacccaaaatgaacttgggcttattgatttgctttggatgtttattttgattgtagcatcacatttgaaatccaattgtaagcatcacctctaatcaaagctcttttagtatgtgtgacaaatgcattttaacaaaattgtacccatgttttatttggtgaaatattattttgcttaggaattaacactgtaattctgtttcacagtttatccatgtaatttcagtttttacatgtcttgcagtttctttcatcctagagtagcttttgagtttattagctggtttcacttagtcttgtttataggcctatcactatagcttctaagtgcttctcagattatgttcccttttatgtctatcaaactgtgtttccacataaataaaaactcttcaattgctggaattcttt

SEQ ID NO: 274167 - DNA, 179 bp, Homo sapiens
taatagtttattgctgggaaaaggtctgggtaaaaaaaaaaagtttagaacacactaaggcttggggcatcagtcatcatttactgatccctcctcactaaccttttcctgcctcttgtttacaaacaccaaatggcttcagggtttagggagcagcttttcccttctgtcgtcttctc

SEQ ID NO: 274168 - DNA, 505 bp, Homo sapiens
tcattacagggagggctttattcagctacatgaatagacaaggggttgagcgaatgagggatgaaaggcgacatttggggcctgttttctccctccttcccatcttcccattctggagcctggctttgtgacgggggctgccgaggaaccctccccgcggacagggctgggagacagacagagagcatcttccagctacggcctccccaggcttaaatttccaaccggtagatgacctgcagtcagatgtcttgaggctactggattctccccagggtggcaggcctggccctcgggcatgaaggtggggttgtgtccagccctgccctgccttcccccttgtgtccagggaacagccaagccaagggaggccaggggcacagggtggactcaccccaggtgttggtcccgtgcctcggtgctcctgagaagcccagcagagctgcggattgtggcatcttcacgcacttacgggtgaggaacggagccgctggtcccagccccg

SEQ ID NO: 274169 - DNA, 385 bp, Homo sapiens
cttccctactgtccatggagtggagtgagaggcctcgctccatgttagaggtgaccggccagggggctctggggatcagcacaggctgatgcagtctgatgaaccaggtgcttctgcaggtctcaaccctcccattgctgcttaatgctggtaatttctgctgcttcacctatttccactttgctcatttgacactatctaataagcacctgcatgggacgattcatgccactgcttatctactcattcaggagcttctgccagtggcagtggcctagttagaaaagacaaacatggtgttccatgcccgggtgacttcaggatatcccttgtttcagcgacctcaacaattcattgtaataataaaagctttggtccttgaagc

SEQ ID NO: 274170 - DNA, 302 bp, Homo sapiens
ttcatcatatccacttatgatttttacaatagttattatagtagtattctcttttttattcctgatatttgttatttgtacttccttgtgctcttttttcctttttgtcttgtcagggcttatcaatgttataaatcattttagagaatcaatatttgaccttgttaattctctatttttatgttgattttttatttcactgacttctgcttttatgtttattttcttgtttctttggggtttaacttgctgttcttttcctaacttcttgaaatgaaaaattcctaacttcctggaagctt

SEQ ID NO: 274171 - DNA, 280 bp, Homo sapiens
gcgggtatgggccctggattagggaattttaggggtagggagtggatcttgcccaaaattttagtatttaccttttaaactcaggctgcctcatttctgaataaactcaatgtattgtgtaacttaaaaaattggttaggaaattttattttttataacttctacagaattatattttaagaaacttagatttcgataggtaaggtgctagatatcagcacttaaccagcaaattctgattctgccacctaatagatgtaaactcaactttgtaaattcc

SEQ ID NO: 274172 - DNA, 309 bp, Homo sapiens
gtgtttaacgaaccctatcatgtggtactataatattggtttacatcccttttggactatgattgcattaacgtatgttttccaggggtggatatttttgaaaggtggctgtttattaatgttttgtcattttcttcataaagctcagtaatgtgctgtagctggctgatttaatccataaggcactttcatattctgttgcaggttttaaacagaagtcaaattgctttgttacgtttaggtatagaacaaaggcattatgtcatcctacatgtgtatattaatatatcccactgagctcaagtagtt

SEQ ID NO: 274173 - DNA, 485 bp, Homo sapiens
tagtttctatcctgccccaaaacacagactgtcactggcaccaccatgttgtggttttttccatgaatgaaaatataagagttctgtatgtaaatcatctttattgtgaactttatttctataataaagtcacacaaactatctttagtggaagttggatgaaataccggaaaagaagaatgtagagatagatgatagatatgtaggatatctctatccatctgccacccatctatctatcaagaaaggacttgagtaaagcactggctataaacgactgtaccttttgatcacaggaccttacaaataataggcacactagttatttgtttatttgatttgaataggatgactcatttgttactgttcatatgaagtttataaacttcattgagttgtttactgaaagtggactacaccatgacgaaaacagtatttggcaacacatatttgcatcttttaaaataaaattacacttatttgta

SEQ ID NO: 274174 - DNA, 485 bp, Homo sapiens
ttaattgtgcatgaacatttaattaatcttggtcttgtaaattaggtcacaggtgcacccaaaacaagccaaaatactagttaaaccagttctcagagggctcttcgggtgtatattcctgacagagcagtttggggatacttgatgcagacataagtaggtcagacagtggagaagaacaggcgcatatttatcacagggttattggacctctactgagataatttgttattgagaattgtactggtttctgtttagtgctgattctatcctgttcaaacaaggaaagtataaacttcaaaattgcattatatacatttattcattaaggactaattctcaaactttgaacatcagagaggcagtctcttccaggtgcaaccctcatgactatactatagctgattttggaccccattctcccaaattacttcttatgtaattattatcattataataaatgtgcacaatacattattttataa

SEQ ID NO: 274175 - DNA, 538 bp, Homo sapiens
gaaataacaactacaaaaagtatttgggggggtgatggagcatcaggtactcactcaaatggttgagagcaaaaagttatttgtactgtactttttcttaactttgtgaatattttgaaataaaagtacgtatgccatttggagaaaaagaagatagcatagtggtggttttttatgtctggaatatccatgtctgtctattccagtgtctggaatatccatgtctatctatccactggaatatccagtgtctcagttgagggtacttaaaagggaaaaacctcccacacttgattttctttgaagagtttacaaagatttgtaatttcagcctgggcaacatggtgagatcttgtctctatatgaaataaaaaaaatttaaaattagctggatgtagtgatatgtgcctgtggtcctagcccttaggaggctgaagcaggaggattgcttgagcacagaagttcaaggctgcagtgagccatgatgtctctcttgtattccagcctgggtgacagagcaagaccctgactcaaaaaa

SEQ ID NO: 274176 - DNA, 361 bp, Homo sapiens
tttttttttttacctgcttcaagttttaccatgttttaataataaccagttgtactacccaggtatgacattaaaattctaccagctcctctctcacctatgctatcctgagtaacatggatctaagtatgcttgcatcaagatgaatctcctagtctccactcattctagactgtcactcctaaaccctactaactgaaattccttagtttatgcctctaactcacctcttggttcctccattcaaggacttatctcccagccatcaaaatccacataatgtaattcatttgtagagaaaatgactgtggagtttgagaactgtttcatagatgaatgacattaattaaggatatcatct

SEQ ID NO: 274177 - DNA, 175 bp, Homo sapiens
cattttcgcctattatgcaaagtgccttcttcctagataatgctatagaatgttgttaaatattgcctctccaatttctctaagattttagtcataccctctttaattcattggatctcttctgtcaccaactgccttgtttattaaattatctcctcaaaaggattcttttaat

SEQ ID NO: 274178 - DNA, 218 bp, Homo sapiens
gtagaatttggcaatatctaacaaagccacacgtttattttttgacataagaatcacacttttaggaagttgttctgaggatatagcttcaataatatgaaaatacatgtgaacaagattgttctttgcagcactatttagaattgcagtccaaatgccaaacatgagaaagtaattaaaccatggtacagccaagcagtggggtactatgcagcggt

SEQ ID NO: 274179 - DNA, 889 bp, Homo sapiens
ggttgtgtttatatgtcacttctcatgtgactgtgatgactttaataaggatgtgctgcttaagtgtaaaggcccccttgctggcctttatggtattatagtattggtggcttgtctgttttattttccaagcactttataaactattcccaattttctcaggactatccttgtttcacaagtagggaaatcaaggcactaccacatacaatgatgaaatgagccacagagtatgtctgggctggttcccaggcctgtgcttgcaacacaggcctttatggtgctcttgtaagctgtttggctaatgggggctcacatgaatgcttcccatttcacagtgaggttttatgcttccatgtgagcttaaacccaaggattccaatggcgtctacatgtaaagaagctagccacacccccagcagggagagtatgggtgtaaattgtgcaggtggcagttaattggagtagcatatttctgctgggaagttaactgtataagaatctaaaaagaaacgttgtttatgttcccttttcttttcccagttttttagtttaagacagtcagtctgtcctgagcagttacttttttcttagataattgctggcttttaccctttctttttctgaatccttcatgctccatttaagagcttgtggaaacctgtgcttcagttgacaatctgtaaagctctgctcttctggtggaagctcatgacctgagaaccttttgagtggtctcttttgagaaactcctgtctagtggaaatatggtggaatttattaaaattttcaattcgaattataaatttaggttgacagaatccttgctcttgtgaaagaagtgagctgagactgggagtatccaaatgcaagaagtgctcagaatcct

SEQ ID NO: 274180 - DNA, 606 bp, Homo sapiens
tgtagagaggaggttttgccatgttgtccaggctggtctcaaactcctgagctcaagcgatccttgtgcctcagcctcccaaagtgctggcattataggcgtgagccatagctcccagccatatagatttatatgtatatatataaaatcaatttttgatcataaagctgctttctagattatatgtcaaattgttagatcacataacaaattgtcccataaattgaatcagctaaatctgcagctctaatattttgaggaaaacacatcatgtcacataatattactttgtcaaaggtataatgaagttaacagtgttttgtcttctcaaccccttctgtgtataacaggttaagcaaagtgccactaagtgaaacagtagcaggtgtaattaacttgaaaagttatggcgaagtctttggcatgtacccaagaaattgagaaaaagagtgacttttatgatctgaatcacaactctttttgtaagccatatagttttccattatttgctttcaggaaatctaattcattctttagctgaaagatgattaaaaataatatttgaccagcctgagcaatatagtgacaccctgtctctacaaaaaa

SEQ ID NO: 274181 - DNA, 359 bp, Homo sapiens
tctgtcccctaggctggggtgtcccttcccaaagtgctgggcttacaggctgagccactgtgcctggcctgcataacacttttaaacatgcttttctcctctgccttccatggtagtatgcctccctgttgcctccgaaacatcctttttcctgtttcctatcagctctgtttctttgtcccctcccttaaatgttgtttcttatctccttggttctcttttttttttccttcccccttgatctattttgtaaattatatttgcaaatgatgcatgtaaatagttttaaaaaattaaatagtttttcagggtttatcataaaaatagtgaatccctgtcctgtcccgttcctccccatc

SEQ ID NO: 274182 - DNA, 1796 bp, Homo sapiens
  misc_feature (3)..(3): n is a, c, g, or t
  misc_feature (326)..(326): n is a, c, g, or t
  misc_feature (1137)..(1137): n is a, c, g, or t
  misc_feature (1175)..(1175): n is a, c, g, or t
  misc_feature (1250)..(1250): n is a, c, g, or t
  misc_feature (1279)..(1279): n is a, c, g, or t
  misc_feature (1289)..(1289): n is a, c, g, or t
ggncactcttctccaacctctcactctgttgttctctcatctgccagaaagcacaccactcttggacaaagaaaaactgatgacccttcagtgctggagttttccaggcaggaaggacagggaggttcagagaatcccaacgtttgaagggagtgtgaagatcaggtggtccgatcccatgatgcatgaaaacctctataatattaggataagggcttcagttctctgccgggtttccagaacagattcaattacccaaaatggaggcaaggctcccaaagtattttaacaacagataaccagaaccagagaccccactcattgcnctagaaaatcccctcctgtcttcattaagctctttgaggctgtccacccaaagcattgggtctgattggggactgtcttttagccatgcttactggatccccaggagaggaaaactatttggatataaaaaattatttcagctgatttggacaagattatcgctttcttttcccaccaactccccccatctcccccacccctgccaactcttcacctcatctcacgagactggagagctcctggagtgatcttgtcccaccttccccagggcttccccacctcatctacctgctgaatgggtaggtaaaagatctctaaacttacagattcacagcaccaacatgaggttgcatgggggcaggccatgatgagagaagaagaagggtttggggacccatattctggcagtttttctaccatcaccccaaactacaagcaacagctcttggctgtacaaatgagagtgtctatgttgaacataaatatgcaatcattaaagatgtgtcagtttggagagaaagggactttagaggaggctgtgtctcaaactcttttcctatctcacccatcttccactctccctctcccagtctctgccctccccaacactttctcccatctttatctcctctcatacaacactgatgaattctatcagccatgacagtcttgtcctgctgcactttaaaatggcagatcttaaatcatctttccagtttcttccataattgacatagtcaagttttctgcttcatcttgagtcaagcttgagcatttgctaagatataatcaattttctttagctttaantgtttgtggccatagagttacttataatgttctcatanaacaatttcagtctctcctgtatgcatggttttatccccttctcatttctactcttacataattttgttatctcntttctttaatcaggtttgcaaggagttcnttaattttantgactttttcaaagaagcgattttggatttatttgtcctttctacttgttttggtttgttttctattgatttatttttcctgttttcttaaggtttaaatgttattttctaatgttttaaaattgatgtagaattccttcattttaggtctttctaacaacaaagccatttacagctattaattttctcctgagtacagctttagctggatactataggttttagaataaaggagtctacatttatcatttttaaaatagtttgtaattttaatttttattcctctttggttgtttgaggattatttaataatgggtttcttaatttctagcatttaggaatcttgatttttttaactttgtatatctagttttattggattatgagcagaaaacatggcctgtaaaaatctttattttaaaattgtgtgaatttttcttcattgtcaagtacctgattgattttggacatataaaattaaattttactttgaaagaaatacatatt

SEQ ID NO: 274183 - DNA, 377 bp, Homo sapiens
ggcttgcctctacttcagctcgggttctggcaacacctctgtcaggagctgtcggctagagccaagttagtctactccgtgtgtttggaagacaaggtgcctgttgttacctctgcttgcccacttgcaaccttaccctactaccctgttgcttaggcctggtctaaattttgaagcactataaagcctgattgttaaagagtccactctctgggctgggcgcggtggctcatgcctgtcatcccagcactttgggaggtcaaggtgggtggatcacttgaggccaggagttcgagaccagcctggccaacatggtgagaccccatctctctacaaaaaactagccaggcatggtggtgcacacctgcaatcctagc

SEQ ID NO: 274184 - DNA, 335 bp, Homo sapiens
cagctgctccagacaaacctttctgcctccaaatagcacaatcattacagcctggcagatggggccttcgctttcacttcagacgctccccttgccttcaggaaaccagtttcctcacggatatgagctacccaacgcttgccacaaactttcctgttaacagattcgttttgacagtggtctaaactacaaatgttctggaaccacatccaaagagcctctgaagtgtggttcaatctgtatgctacctctcagggccattttagaatagaattggctggggactgaacagcactgcatcagaaggagaaataaacctggatctaaagtcaaag

SEQ ID NO: 274185 - DNA, 428 bp, Homo sapiens
agctacttgggaggctgaggcaggagaatggcgtgaacccgggaggtggagcttgcagtgagccaagatcatgccactgcactccagcctgggcgatagagcgagactccgtctcaaaaaaaaaaaaaaaagaaaaaaagaggcaagaatgggtgagataaaataattttttgaatttggtaacttgattaggttaggagtctagggagaggggaggaatttttttttttttttttaagtgtaagcaacaggccaggtacggtggttcatgcttgtaatcccagcactttgggaaaccgaggtgggcagattacttgagatcaggcgttccagaccagcctggccaacatggttaaaccctgtcgctactaaaaatacaaaaaaaaattagcaaggcatggtgggtgcttgtacccagctgttcagga

SEQ ID NO: 274186 - DNA, 295 bp, Homo sapiens
gcaccctgcccctcatcatcctgtgcctcctggagatgactacctactactcagagtgcatgagctccctcatcatcaccaaggacgccctgatcagcatcctgggctttgtgggatttttggtggggaccttctaggccctccatgagctgatccagcctcaagacctctcctctttccaaactccactggcaccttgaaacagtgaccaattttcaactcaacatttcccgcttcacttcctaaactgacattctagcattgtttgaacaaagatccttctttaattgctaat

SEQ ID NO: 274187 - DNA, 188 bp, Homo sapiens
cccccttccaacagatcccattttactcattaattctccttgtctcttctcaccactagaaggtgagcaccacaagggcagggaccttttgctggttttgttcactgatgtttctcgtacctagaatcagcactgatgatatggatctagtacctagaatcagcactgatgatatggatctagtacct

SEQ ID NO: 274188 - DNA, 493 bp, Homo sapiens
tgagccgaggggagtgtgagtgccagctagctgctgtaacttaagtctcatttgcccaccattgtgactgttaaaaaggaatgataaagttgttactggttggtttttcgcggtttggggcggtggtggctctccctcactgcaaaatgaatgaatacttttcgggtcaaggttagcgtgaaaatgacagcccccttaggctgccccctttggcactgagctctagggacacagggaaataattccagcctgttatctgcctgtgaaaagttcttgcttggaaatctcactttgatgtgtgtgtctgagccgggtgctcagtccggctattgtttgcgagatggagccagacctgccggtggcatcttgtttactttcgtctccggctgctcagtaggggatggagatttgaaatagtcgccaagcctctgccacggagcctgtgctccccgttgattgcaaagggtaatgattaaacaggtcatttgaaaac

SEQ ID NO: 274189 - DNA, 252 bp, Homo sapiens
ggaggagctgggacccatcatgaggatggggacactagagaggctgtcactcaggctccctggctcactcactcacactctgcctcagtcgcaggttggagaggccactccctcccctgtaatgtcgccagccctcagccctccgccctcaccctcatccctccgccctcaccctcatccagggtcctcaagaagactcataataagaataagataagataacctcagtggtgtgccgggcatgaggctagg

SEQ ID NO: 274190 - DNA, 1371 bp, Homo sapiens
gtaatcctttggccttggcctcccaaagtcctgggattacagatgtgagctaccacgcccagagcatgttggttatttttataaaatcttaatgttgtatatatatatataaaattttcatttgaaaactatgtacaaggtagaccaatggattttaatgaaacattgcaattttttgtgcttttagctttcatattacaaccaacctttaggaaacaactacggtcctctgtcatttaatgacagggatatgttctgagaaatacatctctaggtgatttttttttttttttttaaatggagtctcattcttttgcccaggcggaggttgcagcgagctatcacaccactacactccagcctggcgacagagtgagacttcgtctaaaaaaaaaataagtaggaataaattaacgtacataaaaagcataacatactaaacacaaaccagtaacagtcatttatcattgtcaagtattatgtactgtatatatttttaagtcagatttgtaaaaatataaaactgccctccagcctgggcgagagagtgagactctgtctcaaaaaaataaaaatgtgtatctctgtcattgggattcctataagcttgtgcctagacaggatagttattttatctttaagaccctgttaaagcctgcctgaggtcttatctgcattcccctgtgggctgactcagcacctggttgccttgtattctcctgattatgaatctttcaacctctaggacatggaccattaacgtttagtatacttggctgtagctactttaagcttagatatctgccttcgaatattctaccttttttaaaataaaatataaatgtctagtgattctttcgttgttgtttttattttttggagacacggtcttgctgtgccacccagactcgagtgcaatggtgtggtcacagctcactgcagccttgaccttctgggctcaagtgatcctcccacctcagcctcctgagtagctgggactgcaggcgtgcaccaccatccttggataattttttattttttagagaaatgaggtctccctgtgttgcccagtctggtcaggctcaagcaatcctcccatgtcagcttcccaaagtgctggattacaagtataagccaccatgcctggctgtatcctgctttctgttataatagagtggattttggtcatcttgatagcccacacaacgttggtccgtttctttgatgatattatgctaattggacctgacaagcagaaaataataaacatcctacaagacttaataaaacacatgcatgacgggatgggaaggaaatcttgaataaaaattcatgattgaccacattcgtaaggtttttagggtctgattg

SEQ ID NO: 274191 - DNA, 946 bp, Homo sapiens
ggaaaacattaaccttggcttccacgtagtcaggatcatcagtatcacttgtcttcctcctctacatcttgccccattggaaggtcaccaagggcagtaacacgcatggagctgtcatctcctgtgataacagtgccttctggaacacctgaaggacctggctgaggctgttttatagtttttgttttgttttgtttttgagacggagccccgctttgtcgcacaggctggagtgcagtggcgcagtcttggcttgccgcaacctatgcctcccaggttcaggcaattctcctgcttcagcctcccgagtagctgggacaacaggtgtgagccaccgcacccaagcctattttttaatttatttaaatttaaaaatattttttagttttttaaaaagtaggaagctgggcacagtggctcacgcctgtaatcccaacactttgagaggccgaggcaggcgaatcacgaggtcaggagattgagaccattctggccaacatggtgaaaccccatctctactaaaagtacaaaaaattagctgggcatggtggtgtatgcctgtagtcccagctactcgggaggctgaggtagaaggatcgcttgagcccaggaggcggaggttgcagcgagctatcacaccactacactccagcctggcgacagagtgagacttcgtctaaaaaaaaaataagtaggaataaattaacgtacataaaaagcataacatactaaacacaaaccagtaacagtcatttatcattgtcaagtattatgtactgtatatatttttaagtcagatttgtaaaaatataaaactgccaatcttttctcattctcctggtaagtatttttcataaacatttatttggctgggtgcagtggctcacgcctgtaatcccaacactttgggaggccgagctgggtggatcacctgaggtcggaggtt

SEQ ID NO: 274192 - DNA, 770 bp, Homo sapiens
gaggctgaggtagaaggatcgcttgagcccaggaggcggaggttgcagcgagctatcacaccactacactccagcctggcgacagagtgagacttcgtctaaaaaaaaaataagtaggaataaattaacgtacataaaaagcataacatactaaacacaaaccagtaacagtcatttatcattgtcaagtattatgtactgtatatatttttaagtcagatttgtaaaaatataaaactgccaatcttttctcattctcctggtaagtatttttcataaacatttatttggctgggtgcagtggctcacgcctgtaatcccaacactttgggaggccgagctgggtggatcacctgaggtcggaggtttgagactagcctggccaaaatggtgaaaccctgtccctactaaaaatacaaacattggtgggctcggtggctcatgcctgtaatcccagcactttgggaggccaaggctggtgaatcacgaggtcaggagttcgagaccagcctggccaacatggtgaaaccccgtctctactaaaaatacaaaaattagctgggcgtggtggcttgggcctgtagtcccagctactcaggaggcagaggttgcagtgagtcaagatcaagccactgcactccagcctgggcgacagagtgagactgtctcaaaaaaacaaacaaaaatacaaaagttaactgggtgtgatggcacgtgcctgtagtctcagctgctcaggagtctgaggcagaggttgtagtgagctgaga

SEQ ID NO: 274193 - DNA, 218 bp, Homo sapiens
agttgtatattgtaaggctgacatgtctttgattaacttgagatattttgtattatattggcttggcagctttaaggcatactgcatatttgtaatgtcatatgctaaaataatgtgactattgtgacatttactgagacaaaattatgatttcttggtcatctgagcatatggaagaccatctaataaaatatcaagtcttgtacttaaaaggaaga

SEQ ID NO: 274194 - DNA, 205 bp, Homo sapiens
aggtgtggggttttgtctccagtgacattcccagctggctcttgcagcccctgccctagtgacagcatggggtgagggggccagaggaggctggaggtggagccctgcctctaggcggaactgtaccatctgtagttgcagggcaggattaaaaagggacagttttgctgtttgtttgtttgtttttttctgtcatctgactggg

SEQ ID NO: 274195 - DNA, 363 bp, Homo sapiens
  misc_feature (39)..(39): n is a, c, g, or t
cagtcagtcctggctgaaaaaaggtttgattacccatanagatcattcttaatttctttctatgtagaaggaacagccctccattgtaatgttactcctgggaaagcaatactattactgtttggctctttatctcactattatcatggttatcgtgtgagcttcggtttccttgtttaccctgccactagctgacatggttgatgcagatttactaaagtttaatcagcagtcaccccttccttcagtggtttttggcattaatgctttgtttaccaaatctgcccagtctttagcgcccatggtgatactctctaggctaaaccagtatgaatatggaaacacaaatagcaggtaaagtaa

SEQ ID NO: 274196 - DNA, 381 bp, Homo sapiens
aatcatatgttcactgcctgaaaagaaatctccaggtttgaattagcaaataagcatgaggcagagggttcagctgtggtattttcagtgatgttgaaaaaatagtaacaataataatgacaggtgataataagatactgatttcccactttccgttgggttcaataggtgtttcccagtcactgtcacttggttggattatactcttttcatagggtgctcgagtttctctctaaatctcctagaaactctttaaaatccttctgcattaacatatgcacccattttggaactagtagcactaagtttaaaacaaatttgaatagtacctctaagaatgtcatgacttacatttgggattgctaaatttgcttagacaaa

SEQ ID NO: 274197 - DNA, 877 bp, Homo sapiens
tctcctaacgttatttctagctgtacattcccaaaaggaatgggtggaagcaaatcagattctgaaaggtttcaatgatctttcaagtttaggatgagaccaagtctcaaggagctgggatcttctttctcttgtcagttgctgaagccagtagcttcgtcaaaaacatatgaattcatataaggaagccctttagatggtacattcactaagacgtgtctgggtgtgatcctgtttgggaaaaacagaatcctaggttctaaacaagaaaagaacgcccttcccaaagggtccgcacactttctgctttgcagcggatcaagtgtccttgtgagggtgagacttccttcaagggaagggaagccattgctctctctgtagatagagcccagctggtaacgggggagccacccaactgcaggggggtgtatgttcaggtgtgaaaaacagaaaactgggtctgaacatgaagagttgcacagcagtagttcgaagaagctggcatctctttggcaaacaccaacctcagcaaatgcaactcctacacttcattcccaaggaccaggtgttgctccttaaggaactctgtatccctctctcctctccagaaccccattcctcccactggctgagcttttcctttcctttccgggtcacccatagaccctctccgtctgtaccagtgcgtctgtgttgtgagcgtgacgaagcctttcctgtgaagagctttcatgaactcattctcatactccttccccatttccacccatggtgtgactgttttgctattcaagactatctgtaaaaatgtacaaataaaagtgaaaactgaaaataaaggggagggagattgagattaaacaaatgcaatgatgta

SEQ ID NO: 274198 - DNA, 1450 bp, Homo sapiens
ctaggaggaagacagctgcctcacctggcaggtgccgtgtgggcaagtgggcctcaggatgtcctgcggagggaaggacacaagatggctgtgcaggtagaggagagtgtggaggaaggaagggttttgtgttttaagagtctggtgtattcagggccaggcaaaagccagcttggggtgagggaggaagctggtgaaaagccctgggtgctgggtacaagagtgttgctggctcaggctctgtgatcacgcagtgtctgctcgccagtgccaggccctgagcaggtgctttgacacgcgcccctctcaccatctccccgtcccctaatccctgagacaggtgctccccacttttacaaacgaggaaacaactgtgggtgatgtgggaacgtggaatttcaacccaaggcttctgactccatgcctagaaccatccgtttcattgttcaccagccatgccgcaggatcccctagaattcccagggatcccctgagatctgctggattgtcacctctgaggccgaggtctggaaatttggatggatggaaagaaccccagggagctgtgaggcatggttgggaaccatgggaagtggggacttaccttccccgccggggcaggagcctccactgtgcgggcttccagggatgaccattaaggatggcgggagggggagggagagcccggatgggagagtggctgggaggggcagggcacgcagaggtggtctccaactccagcccacagtgggacacccaggatgcctggcttacctgagtcacccccacctcccaagctgctgagtcaggggtggggcttagaatctgcatttctaacaacctcctaggtgctgctgatgcggccgccgtgggaccccactttaagaaccactggggtagagtggccttgcacagaggagtgcttggtgaacatttggtggaggatacggaaacccacgtggattccaggtgctgacttttgtgccactacagagtctagcgtacattaggaagacgatgccaaccaccaccatctattgacttactcaacgtttactgcacacctactgtgtgcaggggtcctggggaccccatagatgaaaacataagcacatgatcaaatggaaagctgggcttcgtctattacagtgggtaccatacagttttacactcgtgtacctaaaacaacctggacaaggcacgggattgattttcaattttgtaaaacagagcaaaagtgcttttactgatgtttcttttctttttcctgagatcttatgtccctagacagaactataaagcgtttttatattaaaggtctgtgcctcagactttaaaaatatctgtagaatgtgtagtaaagttatccatttcatttgtgataatggtcattttataattttattttattttatttttttgtagactagcaaaaagaaattaaagttag

SEQ ID NO: 274199 - DNA, 506 bp, Homo sapiens
gagcccaggagttcaagaccagcctgggcaacatagtgagaccccatatcgaaagaaggaaaggaaaggaaaggaaaagaaaggaaaaaggaaaggaagagtttgctaatcattaatcaagatcttaccagtcttacaaaagcctccagattgggagagatcaccaaggaataaatgagaagcagacaaagaaaaaaaaaagaccaaggactgaatcccaaggcatctaatgttaagaggtggagagagagggaaaaatgagcaaagacaactcagatgtaggagaaaaacctactggaagcctgctggaaaaagtttgtgccttcagtctcttgcctcggcacctgggtaatcttccgcccacagtgaaccaccacgcccggccaagaatccagctttcaagtttctcttgaaacatcagaggatctgatcacactgggtcttccccttacccccatctttatttaggtctaactgacaaataaaaattatatacatttacggtg

SEQ ID NO: 274200 - DNA, 231 bp, Homo sapiens
gtcacagctactcaactgtgtagtgtgaagcagccagtaagtaaataaatgggtatggctgcgttccaataaaactttacttagaaacacaagccttgggcccaattagacccacaagctgaccttgataacaagtaaaaggctgaacaattaaaagcttgatttttaggccacatcaaaatgatcaagtcagacactctggaccctttccctcagagtccccagcttggt

SEQ ID NO: 274201 - DNA, 450 bp, Homo sapiens
gtagaaagaccagtagttatgagacaatataatagacatcacagtgtacaaagagctattctcgtgttgcgtaatgaagcatataggtactgaactagcaaataaaggatcctcagtcagtaccggtgcttcctcatcatatgtaagtaatatttaagatatttttatgtttaagatgccagaagctaaataaacttttctcccttatagttttgacacatgatgaactctagcactggtgtatatgagaaggaaggcgaaagcatgacaggaaacctgccgcctgctggggaagtctggagcccctgctgagacgatttggaagtctcgttaagatcagtgacatattctttaattttaaaaaattgtaattatttaaaacagttatttaatgtattgaatgagtttaagttatataataaatgaccattgagtatttaaaaaaaaaat

SEQ ID NO: 274202 - DNA, 4938 bp, Homo sapiens
cgcgccggagcgggacacgcatgcgccggtctggacccggcacccagtaacggactcgagctcctcccaccggaagtgggcagccgcgcagcgggaagagccggccgaagcgtggcggccacagactgtgggtaccgggtccgagggactcgcgcttttctctccgtgccatggcgccagcgaaagccacgaacgtggtgcggctgctactaggctccacagcgctgtggctttcgcagctcggctccgggacggtcgccgcgtccaagtcggtgactgcccacttggccgcgaagtggcccgagaccccgctgctgctggaggcaagtgaatttatggcagaagaaagtaatgaaaaattttggcagtttttggaaactgtgcaagaattagcaatttataagcaaacagaatcagattattcttattacaacttaatcctgaagaaagctggacagtttctagacaatttacacatcaaccttttaaagtttgctttctctataagggcatactccccagctattcagatgtttcagcagattgcagctgatgagccaccaccagatggttgtaatgcatttgtggttattcataagaagcacacctgtaaaattaatgagattaaaaagctgctgaagaaagctgcttcaaggactagaccttatctatttaaaggagatcacaaatttcctacaaacaaagagaacttaccagtggtgattctctatgccgaaatgggtactagaacatttagtgcatttcacaaagtattgtctgaaaaagctcaaaatgaggaaattctgtatgttcttcgccattatattcagaaaccaagctcacggaaaatgtacttatctgggtatggtgtggagctagcaattaagagtacagaatacaaagcactggatgatacccaagttaaaactgtgactaatactactgtagaggatgagactgaaacaaatgaagttcaaggatttctctttgggaaactaaaagaaatatattcagatcttagagataatctgacagcattccaaaaatacctgattgagagtaacaaacaaatgatgcctttgaaagtctgggaactacaagatcttagttttcaagcagcttctcaaataatgtccgctccagtttatgattccattaaattaatgaaagacatttcacagaacttccccataaaagccagatctctaaccagaattgctgtaaatcaacatatgagagaagaaataaaggaaaatcaaaaggatcttcaagttagatttaaaattcagccaggcgatgctcgtctatttataaatggccttcgtgttgatatggatgtttatgacgcttttagtattttggatatgctgaaattagaaggaaaaatgatgaatggccttcgcaatcttgggatcaatggggaagatatgagcaaatttttaaaattaaattcacacatttgggaatatacttatgtattagatattcgacattcttctataatgtggattaatgacttagaaaatgatgatttgtatattacatggcctacaagttgccagaaacttctgaagccagtatttcctggaagtgtaccttccataaggcgcaattttcataatttggttctgtttattgatccggcccaagaatataccttggattttataaaacttgctgatgttttctattctcacgaagttcctcttagaattggttttgtgttcattcttaatacagatgatgaagttgatggagcaaatgatgctggagttgctctctggcgagctttcaactatattgcagaagaatttgatatatcagaagcatttatttctatagtacacatgtaccaaaaagtgaagaaggatcaaaatatactcactgtggacaatgtgaagagtgttctccaaaatacatttcctcatgctaatatttgggatattttgggaattcattctaaatatgatgaagaaagaaaggctggagcaagcttttataagatgactggcctgggtcctttgcctcaagctctttataatggtgaaccctttaaacatgaagagatgaatattaaagaactaaaaatggctgttcttcaaagaatgatggatgcatctgtatatttacaaagagaagtttttttgggcacattaaatgatcgcacgaatgcaattgattttctaatggataggaataatgttgtaccccgtataaatactttgattttgcgtactaaccagcagtacctcaatttaatatctacatcagtaactgctgatgttgaagatttctctactttctttttcttggattcacaagataagagtgctgtaattgcaaagaacatgtattatttaacccaagacgatgagagtataatttctgcagtcactctctggattattgcagattttgataagccttctgggagaaaacttctttttaatgcattaaagcacatgaaaacaagtgttcatagtcggttggggattatttataatcctacatcaaaaataaatgaagagaacacagctatttctagaggaattttggcagcttttcttacacagaagaacatgtttttgagaagctttcttgggcaactggcaaaggaagaaattgctacagctatttactctggagataaaattaaaacattccttattgaggggatggataagaatgcttttgagaaaaaatataatactgttggagtgaatatttttcgaactcaccagttgttctgtcaagatgtacttaaattacgtcctggagaaatgggtattgtcagcaatgggagattcttaggacctttagatgaagatttttatgcagaagatttttacttgttggaaaagataacatttagtaatttaggagagaaaattaaaggcattgttgaaaatatgggaatcaacgcaaataacatgagtgactttattatgaaagttgatgcccttatgtcctctgtgcctaagcgtgcatctcgatatgatgtcacatttcttagggagaatcacagtgttataaagacgaatcctcaagagaatgatatgttcttcaatgtcattgctattgttgatccattaacaagagaagcacagaaaatggcacagttgttggttgtacttggcaagattatcaacatgaagataaagttgttcatgaactgtaggggcaggctttcagaagcccctttagaaagcttttaccgttttgttctggaaccagaactgatgtcaggggctaatgacgtttcttctcttggaccagtggcaaaatttttggatattcctgaatcacccctcctaatcctcaacatgattactccagaaggctggttggttgaaacagtgcacagcaactgtgaccttgataatattcacttaaaggatactgagaaaactgttacagcagaatatgaactagaatacttactactggaaggacaatgctttgataaagtgacagaacagcctcctcggggtctgcagttcacactaggcacaaaaaataaacctgctgtggttgatacaatagtgatggcacatcatgggtattttcaattaaaagcaaacccaggtgcttggatactgaggttacaccaaggaaaatctgaagatatttatcaaatagttgggcatgaaggaactgactctcaagcagacctagaagatatcattgttgtattaaacagcttcaaaagcaagatactcaaagtaaaagtgaaaaaagaaacagacaaaattaaggaagatatccttaccgatgaagatgaaaaaacaaaaggactgtgggattccattaaaagtttcacagtaagcttgcataaagaaaacaaaaaggaaaaagatgtcctaaacattttttcagttgcttctggtcatttatatgaacgttttttaagaattatgatgctttctgttttgcgtaacaccaaaacaccagtgaaattctggttgctaaaaaattatctctcaccgacatttaaagaagtaattcctcacatggctaaagagtatggattccgatatgaactagttcaatataggtggccccgttggcttcgtcaacagactgaaagacagaggattatttggggttacaaaattcttttccttgatgttcttttcccactagcagtggacaaaatcatttttgttgatgctgaccagattgtgagacatgatctaaaagaacttcgagatttcgatctggatggagctccttatgggtatactccattttgtgatagccgcagggaaatggatggatatcgtttctggaaaacaggatactgggcatcacatcttttaagacggaaataccatatcagtgctttatatgtagtggatctcaagaagttcaggagaattggagcaggtgacaggctcaggagccagtatcaagctctcagtcaagatccaaacagtctttcaaacctagatcaggatctccccaataatatgatttaccaagtcgccattaagtctcttcctcaagactggctgtggtgtgaaacctggtgtgatgatgaatccaaacaaagagccaaaacaattgatctgtgcaataatcccaaaacaaaagaatccaaactaaaagctgctgccagaattgtcccagaatgggtggagtatgatgctgagataagacaactattagatcatcttgaaaacaagaagcaagatacaattttgacacatgatgaactctagcactggtgtatatgagaaggaaggcgaaagcatgacaggaaacctgccgcctgctggggaagtctggagcccctgctgagacgatttggaagtctcgttaagatcagtgacatattctttaattttaaaaaattgtaattatttaaaacagttatttaatgtattgaatgagtttaagttatataataaatgaccattgagtatttaaaaaaaaaat

SEQ ID NO: 274203 - DNA, 5271 bp, Homo sapiens
cgcgccggagcgggacacgcatgcgccggtctggacccggcacccagtaacggactcgagctcctcccaccggaagtgggcagccgcgcagcgggaagagccggccgaagcgtggcggccacagactgtgggtaccgggtccgagggactcgcgcttttctctccgtgccatggcgccagcgaaagccacgaacgtggtgcggctgctactaggctccacagcgctgtggctttcgcagctcggctccgggacggtcgccgcgtccaagtcggtgactgcccacttggccgcgaagtggcccgagaccccgctgctgctggaggcaagtgaatttatggcagaagaaagtaatgaaaaattttggcagtttttggaaactgtgcaagaattagcaatttataagcaaacagaatcagattattcttattacaacttaatcctgaagaaagctggacagtttctagacaatttacacatcaaccttttaaagtttgctttctctataagggcatactccccagctattcagatgtttcagcagattgcagctgatgagccaccaccagatggttgtaatgcatttgtggttattcataagaagcacacctgtaaaattaatgagattaaaaagctgctgaagaaagctgcttcaaggactagaccttatctatttaaaggagatcacaaatttcctacaaacaaagagaacttaccagtggtgattctctatgccgaaatgggtactagaacatttagtgcatttcacaaagtattgtctgaaaaagctcaaaatgaggaaattctgtatgttcttcgccattatattcagaaaccaagctcacggaaaatgtacttatctgggtatggtgtggagctagcaattaagagtacagaatacaaagcactggatgatacccaagttaaaactgtgactaatactactgtagaggatgagactgaaacaaatgaagttcaaggatttctctttgggaaactaaaagaaatatattcagatcttagagataatctgacagcattccaaaaatacctgattgagagtaacaaacaaatgatgcctttgaaagtctgggaactacaagatcttagttttcaagcagcttctcaaataatgtccgctccagtttatgattccattaaattaatgaaagacatttcacagaacttccccataaaagccagatctctaaccagaattgctgtaaatcaacatatgagagaagaaataaaggaaaatcaaaaggatcttcaagttagatttaaaattcagccaggcgatgctcgtctatttataaatggccttcgtgttgatatggatgtttatgacgcttttagtattttggatatgctgaaattagaaggaaaaatgatgaatggccttcgcaatcttgggatcaatggggaagatatgagcaaatttttaaaattaaattcacacatttgggaatatacttatgtattagatattcgacattcttctataatgtggattaatgacttagaaaatgatgatttgtatattacatggcctacaagttgccagaaacttctgaagccagtatttcctggaagtgtaccttccataaggcgcaattttcataatttggttctgtttattgatccggcccaagaatataccttggattttataaaacttgctgatgttttctattctcacgaagttcctcttagaattggttttgtgttcattcttaatacagatgatgaagttgatggagcaaatgatgctggagttgctctctggcgagctttcaactatattgcagaagaatttgatatatcagaagcatttatttctatagtacacatgtaccaaaaagtgaagaaggatcaaaatatactcactgtggacaatgtgaagagtgttctccaaaatacatttcctcatgctaatatttgggatattttgggaattcattctaaatatgatgaagaaagaaaggctggagcaagcttttataagatgactggcctgggtcctttgcctcaagctctttataatggtgaaccctttaaacatgaagagatgaatattaaagaactaaaaatggctgttcttcaaagaatgatggatgcatctgtatatttacaaagagaagtttttttgggcacattaaatgatcgcacgaatgcaattgattttctaatggataggaataatgttgtaccccgtataaatactttgattttgcgtactaaccagcagtacctcaatttaatatctacatcagtaactgctgatgttgaagatttctctactttctttttcttggattcacaagataagagtgctgtaattgcaaagaacatgtattatttaacccaagacgatgagagtataatttctgcagtcactctctggattattgcagattttgataagccttctgggagaaaacttctttttaatgcattaaagcacatgaaaacaagtgttcatagtcggttggggattatttataatcctacatcaaaaataaatgaagagaacacagctatttctagaggaattttggcagcttttcttacacagaagaacatgtttttgagaagctttcttgggcaactggcaaaggaagaaattgctacagctatttactctggagataaaattaaaacattccttattgaggggatggataagaatgcttttgagaaaaaatataatactgttggagtgaatatttttcgaactcaccagttgttctgtcaagatgtacttaaattacgtcctggagaaatgggtattgtcagcaatgggagattcttaggacctttagatgaagatttttatgcagaagatttttacttgttggaaaagataacatttagtaatttaggagagaaaattaaaggcattgttgaaaatatgggaatcaacgcaaataacatgagtgactttattatgaaagttgatgcccttatgtcctctgtgcctaagcgtgcatctcgatatgatgtcacatttcttagggagaatcacagtgttataaagacgaatcctcaagagaatgatatgttcttcaatgtcattgctattgttgatccattaacaagagaagcacagaaaatggcacagttgttggttgtacttggcaagattatcaacatgaagataaagttgttcatgaactgtaggggcaggctttcagaagcccctttagaaagcttttaccgttttgttctggaaccagaactgatgtcaggggctaatgacgtttcttctcttggaccagtggcaaaatttttggatattcctgaatcacccctcctaatcctcaacatgattactccagaaggctggttggttgaaacagtgcacagcaactgtgaccttgataatattcacttaaaggatactgagaaaactgttacagcagaatatgaactagaatacttactactggaaggacaatgctttgataaagtgacagaacagcctcctcggggtctgcagttcacactaggcacaaaaaataaacctgctgtggttgatacaatagtgatggcacatcatgtaagtattatttaattgatggtgtttaatttgatgttttggtgaattctctgttttcctaagagtaaaatgaaataatctttattctgctgttgctgaacagtttgcagaaaacaaaattgaatctttgaataagataaataaaaaatggggaaaatcatactttaataatttttgacaggttattgtaaaatctctttacttggaattgatttatagaatttattcattctacagttaataaatactttcttagatcactcgtgtattcatgagcaattcgatggtttttagtcatattactcaatgattatttttttctcatcttaaaaggggtattttcaattaaaagcaaacccaggtgcttggatactgaggttacaccaaggaaaatctgaagatatttatcaaatagttgggcatgaaggaactgactctcaagcagacctagaagatatcattgttgtattaaacagcttcaaaagcaagatactcaaagtaaaagtgaaaaaagaaacagacaaaattaaggaagatatccttaccgatgaagatgaaaaaacaaaaggactgtgggattccattaaaagtttcacagtaagcttgcataaagaaaacaaaaaggaaaaagatgtcctaaacattttttcagttgcttctggtcatttatatgaacgttttttaagaattatgatgctttctgttttgcgtaacaccaaaacaccagtgaaattctggttgctaaaaaattatctctcaccgacatttaaagaagtaattcctcacatggctaaagagtatggattccgatatgaactagttcaatataggtggccccgttggcttcgtcaacagactgaaagacagaggattatttggggttacaaaattcttttccttgatgttcttttcccactagcagtggacaaaatcatttttgttgatgctgaccagattgtgagacatgatctaaaagaacttcgagatttcgatctggatggagctccttatgggtatactccattttgtgatagccgcagggaaatggatggatatcgtttctggaaaacaggatactgggcatcacatcttttaagacggaaataccatatcagtgctttatatgtagtggatctcaagaagttcaggagaattggagcaggtgacaggctcaggagccagtatcaagctctcagtcaagatccaaacagtctttcaaacctagatcaggatctccccaataatatgatttaccaagtcgccattaagtctcttcctcaagactggctgtggtgtgaaacctggtgtgatgatgaatccaaacaaagagccaaaacaattgatctgtgcaataatcccaaaacaaaagaatccaaactaaaagctgctgccagaattgtcccagaatgggtggagtatgatgctgagataagacaactattagatcatcttgaaaacaagaagcaagatacaattttgacacatgatgaactctagcactggtgtatatgagaaggaaggcgaaagcatgacaggaaacctgccgcctgctggggaagtctggagcccctgctgagacgatttggaagtctcgttaagatcagtgacatattctttaattttaaaaaattgtaattatttaaaacagttatttaatgtattgaatgagtttaagttatataataaatgaccattgagtatttaaaaaaaaaat

SEQ ID NO: 274204 - DNA, 1601 bp, Homo sapiens
cgcgccggagcgggacacgcatgcgccggtctggacccggcacccagtaacggactcgagctcctcccaccggaagtgggcagccgcgcagcgggaagagccggccgaagcgtggcggccacagactgtgggtaccgggtccgagggactcgcgcttttctctccgtgccatggcgccagcgaaagccacgaacgtggtgcggctgctactaggctccacagcgctgtggctttcgcagctcggctccgggacggtcgccgcgtccaagtcggtgactgcccacttggccgcgaagtggcccgagaccccgctgctgctggaggcaagtgaatttatggcagaagaaagtaatgaaaaattttggcagtttttggaaactgtgcaagaattagcaatttataagcaaacagaatcagattattcttattacaacttaatcctgaagaaagctggacagtttctagacaatttacacatcaaccttttaaagtttgctttctctataagggcatactccccagctattcagatgtttcagcagattgcagctgatgagccaccaccagatggttgtaatgcatttgtggttattcataagaagcacacctgtaaaattaatgagattaaaaagctgctgaagaaagctgcttcaaggactagaccttatctatttaaaggagatcacaaatttcctacaaacaaagagaacttaccagtggtgattctctatgccgaaatgggtactagaacatttagtgcatttcacaaagtattgtctgaaaaagctcaaaatgaggaaattctgtatgttcttcgccattatattcagaaaccaagctcacggaaaatgtacttatctgggtatggtgtggagctagcaattaagagtacagaatacaaagcactggatgatacccaagttaaaaggaaatggatggatatcgtttctggaaaacaggatactgggcatcacatcttttaagacggaaataccatatcagtgctttatatgtagtggatctcaagaagttcaggagaattggagcaggtgacaggctcaggagccagtatcaagctctcagtcaagatccaaacagtctttcaaacctagatcaggatctccccaataatatgatttaccaagtcgccattaagtctcttcctcaagactggctgtggtgtgaaacctggtgtgatgatgaatccaaacaaagagccaaaacaattgatctgtgcaataatcccaaaacaaaagaatccaaactaaaagctgctgccagaattgtcccagaatgggtggagtatgatgctgagataagacaactattagatcatcttgaaaacaagaagcaagatacaattttgacacatgatgaactctagcactggtgtatatgagaaggaaggcgaaagcatgacaggaaacctgccgcctgctggggaagtctggagcccctgctgagacgatttggaagtctcgttaagatcagtgacatattctttaattttaaaaaattgtaattatttaaaacagttatttaatgtattgaatgagtttaagttatataataaatgaccattgagtatttaaaaaaaaaat

SEQ ID NO: 274205 - DNA, 5596 bp, Homo sapiens
  misc_feature (5593)..(5593): n is a, c, g, or t
  misc_feature (5595)..(5595): n is a, c, g, or t
cgcgccggagcgggacacgcatgcgccggtctggacccggcacccagtaacggactcgagctcctcccaccggaagtgggcagccgcgcagcgggaagagccggccgaagcgtggcggccacagactgtgggtaccgggtccgagggactcgcgcttttctctccgtgccatggcgccagcgaaagccacgaacgtggtgcggctgctactaggctccacagcgctgtggctttcgcagctcggctccgggacggtcgccgcgtccaagtcggtgactgcccacttggccgcgaagtggcccgagaccccgctgctgctggaggcaagtgaatttatggcagaagaaagtaatgaaaaattttggcagtttttggaaactgtgcaagaattagcaatttataagcaaacagaatcagattattcttattacaacttaatcctgaagaaagctggacagtttctagacaatttacacatcaaccttttaaagtttgctttctctataagggcatactccccagctattcagatgtttcagcagattgcagctgatgagccaccaccagatggttgtaatgcatttgtggttattcataagaagcacacctgtaaaattaatgagattaaaaagctgctgaagaaagctgcttcaaggactagaccttatctatttaaaggagatcacaaatttcctacaaacaaagagaacttaccagtggtgattctctatgccgaaatgggtactagaacatttagtgcatttcacaaagtattgtctgaaaaagctcaaaatgaggaaattctgtatgttcttcgccattatattcagaaaccaagctcacggaaaatgtacttatctgggtatggtgtggagctagcaattaagagtacagaatacaaagcactggatgatacccaagttaaaactgtgactaatactactgtagaggatgagactgaaacaaatgaagttcaaggatttctctttgggaaactaaaagaaatatattcagatcttagagataatctgacagcattccaaaaatacctgattgagagtaacaaacaaatgatgcctttgaaagtctgggaactacaagatcttagttttcaagcagcttctcaaataatgtccgctccagtttatgattccattaaattaatgaaagacatttcacagaacttccccataaaagccagatctctaaccagaattgctgtaaatcaacatatgagagaagaaataaaggaaaatcaaaaggatcttcaagttagatttaaaattcagccaggcgatgctcgtctatttataaatggccttcgtgttgatatggatgtttatgacgcttttagtattttggatatgctgaaattagaaggaaaaatgatgaatggccttcgcaatcttgggatcaatggggaagatatgagcaaatttttaaaattaaattcacacatttgggaatatacttatgtattagatattcgacattcttctataatgtggattaatgacttagaaaatgatgatttgtatattacatggcctacaagttgccagaaacttctgaagccagtatttcctggaagtgtaccttccataaggcgcaattttcataatttggttctgtttattgatccggcccaagaatataccttggattttataaaacttgctgatgttttctattctcacgaagttcctcttagaattggttttgtgttcattcttaatacagatgatgaagttgatggagcaaatgatgctggagttgctctctggcgagctttcaactatattgcagaagaatttgatatatcagaagcatttatttctatagtacacatgtaccaaaaagtgaagaaggatcaaaatatactcactgtggacaatgtgaagagtgttctccaaaatacatttcctcatgctaatatttgggatattttgggaattcattctaaatatgatgaagaaagaaaggctggagcaagcttttataagatgactggcctgggtcctttgcctcaagctctttataatggtgaaccctttaaacatgaagagatgaatattaaagaactaaaaatggctgttcttcaaagaatgatggatgcatctgtatatttacaaagagaagtttttttgggcacattaaatgatcgcacgaatgcaattgattttctaatggataggaataatgttgtaccccgtataaatactttgattttgcgtactaaccagcagtacctcaatttaatatctacatcagtaactgctgatgttgaagatttctctactttctttttcttggattcacaagataagagtgctgtaattgcaaagaacatgtattatttaacccaagacgatgagagtataatttctgcagtcactctctggattattgcagattttgataagccttctgggagaaaacttctttttaatgcattaaagcacatgaaaacaagtgttcatagtcggttggggattatttataatcctacatcaaaaataaatgaagagaacacagctatttctagaggaattttggcagcttttcttacacagaagaacatgtttttgagaagctttcttgggcaactggcaaaggaagaaattgctacagctatttactctggagataaaattaaaacattccttattgaggggatggataagaatgcttttgagaaaaaatataatactgttggagtgaatatttttcgaactcaccagttgttctgtcaagatgtacttaaattacgtcctggagaaatgggtattgtcagcaatgggagattcttaggacctttagatgaagatttttatgcagaagatttttacttgttggaaaagataacatttagtaatttaggagagaaaattaaaggcattgttgaaaatatgggaatcaacgcaaataacatgagtgactttattatgaaagttgatgcccttatgtcctctgtgcctaagcgtgcatctcgatatgatgtcacatttcttagggagaatcacagtgttataaagacgaatcctcaagagaatgatatgttcttcaatgtcattgctattgttgatccattaacaagagaagcacagaaaatggcacagttgttggttgtacttggcaagattatcaacatgaagataaagttgttcatgaactgtaggggcaggctttcagaagcccctttagaaagcttttaccgttttgttctggaaccagaactgatgtcaggggctaatgacgtttcttctcttggaccagtggcaaaatttttggatattcctgaatcacccctcctaatcctcaacatgattactccagaaggctggttggttgaaacagtgcacagcaactgtgaccttgataatattcacttaaaggatactgagaaaactgttacagcagaatatgaactagaatacttactactggaaggacaatgctttgataaagtgacagaacagcctcctcggggtctgcagttcacactaggcacaaaaaataaacctgctgtggttgatacaatagtgatggcacatcatgggtattttcaattaaaagcaaacccaggtgcttggatactgaggttacaccaaggaaaatctgaagatatttatcaaatagttgggcatgaaggaactgactctcaagcagacctagaagatatcattgttgtattaaacagcttcaaaagcaagatactcaaagtaaaagtgaaaaaagaaacagacaaaattaaggaagatatccttaccgatgaagatgaaaaaacaaaaggactgtgggattccattaaaagtttcacagtaagcttgcataaagaaaacaaaaaggaaaaagatgtcctaaacattttttcagttgcttctggtcatttatatgaacgttttttaagaattatgatgctttctgttttgcgtaacaccaaaacaccagtgaaattctggttgctaaaaaattatctctcaccgacatttaaagaagtaattcctcacatggctaaagagtatggattccgatatgaactagttcaatataggtggccccgttggcttcgtcaacagactgaaagacagaggattatttggggttacaaaattcttttccttgatgttcttttcccactagcagtggacaaaatcatttttgttgatgctgaccagattgtgagacatgatctaaaagaacttcgagatttcgatctggatggagctccttatgggtatactccattttgtgatagccgcagggaaatggatggatatcgtttctggaaaacaggatactgggcatcacatcttttaagacggaaataccatatcagtgctttatatgtagtggatctcaagaagttcaggagaattggagcaggtgacaggctcaggagccagtatcaagctctcagtcaagatccaaacagtctttcaaacctagatcaggatctccccaataatatgatttaccaagtcgccattaagtctcttcctcaagactggctgtggtgtgaaacctggtgtgatgatgaatccaaacaaagagccaaaacaattgatctgtgcaataatcccaaaacaaaagaatccaaactaaaagctgctgccagaattgtcccagaatgggtggagtatgatgctgagataagacaactattagatcatcttgaaaacaagaagcaagatacaagctctacaagaagcatggcagcatctgcttctggggaagcctcaaggagcttttattcatggtggaaggcaaagcaggagcaggtgtcttacattggaggaacaggaccacgagagagaaggggaaggtgccacacacttttaaacaaccagatctcacactaactcactcactatcacaagaagagcaccgagggaatgctgctaacccattcatgaggactctgcccccgtggtccagttacctcctaccagggaattataccctcccacctccaacactggggatgagatttggtgaggacacagatccaaaccatatcgttgtgcttattggccatctgtatattataagtttttttgcaaagtgcctattcaagatttttgctcttttttaagttttggattttgaatttctttggaaaacaaaaaagcccactgagattttgattgcaactcttgttttaaatcagtttggtgaagattaatgtgttgattatgttgagcttccaattcataaatacgatatgtttcttgatttattttggtctttaattactcctagcagagttttagtttgcagtgtacatattttactaagaattttataactgaatgctaatataaatggtatttttaaatttcttgttggttgctaatacatagaaatacaattaatttttgtatattggacttatgtcctgtggctttgctatactcacttattagttctagtagagttcttaggaattttttcataatgggtcctgttatagttgtagagttcacaggattgtcttcacagtggatcatatcttcagcaaataaaaatagttttactttttcctttccaaatagaaaagtggcctcgttggcctcagcggtggagctctcgncng

SEQ ID NO: 274206 - DNA, 5575 bp, Homo sapiens
  misc_feature (5572)..(5572): n is a, c, g, or t
  misc_feature (5574)..(5574): n is a, c, g, or t
cgcgccggagcgggacacgcatgcgccggtctggacccggcacccagtaacggactcgagctcctcccaccggaagtgggcagccgcgcagcgggaagagccggccgaagcgtggcggccacagactgtgggtaccgggtccgagggactcgcgcttttctctccgtgccatggcgccagcgaaagccacgaacgtggtgcggctgctactaggctccacagcgctgtggctttcgcagctcggctccgggacggtcgccgcgtccaagtcggtgactgcccacttggccgcgaagtggcccgagaccccgctgctgctggaggcaagtgaatttatggcagaagaaagtaatgaaaaattttggcagtttttggaaactgtgcaagaattagcaatttataagcaaacagaatcagattattcttattacaacttaatcctgaagaaagctggacagtttctagacaatttacacatcaaccttttaaagtttgctttctctataagggcatactccccagctattcagatgtttcagcagattgcagctgatgagccaccaccagatggttgtaatgcatttgtggttattcataagaagcacacctgtaaaattaatgagattaaaaagctgctgaagaaagctgcttcaaggactagaccttatctatttaaaggagatcacaaatttcctacaaacaaagagaacttaccagtggtgattctctatgccgaaatgggtactagaacatttagtgcatttcacaaagtattgtctgaaaaagctcaaaatgaggaaattctgtatgttcttcgccattatattcagaaaccaagctcacggaaaatgtacttatctgggtatggtgtggagctagcaattaagagtacagaatacaaagcactggatgatacccaagttaaaactgtgactaatactactgtagaggatgagactgaaacaaatgaagttcaaggatttctctttgggaaactaaaagaaatatattcagatcttagagataatctgacagcattccaaaaatacctgattgagagtaacaaacaaatgatgcctttgaaagtctgggaactacaagatcttagttttcaagcagcttctcaaataatgtccgctccagtttatgattccattaaattaatgaaagacatttcacagaacttccccataaaagccagatctctaaccagaattgctgtaaatcaacatatgagagaagaaataaaggaaaatcaaaaggatcttcaagttagatttaaaattcagccaggcgatgctcgtctatttataaatggccttcgtgttgatatggatgtttatgacgcttttagtattttggatatgctgaaattagaaggaaaaatgatgaatggccttcgcaatcttgggatcaatggggaagatatgagcaaatttttaaaattaaattcacacatttgggaatatacttatgtattagatattcgacattcttctataatgtggattaatgacttagaaaatgatgatttgtatattacatggcctacaagttgccagaaacttctgaagccagtatttcctggaagtgtaccttccataaggcgcaattttcataatttggttctgtttattgatccggcccaagaatataccttggattttataaaacttgctgatgttttctattctcacgaagttcctcttagaattggttttgtgttcattcttaatacagatgatgaagttgatggagcaaatgatgctggagttgctctctggcgagctttcaactatattgcagaagaatttgatatatcagaagcatttatttctatagtacacatgtaccaaaaagtgaagaaggatcaaaatatactcactgtggacaatgtgaagagtgttctccaaaatacatttcctcatgctaatatttgggatattttgggaattcattctaaatatgatgaagaaagaaaggctggagcaagcttttataagatgactggcctgggtcctttgcctcaagctctttataatggtgaaccctttaaacatgaagagatgaatattaaagaactaaaaatggctgttcttcaaagaatgatggatgcatctgtatatttacaaagagaagtttttttgggcacattaaatgatcgcacgaatgcaattgattttctaatggataggaataatgttgtaccccgtataaatactttgattttgcgtactaaccagcagtacctcaatttaatatctacatcagtaactgctgatgttgaagatttctctactttctttttcttggattcacaagataagagtgctgtaattgcaaagaacatgtattatttaacccaagacgatgagagtataatttctgcagtcactctctggattattgcagattttgataagccttctgggagaaaacttctttttaatgcattaaagcacatgaaaacaagtgttcatagtcggttggggattatttataatcctacatcaaaaataaatgaagagaacacagctatttctagaggaattttggcagcttttcttacacagaagaacatgtttttgagaagctttcttgggcaactggcaaaggaagaaattgctacagctatttactctggagataaaattaaaacattccttattgaggggatggataagaatgcttttgagaaaaaatataatactgttggagtgaatatttttcgaactcaccagttgttctgtcaagatgtacttaaattacgtcctggagaaatgggtattgtcagcaatgggagattcttaggacctttagatgaagatttttatgcagaagatttttacttgttggaaaagataacatttagtaatttaggagagaaaattaaaggcattgttgaaaatatgggaatcaacgcaaataacatgagtgactttattatgaaagttgatgcccttatgtcctctgtgcctaagcgtgcatctcgatatgatgtcacatttcttagggagaatcacagtgttataaagacgaatcctcaagagaatgatatgttcttcaatgtcattgctattgttgatccattaacaagagaagcacagaaaatggcacagttgttggttgtacttggcaagattatcaacatgaagataaagttgttcatgaactgtaggggcaggctttcagaagcccctttagaaagcttttaccgttttgttctggaaccagaactgatgtcaggggctaatgacgtttcttctcttggaccagtggcaaaatttttggatattcctgaatcacccctcctaatcctcaacatgattactccagaaggctggttggttgaaacagtgcacagcaactgtgaccttgataatattcacttaaaggatactgagaaaactgttacagcagaatatgaactagaatacttactactggaaggacaatgctttgataaagtgacagaacagcctcctcggggtctgcagttcacactaggcacaaaaaataaacctgctgtggttgatacaatagtgatggcacatcatgggtattttcaattaaaagcaaacccaggtgcttggatactgaggttacaccaaggaaaatctgaagatatttatcaaatagttgggcatgaaggaactgactctcaagcagacctagaagatatcattgttgtattaaacagcttcaaaagcaagatactcaaagtaaaagtgaaaaaagaaacagacaaaattaaggaagatatccttaccgatgaagatgaaaaaacaaaaggactgtgggattccattaaaagtttcacagtaagcttgcataaagaaaacaaaaaggaaaaagatgtcctaaacattttttcagttgcttctggtcatttatatgaacgttttttaagaattatgatgctttctgttttgcgtaacaccaaaacaccagtgaaattctggttgctaaaaaattatctctcaccgacatttaaagaagtaattcctcacatggctaaagagtatggattccgatatgaactagttcaatataggtggccccgttggcttcgtcaacagactgaaagacagaggattatttggggttacaaaattcttttccttgatgttcttttcccactagcagtggacaaaatcatttttgttgatgctgaccagattgtgagacatgatctaaaagaacttcgagatttcgatctggatggagctccttatgggtatactccattttgtgatagccgcagggaaatggatggatatcgtttctggaaaacaggatactgggcatcacatcttttaagacggaaataccatatcagtgctttatatgtagtggatctcaagaagttcaggagaattggagcaggtgacaggctcaggagccagtatcaagctctcagtcaagatccaaacagtctttcaaacctagatcaggatctccccaataatatgatttaccaagtcgccattaagtctcttcctcaagactggctgtggtgtgaaacctggtgtgatgatgaatccaaacaaagagccaaaacaattgatctgtgcaataatcccaaaacaaaagaatccaaactaaaagctgctgccagaattgtcccagaatgggtggagtatgatgctgagataagacaactattagatcatcttgaaaacaagaagcaagatacaagctctacaagaagcatggcagcatctgcttctggggaagcctcaaggagcttttattcatggtggaaggcaaagcaggagcaggtgtcttacattggaggaacaggaccacgagagagaaggggaaggtgccacacacttttaaacaaccagatctcacactaactcactcactatcacaagaagagcaccgagggaatgctgctaacccattcatgaggactctgcccccgtggtccagttacctcctaccagggaattataccctcccacctccaacactggggatgagatttggtgaggacacagatccaaaccatatcgttgtgcttattggccatctgtatattataagtttttttgcaaagtgcctattcaagatttttgctcttttttaagttttggattttgaatttctttggaaaacaaaaaagcccactgagattttgattgcaactcttgttttaaatcagtttggtgaagattaatgtgttgattatgttgagcttccaattcataaatacgatatgtttcttgatttattttggtctttaattactcctagcagagttttagtttgcagtgtacatattttactaagaattttataactgaatgctaatataaatggtatttttaaatttcttgttggttgctaatacatagaaatacaattaatttttgtatattggacttatgtcctgtggctttgctatactcacttattagttctagtagagttcttaggaattttttcataatgggtcctgttatagttgtagagttcacaggattgtcttcacagtggatcatatcttcagcaaataaaaataatagaaaagtggcctcgttggcctcagcggtggagctctcgncng

SEQ ID NO: 274207 - DNA, 977 bp, Homo sapiens
caaacatccattaacccagatgccagcaatctttacttagagagctctgagcatgcagaaatgggaaaatattcatggatcattgtttccaatggggagatgaaaattcacctcagaatccagagagcattgtggtgaccaatatgaacagtaattgcaggcataatgtgagcaatagaggcagatagaggtagtgaggctgtccattgtggggactattgaatggtaggtttctatgcctccttcttcatccttgttcccaggggtagagtctaggagagatgtaggtatattccagtgcatggattcattcatgacacaagatgattggatcaccttaggtattttaagctttaaagtgtagagaaatctcagatttgcatatgttttatgatctgtttacagtctaactgatgtcttacttcattcagcttctttccttctgactctaaatttcatacgtctatgattaaatcacaattttctgtaggatgatctccccaataatatgatttaccaagtcgccattaagtctcttcctcaagactggctgtggtgtgaaacctggtgtgatgatgaatccaaacaaagagccaaaacaattgatctgtgcaataatcccaaaacaaaagaatccaaactaaaagctgctgccagaattgtcccagaatgggtggagtatgatgctgagataagacaactattagatcatcttgaaaacaagaagcaagatacaattttgacacatgatgaactctagcactggtgtatatgagaaggaaggcgaaagcatgacaggaaacctgccgcctgctggggaagtctggagcccctgctgagacgatttggaagtctcgttaagatcagtgacatattctttaattttaaaaaattgtaattatttaaaacagttatttaatgtattgaatgagtttaagttatataataaatgaccattgagtatttaaaaaaaaaat

SEQ ID NO: 274208 - DNA, 2166 bp, Homo sapiens
cgcgccggagcgggacacgcatgcgccggtctggacccggcacccagtaacggactcgagctcctcccaccggaagtgggcagccgcgcagcgggaagagccggccgaagcgtggcggccacagactgtgggtaccgggtccgagggactcgcgcttttctctccgtgccatggcgccagcgaaagccacgaacgtggtgcggctgctactaggctccacagcgctgtggctttcgcagctcggctccgggacggtcgccgcgtccaagtcggtgactgcccacttggccgcgaagtggcccgagaccccgctgctgctggaggcaagtgaatttatggcagaagaaagtaatgaaaaattttggcagtttttggaaactgtgcaagaattagcaatttataagcaaacagaatcagattattcttattacaacttaatcctgaagaaagctggacagtttctagacaatttacacatcaaccttttaaagtttgctttctctataagggcatactccccagctattcagatgtttcagcagattgcagctgatgagccaccaccagatggttgtaatgcatttgtggttattcataagaagcacacctgtaaaattaatgagattaaaaagctgctgaagaaagctgcttcaaggactagaccttatctatttaaaggagatcacaaatttcctacaaacaaagagaacttaccagtggtgattctctatgccgaaatgggtactagaacatttagtgcatttcacaaagtattgtctgaaaaagctcaaaatgaggaaattctgtatgttcttcgccattatattcagaaaccaagctcacggaaaatgtacttatctgggtatggtgtggagctagcaattaagagtacagaatacaaagcactggatgatacccaagttaaaactgtgactaatactactgtagaggatgagactgaaacaaatgaagttcaaggatttctctttgggaaactaaaagaaatatattcagatcttagagataatctgacagcattccaaaaatacctgattgagagtaacaaacaaatgatgcctttgaaagtctgggaactacaagatcctgttaagactattgcatgtttcattgataaatgtttaatggaaacatcaaatggaggacatgcagttttacaaaatcttagttttcaagcagcttctcaaataatgtccgctccagtttatgattccattaaattaatgaaagacatttcacagaacttccccataaaagccagattaagaatgaatatattgatatgcctctttcagtcaactttaaatgtcaagaatttgagaagtcgtcatttatataataaaacatgaaatatatatgggtgtgtataaatgtcatatctgtttagccataatattttaattaatggccgttataaaaattattagatcaaatacaaataaagtaaaataactttagtcttgatcagacagttgattagctctattgatgctaagtcagtataactgttcagaggttctgatgcaaaactctgctgttaatctgtaattaagaaaaaattataaaatatgctaacattgcttaatggctaaattgtaggcttgagcatatctctaaaaccacttggtagacaatctgtaaatgtttgttgaaatgaaatatttgctaaataaatgaaaaatttgccttattaaaaaaaaaaaaaaaaaaaaaaaaaaaaaaaaaaaaaaaaaaaaaaaaaaaaaaaaaaaaaaaaaaaaaaaataaaaaaaaaaacaaaaaaaaaaatataactaaaaaatcacaaaattatcctctcaacaacatctctactcaaatattctttacacccttctacccacactattatttctcttcccacacttttattcttccttcccaatcttgcctttctttgctaacacaccctctttttgcgggcgtttttaccactcatgggcgcccgttcttaagagaactacctccccctctttgtccgatcgtgcctatcaacaactacgtgctctccactaagcgctctttcccacacattgtgctccccctcatttgcgtgcatttcatcactcttccgcgctattcattcttttacaacaccttcgcgccatatattctggatccccccctccc

SEQ ID NO: 274209 - DNA, 2330 bp, Homo sapiens
cgcgccggagcgggacacgcatgcgccggtctggacccggcacccagtaacggactcgagctcctcccaccggaagtgggcagccgcgcagcgggaagagccggccgaagcgtggcggccacagactgtgggtaccgggtccgagggactcgcgcttttctctccgtgccatggcgccagcgaaagccacgaacgtggtgcggctgctactaggctccacagcgctgtggctttcgcagctcggctccgggacggtcgccgcgtccaagtcggtgactgcccacttggccgcgaagtggcccgagaccccgctgctgctggaggcaagtgaatttatggcagaagaaagtaatgaaaaattttggcagtttttggaaactgtgcaagaattagcaatttataagcaaacagaatcagattattcttattacaacttaatcctgaagaaagctggacagtttctagacaatttacacatcaaccttttaaagtttgctttctctataagggcatactccccagctattcagatgtttcagcagattgcagctgatgagccaccaccagatggttgtaatgcatttgtggttattcataagaagcacacctgtaaaattaatgagattaaaaagctgctgaagaaagctgcttcaaggactagaccttatctatttaaaggagatcacaaatttcctacaaacaaagagaacttaccagtggtgattctctatgccgaaatgggtactagaacatttagtgcatttcacaaagtattgtctgaaaaagctcaaaatgaggaaattctgtatgttcttcgccattatattcagaaaccaagctcacggaaaatgtacttatctgggtatggtgtggagctagcaattaagagtacagaatacaaagcactggatgatacccaagttaaaactgtgactaatactactgtagaggatgagactgaaacaaatgaagttcaaggatttctctttgggaaactaaaagaaatatattcagatcttagagataatctgacagcattccaaaaatacctgattgagagtaacaaacaaatgatgcctttgaaagtctgggaactacaagatcttagttttcaagcagcttctcaaataatgtccgctccagtttatgattccattaaattaatgaaagacatttcacagaacttccccataaaagccagatctctaaccagaattgctgtaaatcaacatatgagagaagaaataaaggaaaatcaaaaggatcttcaagttagatttaaaattcagccaggcgatgctcgtctatttataaatggccttcgtgttgatatggatgtttatgacgcttttagtattttggatatgctgaaattagaaggaaaaatgatgaatggccttcgcaatcttgggatcaatggggaagatatgagcaaatttttaaaattaaattcacacatttgggaatatacttatgtattagatattcgacattcttctataatgtggattaatgacttagaaaatgatgatttgtatattacatggcctacaagttgccagaaacttctgaagccagtatttcctggaagtgtaccttccataaggcgcaattttcataatttggttctgtttattgatccggcccaagaatataccttggattttataaaacttgctgatgttttctattctcacgaagttcctcttagaattggttttgtgttcattcttaatacagatgatgaagttgatggagcaaatgatgctggagttgctctctggcgagctttcaactatattgcagaagaatttgatatatcagaagcatttatttctatagtacacatgtaccaaaaagtgaagaaggatcaaaatatactcactgtggacaatgtgaagagtgttctccaaaatacatttcctcatgctaatatttgggatattttgggaattcattctaaatatgatgaagaaagaaaggtaagttgggacattatgttaagtggagtaggccaggcacagaaagacaaacaccacatgatctctactcatgtagaatctttaaaaaaagtcagactcacagaaacagagtaaaatgggggttaccagaggctggggatggcagaattggggagatattggtcaaaggatacaaaatttcagttagactagagaaataagttcaagagatctattgtacatggtggtgactgtagttaatgacatgttttatacttgaaattactaagtacattttaaggattctcaccacaaaatatgagaagtatttgagtaatctgagggggggagccttagagtcgaccgcat

SEQ ID NO: 274210 - DNA, 1314 bp, Homo sapiens
ccggtgcatgcaatgcaagttaccacgtattatgagaatttgctatataacacaactttgatgcaattgtattctggttagggatgacagagtataaaattagcaacaagtaaaatatgagttagcttatactaaagagataaaatatgtgacaagtcgcagtgcatgggcaacaatggtgttttactgagaggaattggagagcagtctactagcttagcataccttcctaagcatagaatgattgctatgcctcttattgtcccaaacactattttgtacatttattcatcatacagattacagaatcttcaatatatgtattctttaattttgaaagtaaataaatagtacatggttggctacaagataccaaggattttttggtggtaccttgaaataaaggagtttgtttccttatttacagattaagaatgaatatattgatatgcctctttcagtcaactttaaatgtcaagaatttgagaagtcgtcatttatataataaaacatgaaatatatatgggtgtgtataaatgtcatatctgtttagccataatattttaattaatggccgttataaaaattattagatcaaatacaaataaagtaaaataactttagtcttgatcagacagttgattagctctattgatgctaagtcagtataactgttcagaggttctgatgcaaaactctgctgttaatctgtaattaagaaaaaattataaaatatgctaacattgcttaatggctaaattgtaggcttgagcatatctctaaaaccacttggtagacaatctgtaaatgtttgttgaaatgaaatatttgctaaataaatgaaaaatttgccttattaaaaaaaaaaaaaaaaaaaaaaaaaaaaaaaaaaaaaaaaaaaaaaaaaaaaaaaaaaaaaaaaaaaaaaaataaaaaaaaaaacaaaaaaaaaaatataactaaaaaatcacaaaattatcctctcaacaacatctctactcaaatattctttacacccttctacccacactattatttctcttcccacacttttattcttccttcccaatcttgcctttctttgctaacacaccctctttttgcgggcgtttttaccactcatgggcgcccgttcttaagagaactacctccccctctttgtccgatcgtgcctatcaacaactacgtgctctccactaagcgctctttcccacacattgtgctccccctcatttgcgtgcatttcatcactcttccgcgctattcattcttttacaacaccttcgcgccatatattctggatccccccctccc

SEQ ID NO: 274211 - DNA, 404 bp, Homo sapiens
tactttcctttaggcaatgtttggaaaggacagataaagttagcaaaatggatgttttttcctatggcatataaaaatgtggcggtgttccattttcttatgtttattattcaaacaatcatattttgtttaacactctgatattttttaactgaataggctggagcaagcttttataagatgactggcctgggtcctttgcctcaagctctttataatggtgaaccctttaaacatgaagagatgaatattaaagaactaaaaatggctgttcttcaaagaatgatggatgcatctgtatatttacaaagagaagtttttttggtaggtaagcatttataagaaaatacatgatgaatatttataaatgatgtttttattaaaaacttattttaatgacagaa

SEQ ID NO: 274212 - DNA, 731 bp, Homo sapiens
gaaagtcaaatctcttaaatccttagtctttatgttctaatttctcatcaagcctgtatcctttctattacatatatctgtttcgttacttctccctttacctatatcatttgttatctaacagctttagaatcttcactgacatgttgcctatgtggagatggggactatcaaaattagtaattcttcctctacttcttactatccagggaaatgaaaagaaagtatttattcgtaggtagccaagaacttccaaatcccaaaagaatcaggacaccaccaacgttgttgtaaggtcaccactttgtatttgcagatcaaggttctagtaattattttccttgttcttcaatactaaggaaatttagatactatgaaaaaaagtcactttaggcaaagggcaagcagcataaccctgggacattgaaatcaactgtttggattaaaatcttgcctgtgctgtgagtttctgtgtgaccttaatctctctgtacctaaactgcaaaagtactatttcagcagggcgttgtaaggatcaagtgagataatgaacataaagttttaatatagtacctggtacatagtaaatacataataaatattagctattaatattatttaatatcaaacatgggaatttctttccaataggtacttggcaagattatcaacatgaagataaagttgttcatgaactgtaggggcaggctttcagaagcccctttagaaag

SEQ ID NO: 274213 - DNA, 4991 bp, Homo sapiens
cgcgccggagcgggacacgcatgcgccggtctggacccggcacccagtaacggactcgagctcctcccaccggaagtgggcagccgcgcagcgggaagagccggccgaagcgtggcggccacagactgtgggtaccgggtccgagggactcgcgcttttctctccgtgccatggcgccagcgaaagccacgaacgtggtgcggctgctactaggctccacagcgctgtggctttcgcagctcggctccgggacggtcgccgcgtccaagtcggtgactgcccacttggccgcgaagtggcccgagaccccgctgctgctggaggcaagtgaatttatggcagaagaaagtaatgaaaaattttggcagtttttggaaactgtgcaagaattagcaatttataagcaaacagaatcagattattcttattacaacttaatcctgaagaaagctggacagtttctagacaatttacacatcaaccttttaaagtttgctttctctataagggcatactccccagctattcagatgtttcagcagattgcagctgatgagccaccaccagatggttgtaatgcatttgtggttattcataagaagcacacctgtaaaattaatgagattaaaaagctgctgaagaaagctgcttcaaggactagaccttatctatttaaaggagatcacaaatttcctacaaacaaagagaacttaccagtggtgattctctatgccgaaatgggtactagaacatttagtgcatttcacaaagtattgtctgaaaaagctcaaaatgaggaaattctgtatgttcttcgccattatattcagaaaccaagctcacggaaaatgtacttatctgggtatggtgtggagctagcaattaagagtacagaatacaaagcactggatgatacccaagttaaaactgtgactaatactactgtagaggatgagactgaaacaaatgaagttcaaggatttctctttgggaaactaaaagaaatatattcagatcttagagataatctgacagcattccaaaaatacctgattgagagtaacaaacaaatgatgcctttgaaagtctgggaactacaagatcttagttttcaagcagcttctcaaataatgtccgctccagtttatgattccattaaattaatgaaagacatttcacagaacttccccataaaagccagatctctaaccagaattgctgtaaatcaacatatgagagaagaaataaaggaaaatcaaaaggatcttcaagttagatttaaaattcagccaggcgatgctcgtctatttataaatggccttcgtgttgatatggatgtttatgacgcttttagtattttggatatgctgaaattagaaggaaaaatgatgaatggccttcgcaatcttgggatcaatggggaagatatgagcaaatttttaaaattaaattcacacatttgggaatatacttatgtattagatattcgacattcttctataatgtggattaatgacttagaaaatgatgatttgtatattacatggcctacaagttgccagaaacttctgaagccagtatttcctggaagtgtaccttccataaggcgcaattttcataatttggttctgtttattgatccggcccaagaatataccttggattttataaaacttgctgatgttttctattctcacgaagttcctcttagaattggttttgtgttcattcttaatacagatgatgaagttgatggagcaaatgatgctggagttgctctctggcgagctttcaactatattgcagaagaatttgatatatcagaagcatttatttctatagtacacatgtaccaaaaagtgaagaaggatcaaaatatactcactgtggacaatgtgaagagtgttctccaaaatacatttcctcatgctaatatttgggatattttgggaattcattctaaatatgatgaagaaagaaaggctggagcaagcttttataagatgactggcctgggtcctttgcctcaagctctttataatggtgaaccctttaaacatgaagagatgaatattaaagaactaaaaatggctgttcttcaaagaatgatggatgcatctgtatatttacaaagagaagtttttttgggcacattaaatgatcgcacgaatgcaattgattttctaatggataggaataatgttgtaccccgtataaatactttgattttgcgtactaaccagcagtacctcaatttaatatctacatcagtaactgctgatgttgaagatttctctactttctttttcttggattcacaagataagagtgctgtaattgcaaagaacatgtattatttaacccaagacgatgagagtataatttctgcagtcactctctggattattgcagattttgataagccttctgggagaaaacttctttttaatgcattaaagcacatgaaaacaagtgttcatagtcggttggggattatttataatcctacatcaaaaataaatgaagagaacacagctatttctagaggaattttggcagcttttcttacacagaagaacatgtttttgagaagctttcttgggcaactggcaaaggaagaaattgctacagctatttactctggagataaaattaaaacattccttattgaggggatggataagaatgcttttgagaaaaaatataatactgttggagtgaatatttttcgaactcaccagttgttctgtcaagatgtacttaaattacgtcctggagaaatgggtattgtcagcaatgggagattcttaggacctttagatgaagatttttatgcagaagatttttacttgttggaaaagataacatttagtaatttaggagagaaaattaaaggcattgttgaaaatatgggaatcaacgcaaataacatgagtgactttattatgaaagttgatgcccttatgtcctctgtgcctaagcgtgcatctcgatatgatgtcacatttcttagggagaatcacagtgttataaagacgaatcctcaagagaatgatatgttcttcaatgtcattgctattgttgatccattaacaagagaagcacagaaaatggcacagttgttggttgtacttggcaagattatcaacatgaagataaagttgttcatgaactgtaggggcaggctttcagaagcccctttagaaagaggggacaaaaatataccctttctcttctttgtggatcagaatcactgtcattcattatgagccattcttattgatgggaatattcagttctccttcatgtgtcattgggcagaaaacaggtggcaaaatttttggatattcctgaatcacccctcctaatcctcaacatgattactccagaaggctggttggttgaaacagtgcacagcaactgtgaccttgataatattcacttaaaggatactgagaaaactgttacagcagaatatgaactagaatacttactactggaaggacaatgctttgataaagtgacagaacagcctcctcggggtctgcagttcacactaggcacaaaaaataaacctgctgtggttgatacaatagtgatggcacatcatgggtattttcaattaaaagcaaacccaggtgcttggatactgaggttacaccaaggaaaatctgaagatatttatcaaatagttgggcatgaaggaactgactctcaagcagacctagaagatatcattgttgtattaaacagcttcaaaagcaagatactcaaagtaaaagtgaaaaaagaaacagacaaaattaaggaagatatccttaccgatgaagatgaaaaaacaaaaggactgtgggattccattaaaagtttcacagtaagcttgcataaagaaaacaaaaaggaaaaagatgtcctaaacattttttcagttgcttctggtcatttatatgaacgttttttaagaattatgatgctttctgttttgcgtaacaccaaaacaccagtgaaattctggttgctaaaaaattatctctcaccgacatttaaagaagtaattcctcacatggctaaagagtatggattccgatatgaactagttcaatataggtggccccgttggcttcgtcaacagactgaaagacagaggattatttggggttacaaaattcttttccttgatgttcttttcccactagcagtggacaaaatcatttttgttgatgctgaccagattgtgagacatgatctaaaagaacttcgagatttcgatctggatggagctccttatgggtatactccattttgtgatagccgcagggaaatggatggatatcgtttctggaaaacaggatactgggcatcacatcttttaagacggaaataccatatcagtgctttatatgtagtggatctcaagaagttcaggagaattggagcaggtgacaggctcaggagccagtatcaagctctcagtcaagatccaaacagtctttcaaacctagatcaggatctccccaataatatgatttaccaagtcgccattaagtctcttcctcaagactggctgtggtgtgaaacctggtgtgatgatgaatccaaacaaagagccaaaacaattgatctgtgcaataatcccaaaacaaaagaatccaaactaaaagctgctgccagaattgtcccagaatgggtggagtatgatgctgagataagacaactattagatcatcttgaaaacaagaagcaagatacaattttgacacatgatgaactctagcactggtgtatatgagaaggaaggcgaaagcatgacaggaaacctgccgcctgctggggaagtctggagcccctgctgagacgatttggaagtctcgttaagatcagtgacatattctttaattttaaaaaattgtaattatttaaaacagttatttaatgtattgaatgagtttaagttatataataaatgaccattgagtatttaaaaaaaaaat

SEQ ID NO: 274214 - DNA, 4823 bp, Homo sapiens
cgcgccggagcgggacacgcatgcgccggtctggacccggcacccagtaacggactcgagctcctcccaccggaagtgggcagccgcgcagcgggaagagccggccgaagcgtggcggccacagactgtgggtaccgggtccgagggactcgcgcttttctctccgtgccatggcgccagcgaaagccacgaacgtggtgcggctgctactaggctccacagcgctgtggctttcgcagctcggctccgggacggtcgccgcgtccaagtcggtgactgcccacttggccgcgaagtggcccgagaccccgctgctgctggaggcaagtgaatttatggcagaagaaagtaatgaaaaattttggcagtttttggaaactgtgcaagaattagcaatttataagcaaacagaatcagattattcttattacaacttaatcctgaagaaagctggacagtttctagacaatttacacatcaaccttttaaagtttgctttctctataagggcatactccccagctattcagatgtttcagcagattgcagctgatgagccaccaccagatggttgtaatgcatttgtggttattcataagaagcacacctgtaaaattaatgagattaaaaagctgctgaagaaagctgcttcaaggactagaccttatctatttaaaggagatcacaaatttcctacaaacaaagagaacttaccagtggtgattctctatgccgaaatgggtactagaacatttagtgcatttcacaaagtattgtctgaaaaagctcaaaatgaggaaattctgtatgttcttcgccattatattcagaaaccaagctcacggaaaatgtacttatctgggtatggtgtggagctagcaattaagagtacagaatacaaagcactggatgatacccaagttaaaactgtgactaatactactgtagaggatgagactgaaacaaatgaagttcaaggatttctctttgggaaactaaaagaaatatattcagatcttagagataatctgacagcattccaaaaatacctgattgagagtaacaaacaaatgatgcctttgaaagtctgggaactacaagatcttagttttcaagcagcttctcaaataatgtccgctccagtttatgattccattaaattaatgaaagacatttcacagaacttccccataaaagccagatctctaaccagaattgctgtaaatcaacatatgagagaagaaataaaggaaaatcaaaaggatcttcaagttagatttaaaattcagccaggcgatgctcgtctatttataaatggccttcgtgttgatatggatgtttatgacgcttttagtattttggatatgctgaaattagaaggaaaaatgatgaatggccttcgcaatcttgggatcaatggggaagatatgagcaaatttttaaaattaaattcacacatttgggaatatacttatgtattagatattcgacattcttctataatgtggattaatgacttagaaaatgatgatttgtatattacatggcctacaagttgccagaaacttctgaagccagtatttcctggaagtgtaccttccataaggcgcaattttcataatttggttctgtttattgatccggcccaagaatataccttggattttataaaacttgctgatgttttctattctcacgaagttcctcttagaattggttttgtgttcattcttaatacagatgatgaagttgatggagcaaatgatgctggagttgctctctggcgagctttcaactatattgcagaagaatttgatatatcagaagcatttatttctatagtacacatgtaccaaaaagtgaagaaggatcaaaatatactcactgtggacaatgtgaagagtgttctccaaaatacatttcctcatgctaatatttgggatattttgggaattcattctaaatatgatgaagaaagaaaggctggagcaagcttttataagatgactggcctgggtcctttgcctcaagctctttataatggtgaaccctttaaacatgaagagatgaatattaaagaactaaaaatggctgttcttcaaagaatgatggatgcatctgtatatttacaaagagaagtttttttgggcacattaaatgatcgcacgaatgcaattgattttctaatggataggaataatgttgtaccccgtataaatactttgattttgcgtactaaccagcagtacctcaatttaatatctacatcagtaactgctgatgttgaagatttctctactttctttttcttggattcacaagataagagtgctgtaattgcaaagaacatgtattatttaacccaagacgatgagagtataatttctgcagtcactctctggattattgcagattttgataagccttctgggagaaaacttctttttaatgcattaaagcacatgaaaacaagtgttcatagtcggttggggattatttataatcctacatcaaaaataaatgaagagaacacagctatttctagaggaattttggcagcttttcttacacagaagaacatgtttttgagaagctttcttgggcaactggcaaaggaagaaattgctacagctatttactctggagataaaattaaaacattccttattgaggggatggataagaatgcttttgagaaaaaatataatactgttggagtgaatatttttcgaactcaccagttgttctgtcaagatgtacttaaattacgtcctggagaaatgggtattgtcagcaatgggagattcttaggacctttagatgaagatttttatgcagaagatttttacttgttggaaaagataacatttagtaatttaggagagaaaattaaaggcattgttgaaaatatgggaatcaacgcaaataacatgagtgactttattatgaaagttgatgcccttatgtcctctgtgcctaagcgtgcatctcgatatgatgtcacatttcttagggagaatcacagtgttataaagacgaatcctcaagagaatgatatgttcttcaatgtcattgctattgttgatccattaacaagagaagcacagaaaatggcacagttgttggttgtacttggcaagattatcaacatgaagataaagttgttcatgaactgtaggggcaggctttcagaagcccctttagaaagcttttaccgttttgttctggaaccagaactgatgtcaggggctaatgacgtttcttctcttggaccagtggcaaaatttttggatattcctgaatcacccctcctaatcctcaacatgattactccagaaggctggttggttgaaacagtgcacagcaactgtgaccttgataatattcacttaaaggatactgagaaaactgttacagcagaatatgaactagaatacttactactggaaggacaatgctttgataaagtgacagaacagcctcctcggggtctgcagttcacactaggcacaaaaaataaacctgctgtggttgatacaatagtgatggcacatcatgggtattttcaattaaaagcaaacccaggtgcttggatactgaggttacaccaaggaaaatctgaagatatttatcaaatagttgggcatgaaggaactgactctcaagcagacctagaagatatcattgttgtattaaacagcttcaaaagcaagatactcaaagtaaaagtgaaaaaagaaacagacaaaattaaggaagatatccttaccgatgaagatgaaaaaacaaaaggactgtgggattccattaaaagtttcacagtaagcttgcataaagaaaacaaaaaggaaaaagatgtcctaaacattttttcagttgcttctggtcatttatatgaacgttttttaagaattatgatgctttctgttttgcgtaacaccaaaacaccagtgaaattctggttgctaaaaaattatctctcaccgacatttaaagaagtaattcctcacatggctaaagagtatggattccgatatgaactagttcaatataggtggccccgttggcttcgtcaacagactgaaagacagaggattatttggggttacaaaattcttttccttgatgttcttttcccactagcagtggacaaaatcatttttgttgatgctgaccagattgtgagacatgatctaaaagaacttcgagatttcgatctggatggagctccttatgggtatactccattttgtgatagccgcagggaaatggatggatatcgtttctggaaaacaggatactgggcatcacatcttttaagacggaaataccatatcaggatctccccaataatatgatttaccaagtcgccattaagtctcttcctcaagactggctgtggtgtgaaacctggtgtgatgatgaatccaaacaaagagccaaaacaattgatctgtgcaataatcccaaaacaaaagaatccaaactaaaagctgctgccagaattgtcccagaatgggtggagtatgatgctgagataagacaactattagatcatcttgaaaacaagaagcaagatacaattttgacacatgatgaactctagcactggtgtatatgagaaggaaggcgaaagcatgacaggaaacctgccgcctgctggggaagtctggagcccctgctgagacgatttggaagtctcgttaagatcagtgacatattctttaattttaaaaaattgtaattatttaaaacagttatttaatgtattgaatgagtttaagttatataataaatgaccattgagtatttaaaaaaaaaat

SEQ ID NO: 274215 - DNA, 4350 bp, Homo sapiens
  misc_feature (4091)..(4091): n is a, c, g, or t
  misc_feature (4093)..(4093): n is a, c, g, or t
  misc_feature (4098)..(4098): n is a, c, g, or t
  misc_feature (4107)..(4107): n is a, c, g, or t
  misc_feature (4116)..(4116): n is a, c, g, or t
  misc_feature (4122)..(4122): n is a, c, g, or t
  misc_feature (4125)..(4125): n is a, c, g, or t
  misc_feature (4127)..(4127): n is a, c, g, or t
  misc_feature (4131)..(4131): n is a, c, g, or t
  misc_feature (4138)..(4138): n is a, c, g, or t
  misc_feature (4142)..(4142): n is a, c, g, or t
  misc_feature (4149)..(4149): n is a, c, g, or t
  misc_feature (4152)..(4152): n is a, c, g, or t
  misc_feature (4158)..(4159): n is a, c, g, or t
  misc_feature (4166)..(4166): n is a, c, g, or t
  misc_feature (4171)..(4171): n is a, c, g, or t
  misc_feature (4174)..(4175): n is a, c, g, or t
  misc_feature (4183)..(4183): n is a, c, g, or t
  misc_feature (4187)..(4187): n is a, c, g, or t
  misc_feature (4207)..(4207): n is a, c, g, or t
  misc_feature (4211)..(4211): n is a, c, g, or t
  misc_feature (4213)..(4213): n is a, c, g, or t
  misc_feature (4215)..(4215): n is a, c, g, or t
  misc_feature (4224)..(4225): n is a, c, g, or t
  misc_feature (4227)..(4227): n is a, c, g, or t
  misc_feature (4234)..(4237): n is a, c, g, or t
  misc_feature (4244)..(4244): n is a, c, g, or t
  misc_feature (4247)..(4247): n is a, c, g, or t
  misc_feature (4252)..(4252): n is a, c, g, or t
  misc_feature (4260)..(4262): n is a, c, g, or t
  misc_feature (4268)..(4268): n is a, c, g, or t
  misc_feature (4270)..(4271): n is a, c, g, or t
  misc_feature (4277)..(4277): n is a, c, g, or t
  misc_feature (4279)..(4279): n is a, c, g, or t
  misc_feature (4290)..(4290): n is a, c, g, or t
  misc_feature (4305)..(4307): n is a, c, g, or t
  misc_feature (4326)..(4326): n is a, c, g, or t
  misc_feature (4332)..(4333): n is a, c, g, or t
  misc_feature (4337)..(4338): n is a, c, g, or t
  misc_feature (4345)..(4345): n is a, c, g, or t
cgcgccggagcgggacacgcatgcgccggtctggacccggcacccagtaacggactcgagctcctcccaccggaagtgggcagccgcgcagcgggaagagccggccgaagcgtggcggccacagactgtgggtaccgggtccgagggactcgcgcttttctctccgtgccatggcgccagcgaaagccacgaacgtggtgcggctgctactaggctccacagcgctgtggctttcgcagctcggctccgggacggtcgccgcgtccaagtcggtgactgcccacttggccgcgaagtggcccgagaccccgctgctgctggaggcaagtgaatttatggcagaagaaagtaatgaaaaattttggcagtttttggaaactgtgcaagaattagcaatttataagcaaacagaatcagattattcttattacaacttaatcctgaagaaagctggacagtttctagacaatttacacatcaaccttttaaagtttgctttctctataagggcatactccccagctattcagatgtttcagcagattgcagctgatgagccaccaccagatggttgtaatgcatttgtggttattcataagaagcacacctgtaaaattaatgagattaaaaagctgctgaagaaagctgcttcaaggactagaccttatctatttaaaggagatcacaaatttcctacaaacaaagagaacttaccagtggtgattctctatgccgaaatgggtactagaacatttagtgcatttcacaaagtattgtctgaaaaagctcaaaatgaggaaattctgtatgttcttcgccattatattcagaaaccaagctcacggaaaatgtacttatctgggtatggtgtggagctagcaattaagagtacagaatacaaagcactggatgatacccaagttaaaactgtgactaatactactgtagaggatgagactgaaacaaatgaagttcaaggatttctctttgggaaactaaaagaaatatattcagatcttagagataatctgacagcattccaaaaatacctgattgagagtaacaaacaaatgatgcctttgaaagtctgggaactacaagatcttagttttcaagcagcttctcaaataatgtccgctccagtttatgattccattaaattaatgaaagacatttcacagaacttccccataaaagccagatctctaaccagaattgctgtaaatcaacatatgagagaagaaataaaggaaaatcaaaaggatcttcaagttagatttaaaattcagccaggcgatgctcgtctatttataaatggccttcgtgttgatatggatgtttatgacgcttttagtattttggatatgctgaaattagaaggaaaaatgatgaatggccttcgcaatcttgggatcaatggggaagatatgagcaaatttttaaaattaaattcacacatttgggaatatacttatgtattagatattcgacattcttctataatgtggattaatgacttagaaaatgatgatttgtatattacatggcctacaagttgccagaaacttctgaagccagtatttcctggaagtgtaccttccataaggcgcaattttcataatttggttctgtttattgatccggcccaagaatataccttggattttataaaacttgctgatgttttctattctcacgaagttcctcttagaattggttttgtgttcattcttaatacagatgatgaagttgatggagcaaatgatgctggagttgctctctggcgagctttcaactatattgcagaagaatttgatatatcagaagcatttatttctatagtacacatgtaccaaaaagtgaagaaggatcaaaatatactcactgtggacaatgtgaagagtgttctccaaaatacatttcctcatgctaatatttgggatattttgggaattcattctaaatatgatgaagaaagaaaggctggagcaagcttttataagatgactggcctgggtcctttgcctcaagctctttataatggtgaaccctttaaacatgaagagatgaatattaaagaactaaaaatggctgttcttcaaagaatgatggatgcatctgtatatttacaaagagaagtttttttgggcacattaaatgatcgcacgaatgcaattgattttctaatggataggaataatgttgtaccccgtataaatactttgattttgcgtactaaccagcagtacctcaatttaatatctacatcagtaactgctgatgttgaagatttctctactttctttttcttggattcacaagataagagtgctgtaattgcaaagaacatgtattatttaacccaagacgatgagagtataatttctgcagtcactctctggattattgcagattttgataagccttctgggagaaaacttctttttaatgcattaaagcacatgaaaacaagtgttcatagtcggttggggattatttataatcctacatcaaaaataaatgaagagaacacagctatttctagaggaattttggcagcttttcttacacagaagaacatgtttttgagaagctttcttgggcaactggcaaaggaagaaattgctacagctatttactctggagataaaattaaaacattccttattgaggggatggataagaatgcttttgagaaaaaatataatactgttggagtgaatatttttcgaactcaccagttgttctgtcaagatgtacttaaattacgtcctggagaaatgggtattgtcagcaatgggagattcttaggacctttagatgaagatttttatgcagaagatttttacttgttggaaaagataacatttagtaatttaggagagaaaattaaaggcattgttgaaaatatgggaatcaacgcaaataacatgagtgactttattatgaaagttgatgcccttatgtcctctgtgcctaagcgtgcatctcgatatgatgtcacatttcttagggagaatcacagtgttataaagacgaatcctcaagagaatgatatgttcttcaatgtcattgctattgttgatccattaacaagagaagcacagaaaatggcacagttgttggttgtacttggcaagattatcaacatgaagataaagttgttcatgaactgtaggggcaggctttcagaagcccctttagaaagcttttaccgttttgttctggaaccagaactgatgtcaggggctaatgacgtttcttctcttggaccagtggcaaaatttttggatattcctgaatcacccctcctaatcctcaacatgattactccagaaggctggttggttgaaacagtgcacagcaactgtgaccttgataatattcacttaaaggatactgagaaaactgttacagcagaatatgaactagaatacttactactggaaggacaatgctttgataaagtgacagaacagcctcctcggggtctgcagttcacactaggcacaaaaaataaacctgctgtggttgatacaatagtgatggcacatcatgtaagtattatttaattgatggtgtttaatttgatgttttggtgaattctctgttttcctaagagtaaaatgaaataatctttattctgctgttgctgaacagtttgcagaaaacaaaattgaatctttgaataagataaataaaaaatggggaaaatcatactttaataatttttgacaggttattgtaaaatctctttacttggaattgatttatagaatttattcattctacagttaataaatactttcttagatcactcgtgtattcatgagcaattcgatggtttttagtcatattactcaatgattatttttttctcatcttaaaaggggtattttcaattaaaagcaaacccaggtgcttggatactgaggttacaccaaggaaaatctgaagatatttatcaaatagttgggtgagttatgcaggctgcttttaaatttttacacataaatacgtttttagtgtaatacaaccaagagaatcaaaacaacaattaaaatgttaagattggcctggcgcagtggctnangcctntaatcccancactttggnaggccnagncnggcngatcacnaggncaggagntcnagaccnncctggcnaacanggnnaaaccccntctntactaaaaatacaaaaattngccngncntggtggcgnncncctgtannnncagctantcnggagnctgaggcnnnagaatngnntgaacncnggaggcggagnttgcagtgagcagannncaccactgcactccagccnggacanngagnnagactcngtctc

SEQ ID NO: 274216 - DNA, 1206 bp, Homo sapiens
  misc_feature (1203)..(1203): n is a, c, g, or t
  misc_feature (1205)..(1205): n is a, c, g, or t
tacgctggagtcgtagctatattaagtgtagagataagagaggggagggggcttagtatgacccgatctccccaataatatgatttaccaagtcgccattaagtctcttcctcaagactggctgtggtgtgaaacctggtgtgatgatgaatccaaacaaagagccaaaacaattgatctgtgcaataatcccaaaacaaaagaatccaaactaaaagctgctgccagaattgtcccagaatgggtggagtatgatgctgagataagacaactattagatcatcttgaaaacaagaagcaagatacaagctctacaagaagcatggcagcatctgcttctggggaagcctcaaggagcttttattcatggtggaaggcaaagcaggagcaggtgtcttacattggaggaacaggaccacgagagagaaggggaaggtgccacacacttttaaacaaccagatctcacactaactcactcactatcacaagaagagcaccgagggaatgctgctaacccattcatgaggactctgcccccgtggtccagttacctcctaccagggaattataccctcccacctccaacactggggatgagatttggtgaggacacagatccaaaccatatcgttgtgcttattggccatctgtatattataagtttttttgcaaagtgcctattcaagatttttgctcttttttaagttttggattttgaatttctttggaaaacaaaaaagcccactgagattttgattgcaactcttgttttaaatcagtttggtgaagattaatgtgttgattatgttgagcttccaattcataaatacgatatgtttcttgatttattttggtctttaattactcctagcagagttttagtttgcagtgtacatattttactaagaattttataactgaatgctaatataaatggtatttttaaatttcttgttggttgctaatacatagaaatacaattaatttttgtatattggacttatgtcctgtggctttgctatactcacttattagttctagtagagttcttaggaattttttcataatgggtcctgttatagttgtagagttcacaggattgtcttcacagtggatcatatcttcagcaaataaaaatagttttactttttcctttccaaatagaaaagtggcctcgttggcctcagcggtggagctctcgncng

SEQ ID NO: 274217 - DNA, 369 bp, Homo sapiens
atacatatctagaagtggaattgcctgagcatatggtaactatgtttaactgaggagctaccaaacttttccaaggcaactgtggcagttttacattcccaggagtaatgtatgaaggttctcattctccatattcttgctaacacttatccatcttttttatatagccatcgtagggagcgagaagttgtgtctcactgtggtttgttttgcatttccatagtcctcagcctgtttttatatagcttgaaaactaagaatgctttttacatgttttaattgttgaaaaaaatgaaagcaaaatattttatgacacatgaaaattatctgaaatctaacagtgtctataaagttttattggaatacagc

SEQ ID NO: 274218 - DNA, 442 bp, Homo sapiens
agctactatctccacttcttgattattccatcttctctttgctacttctcttccaatcttaagtattgtgatttgcagtttttgtcttcctcttgctgtattctttgactttatgtctgtgtcattagtgtggatgtttagattcgcattttaaaaattcctactggttgttctgcaggctcattaaacttgccttttccaaaacaacttgttctttttaccacctgtatctgtgataccatcctataaaatagacttgatatctgttatagtgctgttgtccatctggctgccacaggtaaacgttaacttcagtaacttccttatttcctcccactatcagtttttcttattttcttattattattattattgttttcgagatgaagttttgctccagcctggcaacagagtgagactccgtctcaaaaaaaaacaaaag

SEQ ID NO: 274219 - DNA, 135 bp, Homo sapiens
ggacaccctattgaaccattggtgctgggataactggcaagccacatgtaggagaattaaactggatcctcatttctcaccttatgcagaaaactcaagatggatcgaagacttaaagataagacctgaaactgt

SEQ ID NO: 274220 - DNA, 402 bp, Homo sapiens
gtcaagttatgtgcataaaatggaaaagcatatattattacagtgataaaagagtttctttctaggtgatgttattatggactgattttattttcctccttatattttgcatatctcgtaaactctccactataagcagaaaataaggttggagaaaataagaattgaagagctaaatttttttttaacaccaagtgatagaaaactctaaaaatcccattgaagataggatcatagacaaatagtccctgatgcctgtgctgggatagtcacacacagctgcctcacctctgcccccatggtgaggatcccagtggtcagggacagtgacccatttggaacatgagcagttgggtcaaatccacaaataactgttttaaacagcagtcattttatttgaaa

SEQ ID NO: 274221 - DNA, 411 bp, Homo sapiens
taaactgttctgttgagggatatgacagtcttagattctttccttagttacttaaatttagttagtgatgcttttatgttaaaaattaaaagtggccccagcttctaaaccagagaatcagtgctacttattcagggtttgggtaaggggatttattaggcttgttacacagtgtttgaatagtgcttttgtcctccagcttctgttgtacaactcataaactccagcaatccttttgtaacatggttggtcttttgcctttcagatacactgtgcatcatcagtggattgtttaccatattgtatttgctcccatgtttaaatattgctttagatacagtactttggatattgagttgtgacttgtttcttctgctgtttcatagtatacaaaggtgactggcttaagga

SEQ ID NO: 274222 - DNA, 370 bp, Homo sapiens
actcataggaccactctggtgaattgttgaatagattgtgtgttatctgccacacttcaagtactagcatgcattaaaatccctatccctttgccctccaatgtaaaatgatatgaattctgtggcttacacatagctattttttttttttttttttggcctgcatagataaggcaattccgtaaggctgtgttaccattctcctaaagggcctccctgtggggccacagtacatcttgcctaatttctttttaacaatatttatttctgtggtcaagaagaagataaggtaccttagaagtagtcactgttctatctcaatttggatatgcttgttgaagaactcttacaaccacttatttctgggaaa

SEQ ID NO: 274223 - DNA, 229 bp, Homo sapiens
ccagactgttaacttcaggtaacttaagggtaggtatgaccttgcttctcagatcaaatcattagggtctttccttgctgtggttctgtgaggggtgaagagtttaaacaatgacaaaatattttgcaagctaaagagctgaagacaacttaggtgtgtgaggaagggcaggtcagatgagcagacgggaatcctaggacgtgttgcctgcaggacgcggtgcaccctg

SEQ ID NO: 274224 - DNA, 283 bp, Homo sapiens
ttttttgtagatgactaattgaagatgtagctcattgggatcctaaacagatggcccctgacttacttacagtggttggacttatgatttttcaactttaggattgtgtaaaagcaataaacattcaatagacactgtattttaagtacctatacaaccattccgtttttcactttcagtataagcagtcaataaattatataataaattcaacactttattataaagtaggctttgtgttagctgattttgcccagctgtaagctaatgtaaatgttcagaa

SEQ ID NO: 274225 - DNA, 280 bp, Homo sapiens
tggacccagctcacccagtacctgtttctctcaacctcttaggaaatctgaacaggtatgcagcaaccacctccggacaaggccttttcaaagtataattttcaaacatgtaaaaaagatgactcatatatatcatgaacacatatcaaagatctactacgcatcaattcagaaaaagagtgggaactctgattcatggatcattctgagaagctgggtacatgtatttcatgtatttgtaagcattcttttgttttgttttgtttttgagacagggtct

SEQ ID NO: 274226 - DNA, 511 bp, Homo sapiens
ccacaccaatcagtcaatctcacacgcatacacaggagcatatttctgtactgatgcataatgaatgcactcacacacacacacacacgccagggggctcccagcactcttctcccagggttcaggactttgtggagtcagcccgtgcagctatttacctctgttgccctgattgcaggtagactgtcaatcccagaagttgctaggtgctgaggcaggaaaaggaggaggtttcttttagcaggtgctctcctctagcaggtagtgttctatctcttttgcccctggtgatgtcaaaagattcttctgttagcaacctgtgatactgacctgcaactctaggcaccagtcaagtcagccctcaactccccctacctattctccccaactgaaatcaaattgacatccaggtctgtcttggccagggggcttccattggggaaaaaaaatgggacagtgaacctcacctattgaataaaccaaattagtaattagtgacaaaaccaaaaaa

SEQ ID NO: 274227 - DNA, 263 bp, Homo sapiens
agataatggagaacatataggtccagtccatgttgattctgtaggtggcactggagaagtgtagctattaagggacagagctgagagcagaatccaggtttccccaatgccttctctacactgcctcctggcagaaaagaccctgcccctccctaataccccctttccacagccttctgtttcaggagcagcccttccttccactgccatacctctgccccctccaccatccaggaccgtgggaccctgcagctcactagtag

SEQ ID NO: 274228 - DNA, 280 bp, Homo sapiens
ttgagacagcgtctcactctgtcacccaggctggaatgcagtggcatgatcataactcattgcagccttacctcccaggcccaagtgcttctcccatttcagcttcctgagtagctaggaccacaggcacaagccaccttgcctggctaattttttttagaggggattggggtaggggagagacaaggtctcactatgttacccaggctggtcagactcctgggctcaagtgatcctcccgtctcagcctctcagaagtgctgggatgacaggtatgatc

SEQ ID NO: 274229 - DNA, 159 bp, Homo sapiens
cgctccagcactggagtgtgcttaaggtgaaagaataaagaattcagggacaaaaaaccttaaactgaaatccctgtttctcagatgcttgaaggcagcatgctcgttaagagtcatcaccaatccctaatctcaagtaatcagggacacaaacactgc

SEQ ID NO: 274230 - DNA, 415 bp, Homo sapiens
tgggagtcaaagcaaatattgatacatgagctataaaacaccatagaagaccttgagttcaaaactctgtagaatagatttgctgtagaagttgggagcagccttctaggacactggactatgtgtttctgatagctagctaaagaaaaatgaagagcaactggtttgacccacattgattgggatccagagacattgaacgatggtgaggcactgtaagctggtgttgaaattgatgctgggaagaagagtacagtattccccttaccaccttatccatgatttcagttacccatggtcatccgtggtctcataatatcaaatgaaaaattccagaaattgacaattcatatgctttaaattttatgccatcctctgtaatgtgaagaaatctgacatagtcctgctccaccca

SEQ ID NO: 274231 - DNA, 189 bp, Homo sapiens
agccagactatctcaattaaaaacaaataaataaatacatgaagcaacgatccaatcaatcaaaccaacaaattctggaaaggtagagaagagaagggctgacccagtggtgagttcctggggtggtttgatggtttgttctttggcctcctatataccctgtcttatctgttagagcagagtctacaa

SEQ ID NO: 274232 - DNA, 387 bp, Homo sapiens
ccctttatctttcaacactgaaattccttttaccttgtcactggtaccaaggcccttaccaaaattactcacatgttattttgcaaacctctagttattttctccatctttctagcactgatttattcccccattttgctgtcagattgttttttcaattccttcaatttcttttgttggatcatcattgctacctgattgtgcctatatgtgtgtatatatacgtgtgtgtgtgtatatatatacatatatatgtgtgtgtgttttaagtgtcaatatctatgtttacatatgcttatgtatacatgacaggaggggaaggcttttgctgatttaaagtgaaagtaaggcaaaaataaactttttgcttaaagtggagcagtagca

SEQ ID NO: 274233 - DNA, 247 bp, Homo sapiens
cccccgggttccctaaaatccagtcttctatagttgataggcattcacgcacacacagacatttctagacacagaggtatgttaaaaagactgctcctggcaggagtgcttctctatgtgacctgaatatgttttcacatcctgccctcagacaagtccactggagaatataaaaatgctattcgtctgtcttaaaatttcacttcatgtgactcaactatttttaatctacttcaaatattttgta

SEQ ID NO: 274234 - DNA, 414 bp, Homo sapiens
acaattacaatagcaacatcaaaggtcactgatcacaggtcacagtatcagatataatagtgaaaaagtgtgaactattgtgagaattaccaaaatgtgacacagatacaaagagagcatatggttttggaaaaatggtactgatagaccctcaatgcagggttgccacaaaccatgaacctgtaaaaaacacgtatctgtgaagtgcaataaaatgaagtatgcctgtatgaaatatttagtattactcaaagttcgtctactacatggcattctctctaatagtctctcatagtctaatttcccactgtggatatggataaaaaaatacttcatactgtaaaaaagtaagtaaacaagtcagtgaaatgatagtaataaagatggccttccatatgagacttatttctaaaa

SEQ ID NO: 274235 - DNA, 393 bp, Homo sapiens
tctctaaagtgataatgaagatccttaaaatattataaacaaactaggtgaccctggttatttaatattcaattatatatattaagcaaaattcattcacttagaaattttaattaagttaagatatagccagctgggtgcagtggctcatgcctgtaatcccagcactttgggagtctgaggcagactgcttgagcctaggagtttaagaccagcctggacaacgtggtgaaataccatctctacaaaaaatgcaaaacttagccagacacagtggcacatgcctatagtcccagctactggggaggctgaggtgggaggatggcttgagcctggaaggtcaaggcagcggtgagccatgattgcacaactgcactctagtctgggtgacag

SEQ ID NO: 274236 - DNA, 342 bp, Homo sapiens
gaaatcataaagatattaagtataagcatggatttctctgtagagattatctgtactggcgagtctgtgattaggaaatgtcagtttttgtttgttttgcccaagtgtatttcctagatttggtctttttcttgaacaagagtgctaagcagaatctctgattctatattgaaatccaatttttgatttctttgcacaggtgacttattctctattctagattagccctaacagattgatttttttttttaacccatccacctgcctttatttcttctgtggaatgtctgtctctgaatatgatcattttaaaattaaggtttttttttacttttaagaagt

SEQ ID NO: 274237 - DNA, 412 bp, Homo sapiens
ccttaactcacttctgagccatgagatttgggcagggtgcttaaattctccagtttttagtgtcttcttctgaacaatcgtgtcgatcaccactgcctcagagacttgatttacagatgaaatgagggccgggtgcagtgtttcacgcatgtaatcccagcagtttgggaggccaaggcaggtggatcacctgaggccaggagttcgagaccagcctgactaacatgatgagactccatttctactaaaaatacgaaaaattagccaggtgtggaggtgcatgtctgtaatcccagctactcaggaggctgaggcaagataattgcttgaactcgggagttggaggttgcagtaagccgagattgtgccattttgcactccagcttgggcaacaagagcaaaactccatctc

SEQ ID NO: 274238 - DNA, 516 bp, Homo sapiens
taggaatgcctctcctaactgcatcttgctcaagctatatatgactagcaagtttaattagtatttaaaagatcaaatccctttataaaaaggcctactccaaaaatatattttcttatggcaaataaaatataattgatgtacatttattcagtgttttaattatttttattatgtattccttctgcatttgtttgtgtatgaatctaatgatttgccattagaagactggaagcatgtctgtccaaatttctttgtggctcacccacctaaagctatagatcaggatgacatttattatggcagtaatgaagaacaattagcatttaccatatacttgtttccttcacttttatgtcatatgtgtattacctttaaaaactatttctattttatttgtcaacatattcagtagaaattcatatgactgaatcctataaaccattttaaaaggttaacattttcttgaaaatagtacttttaaaagaaataaatagaatttgaaattatacctgt

SEQ ID NO: 274239 - DNA, 453 bp, Homo sapiens
ctcaaaaccataaaagaataaatttatatcatttgaagccactaagtgtgtggtactagatacagcagccaccggaaatgattacagcttcttattcagatttcaggctgcctggtgtaaagtagtcttacccacaacacctgttttcatttcttgctagccctcattattactggaaatgatcacatttctttcttagtttattgcgtgtctccactcgccagcacaccaggctcctggagggcaaagatctggttttgcccacttttttatcccagtacctagaacagtgcctagtaaattgtgggttctcaataaatctttgctacgtgagactgggaacggtagctcacgcctataattccagcactttgggaggctgaggcaggcagatcacctgaggtcaggagttcgagaccatccaggccaacatggtgaaaccctgtctctact

SEQ ID NO: 274240 - DNA, 392 bp, Homo sapiens
tcctggactcaagcaatccacccacctcggcctccctaagtgctgggattataggcgtgagccacctcaccaggcctctgtcctagcagtttcttatcagaagttttcagctcaggccaggtgcagtggcttatgcctgtaatcctagtactttgggaggccagggcaggaggattgctgtgctcaggagtttgaaacagcctgggcaacatagtgagaacttgtctctctttaaataagtcttaaaataagttttcagctcagctttttgaggactattctttgactgcatattatttttaatagtgatttataattcctaaacattttcatttacttttctgactataaaagtaatgtgtaatcattgtagaaaatgtaataaagcaaaa

SEQ ID NO: 274241 - DNA, 692 bp, Homo sapiens
ttccaaaaagaagcctcagccatttccaaggagatacgtcttgtgctgctgggagagcttacactatagtctgaacttctacagagccttttcctactgtaaacctcactcaaaaatgacagccttccatttcacaagaatcagagtcttgctatgttgcccacgtggtatcaactcctggcctcaagtgatcttcctgcctcagcttaccaaagtgttgggattacagatgtgagccacagtgcccagtctgtgtgtgtttttataattggaagtacatgacatcttttacacaatatgcaaatgcatattgaggaaggagggagagcaactatgtctaaaagtaatcacaataagtcttgacccattaactgtacagatcaaaatccacaccaattttagattcagagaacactatgtctttttaaaaatctatttagaaactacttacagtattttttagaaaatgcacaggaacccctgttaagaaataaaatattccttgcaatagtttgctgagaatgatggtttccagcttgatccatgtccctatacctaatgttaaatgacgagttactgggtgcagcacaccaatatggcacatgtatacatatgtaactaacctgcacgttgtgcacgtgtaccctaaaacttaaagtataataaaataaataaataaataaaatattcct

SEQ ID NO: 274242 - DNA, 819 bp, Homo sapiens
aaagaagcctcagcaatctccaaggaggtatgaagttggatcacctctgtccatttcactttgctgatatgaggatatattgagagagagagagtgcatgtgtgtgtgcatatgtgtgtgtgtgtgtccagaccaacaccaggcataatactacaacaagatacgtcttgtgctgctgggagagcttacactatagtctgaacttctacagagccttttcctactgtaaacctcactcaaaaatgacagccttccatttcacaagaatcagagtcttgctatgttgcccacgtggtatcaactcctggcctcaagtgatcttcctgcctcagcttaccaaagtgttgggattacagatgtgagccacagtgcccagtctgtgtgtgtttttataattggaagtacatgacatcttttacacaatatgcaaatgcatattgaggaaggagggagagcaactatgtctaaaagtaatcacaataagtcttgacccattaactgtacagatcaaaatccacaccaattttagattcagagaacactatgtctttttaaaaatctatttagaaactacttacagtattttttagaaaatgcacaggaacccctgttaagaaataaaatattccttgcaatagtttgctgagaatgatggtttccagcttgatccatgtccctatacctaatgttaaatgacgagttactgggtgcagcacaccaatatggcacatgtatacatatgtaactaacctgcacgttgtgcacgtgtaccctaaaacttaaagtataataaaataaataaataaataaaatattcct

SEQ ID NO: 274243 - DNA, 342 bp, Homo sapiens
ggccaatctgcaaggatataattgaaatgaacaacactattaatcaactttatctaattgatatttatacagaaagaagcctcagcaatctccaaggaggtatgaagttggatcacctctgtccatttcactttgctgatatgaggatatattgagagagagagagtgcatgtgtgtgtgcatatgtgtgtgtgtgtgtccagaccaacaccaggcataatactacaacaaggtatgacttgagtgtatatttatttaatctgaatctttaatatattcacctttacttattgttaaaaaaggtactcttctggccgggcgcggtggctcacgcctgtaatc

SEQ ID NO: 274244 - DNA, 788 bp, Homo sapiens
ggagttttgctctgttgaccaggctggagtgcagtggcatgatctcggctcaccttctgtgactgtctggcaaggtcagaggcatcagggaaggtaaaatactgaaactatatttttaaaaataaaagtattcccttttgagtgtgaattaggaatcaatgccccttctcactacttttgtgaaaaaaatcacagctcctgcagcaagtctatgcctgggtaacaaccaacccacaaaatccaagaggaggtccccctctcccgcctctgtgaggcttgaggagcagtatgtatctgggccagcctggtcctcagagtgtggaattaacacctttcctctagcaactgtttgtgctgctgagaacagcacagactctctggcagcctggttctctccagagggaagcctgtgaagcagaagaaacatatggcatctgcactcagggcgcccagttccatccggccttgctataaaatgactttgcctttccttttttaaaattacaaaaataattcaaccaatacataaacatatgaagtgaatcacggagggccttcctgcgatatctttttttgcctaccatttgtcatggaatgggtaaaggggaccacagagggaagagacgctgccccttcgcagggccatggcagtcccctgggctgcgtctccacggtgcttcctgtgaaacgctgttaccacgggcaccgcactggagaccatgaaagggaagagtttgacatctcagctgtctttgctataaatagaaataaataaaccttaactaagg

SEQ ID NO: 274245 - DNA, 411 bp, Homo sapiens
tgagagatataagatactgcatctagaggataagagtaaaatgatatgaaaaatgaccaaatagagaataagaaactcttgggggataaatgaaatgaaagctaaacttcatattcaataaaatgattttaggccgggcatggtggctcacgcctgtaatcccagcactttgggaggaagaggcaggtggatcacttgatgtcaggagtttgagaccagcctggccaacgtggtgaaaccctgtctctactaaaaatacaaaaattagctgggtgtggtggcgcacgcctgtaatcccagctactcaggaggcttaggcagaatcacttgaacctgggaagtggaggttgcagtgagccaagattgtatcactgcactccagcctgggcgatggagtgagactgtgtctca

SEQ ID NO: 274246 - DNA, 452 bp, Homo sapiens
ttttttttgtactgtaaggagcaaggaggttcatagtctggcttctgggaactgatccaaagttccatccatgttccatcttctagggcagacctcttagaacctgtctccttctgtgagacagctgttgtgcaaacgttaaagcctctggtataggccgcctgttactaaaaaatcagaggacattcctgggaagtaaggatcagaaattggaaaggggaattttgagttttggttttaatatgccacttaagtattgaggctagtaggacacactcagagaaatgaatagaaagttaacaggtcccagcagcagaggtcacatgtaatatcaaaactgcccatgcatctatctcaggctgaacatctaacacttgaaaagggtctaggtatcacagagaaccatagggatttgtacaccaataagagggagaaaagttatcttcatatgt

SEQ ID NO: 274247 - DNA, 196 bp, Homo sapiens
tggatgggtcatagttaaattagccatttacttcagaaactgcagaatatccaggtgagctcacgcaaaaagtggaggggaaggaagagattctggatgtggagtgggaggcgtgattgataatttaatttgctctttttggtgaagaggtgggagtattttcagtagtacctggaatattgcattatgttaagtg

SEQ ID NO: 274248 - DNA, 615 bp, Homo sapiens
tagtgagcttgcacctaaaagtcctagttctgctctttgtagtctcctagaatatgtctgaagtcctttctgcatgaaacctctgaaataatacatgttcattttcaaaattttgtaaaacagtcaggtataaagaagaaaataaaattacctatacccccatctgccagagataaaggatattaatggtctttatccttcctatataaatccgtctgtctctatctgtccatctagaatttttcacaaatttggggtcatgaggtgtgtacaaagtggtatgtttgcagaataggagaatcaaaaggagagactggaaagagataagggccgtgaggccaggctcatgtagggccctgtaagccacaggtgagaaggtaggctttgattctaagtgcaatggggagccattggagaagttaaagaaagggaataccacaatgaaattcatgttttgcacagcccactcccactctcttcccacaacggaggcaggaaggcagttaggggcagttacagtcgtcagagtgagagatgaagggatgagaaattgagaggtggacggaagtggcaaaatgtagaggacttgctactggattggctattgggatgtaa

SEQ ID NO: 274249 - DNA, 682 bp, Homo sapiens
tcaacatcgagaaccccaaccaggtggcacagacaaccaaaaaggtcacacaactgtatctggatgggccaaaggagctttcgaggagagaacgagaagagattgagaagcagaaggcaaaagagcgttacatgaaaatgcacttggccgggaagacagagcaagccaaggctgacctggcccgctggccatcatccggaaacagcgggaggaggctgcccggaagaaggaagaggaaaggaaagcaaaagatgatgccacattgtcaggaaaacgaatgcagtcgctctccctgtataagtaaccgcgacccatgggaggagatgccggggacctgggccgcgctgccaggacctctgctgtgtctcgcccaccctgtgccctggcgccgccgcaacagcccctcgtggccaggagccccccatgcctggggcctcctcttcattatggcttgtccctggtcagtcctgtctgatcgaggcctcgcctctctgcccctccctgcccagttcctacccacctggctaaggccagtgcccatttttaaccctacccattgatcatttcaagaaacctctgtttactgtgtggcacccaggcaaaacatgttccacaagttcaacttgtatatttggcagattaaacttgacattatcgtaaaaaaataaaaataaaaaatata

SEQ ID NO: 274250 - DNA, 446 bp, Homo sapiens
tttagaattcagagcccttgctggggggtgcctgggagatggggtaagaagagctttcatttttctggtagatagcatgtaagggggtggttgtcccaggaggcagctgctgacaggtttgctacacccagccccggactgtgttgcctaggtgctcattcagagaggggctgtcatctgggagcctgtgcccctgggtcctcgagggttatggcttgtccctggtcagtcctgtctgatcgaggcctcgcctctctgcccctccctgcccagttcctacccacctggctaaggccagtgcccatttttaaccctacccattgatcatttcaagaaacctctgtttactgtgtggcacccaggcaaaacatgttccacaagttcaacttgtatatttggcagattaaacttgacattatcgtaaaaaaataaaaataaaaaatata

SEQ ID NO: 274251 - DNA, 444 bp, Homo sapiens
tcagctatttcaaagaagaaggactttgaagtgttgaggtaggagcctgtatcatctctttgctggtttgcagttgctgtgttccaccagcaagtagcaattgggactaaattaccagcattcaaggaatgtgctcacatatttcagagctgttgagaaacatttggctggacaaagtcgagttcaaacaagctataaaccaaaccagggtttggtttaggacatccccccagagtgagttccttggtgccgcacctcagctggtggggtgggcagggagtgttgtattagttttagcttccagagccaatcacagtttcaccatctgcctctcccacatccctggcaggcaggctgaggacagcacccacttaaatggtacctagcccattataaatgcaaacctttttatttccttgtaaataaatctctgcttctttccaa

SEQ ID NO: 274252 - DNA, 298 bp, Homo sapiens
ggcggcatttgagtgtggggttaaagatgggtaggagttcatccgtgagcagtgggtaagaaggaggaggtgctttaagtggtggatccacacaaagagggtatgtgccaaacctatgtgtgccaatgccagtggccatgtagaatgctggagatgggtcaggacagttaggctgggacctgggtgtcaagggccttgactatcatgctaagaaattggactttattcttgagcacaataaagagccactgatggctttaagcagaaatcaacatggtcaaggtggcaagaaaagaag

SEQ ID NO: 274253 - DNA, 473 bp, Homo sapiens
cagaatttgtcttattctgatgtaggatgaccaaaacatctggagaaacaaattgggacccagaagccacttgctccacatctgcagttacaaggcagaacaaatttgccagaaccaagctacagatggggaaactgaggcctggagtaaccagtcatattgcttccatgctgggaactctccaatgacatatcgcacaatacagagccaacctcaagttccccaccatagaccacaaggacttgcaagttctaaccttgcccaatctcccttatacgccctcagtccatgtgcctctgtgatgatggattgggtccttcttggcttcctccaaaggggcagaactgctctggaaggttcctcatggcattggcaatgatcttattctatgctgcttaaagagattaaattgactttgctcttgttacataattaatggttaagaataaaattctgaacattttcaaggaaac

SEQ ID NO: 274254 - DNA, 354 bp, Homo sapiens
ctaaaaaaaaaaaaaaaaaaagtcgaaactatgtagtgtctagagtatactcttagggctatctgattctgatttgataggagctaatttacaactctataaattgtaaaagctggtagcaagacaaaacggtttttgtctataaacaatgacattcttgtctatgcaaattcaacccaatagactttgaattgactttcctccccaaggttggaagaatgtaccgtctatactttcatttcagtcgtcttgatttataaatatgtctggtttttgagttcccctttgaactatctgtaacatcttactggttccttcattacagaatgaaataaaatatttaacacgtgttca

SEQ ID NO: 274255 - DNA, 214 bp, Homo sapiens
ttttttttgtagagacggggtctcactgtgttgcccaggctggtctcgaactcctggcctcaggtgatccacctgcctcagcctcccaaagtgctagggttacaggccacctgtcattctcaagtgagccaccatgctcggcctcccttctcttctcatcccatgggagaaagaaaagacacacaaggcctttccatgagcagcagacaaactg

SEQ ID NO: 274256 - DNA, 574 bp, Homo sapiens
tgaatttcttaagtctttgggtagctacagtaactcatatcaaatgcaaaaacagaagtggttatatctattgaatgttgactaattctctacagattttagatattgtttaaaacaacatatgaaaatgtgtttcctactaaaataataacagatgacatttattgtatgcttaacatgtatcaggtcaggcactgtacatttaactttcaaaataattgttatccttttcttcttgtgatgagtaattaatacagtggtatggtagaactggcatagagagagacaaatagaacaataaagtagaaggattagaacccagagacagatccacacatatatagggctatagctcacaacaaagagagcattgtagatcagcaggaaaaggacagaccattcaataatggtgccaggagagttagttctccatatacggtgtgggtaacaagaaaaagaaggaaattggatcccatcctcacacaatatataagaatacattccaaatggaagtaaggtcttaaacatgaaaggcaaaatgctaaagcttttagaagacaatataaagaaagga

SEQ ID NO: 274257 - DNA, 275 bp, Homo sapiens
aagaaaattgaagattggggtggtggaggcagtagggagatgggattgggcacctcccccgtgctggggcctggatttttgtaaataaatttcccaagcgtttctttccacctggagggaaagggggggacgcccccagtgagattcaaatcacgcatctctactcctctgcgtgagtgcgtgtgtacatgtgcactccccaccctgctcccttcccagagggattgctgtgaaatttttttggtggcaaataaagataaatttcattctgttca

SEQ ID NO: 274258 - DNA, 475 bp, Homo sapiens
ggattgctggagcattgccccagagcactgtccctggagcagacagctcacccgcagtaatggagagaaggtggcacagaggggcaaaggcaggcagacggatgcgtgagggggcggcacctgtggaggttctgttttggtgacttgttttctcaatcaaagaataaacaaggcacttacccaagagtaaatgaagggagaaccccagtttctttaaaaaaaaagaagtgtgtaatcccaacactttagaaggccgaggcgggaggattgcctgagcctaggaattcgagaccagcctgggtaacatagtgagaccccgtctctacaacaagttttaaaaattagttgggcatggtgatacacacctgtagtcacagctattcagtaggctgaggtgggaggattgcttgagccaaggaggtcaagactgcagtgagctgtgattgcaccactgtcagagtgagtccctgtctca

SEQ ID NO: 274259 - DNA, 158 bp, Homo sapiens
tgtactcatccctcaagaagagtttgttgactatgattaaattccaaggaccagtgggggaagtctggaaacccaggaatctccatcaggaatctggggctctgtccagctccccgaaggaaactgcgggtcagatgttttgatttttttttttcttt

SEQ ID NO: 274260 - DNA, 277 bp, Homo sapiens
attttagtgctaccatgggaggaaggagaaagaatgactaaatggttcataaaaccaaacaaaccctgaaggttcacgccattctgcccagtgggccctgtggaacttcgtggggcttgtggtttaggcttcagagctttggggcttctggggtttctgtctatattattcctgcctggatgacatagtgaggtcttcactgctggagaagggagggctggtgggccagaggggagaccctgcagaggtgtgcagtgtccttctctgctgttcatct

SEQ ID NO: 274261 - DNA, 348 bp, Homo sapiens
ctaggctcctaatgttctaccactaatagaagccatgtattggcaaacttgtacaaaagagaaccagacttcaccaagaactagaatctgcaatagtaacatgagtcagcaagagaaaaactttcttatctgggaattacgagatttatccttagagctggaaaaggctgacctgagtatgaggagctcattagttacatctcttggacaaaaccatctacttggcaccggtagttaaatctgagcaatttggtgggacctccatctttggaaagaaaagccacagataaaagcattaagaaaataaaaagtatatttttacctgcaaatggtttgaaagagagttca

SEQ ID NO: 274262 - DNA, 153 bp, Homo sapiens
cagctgcactcattgcctgtactgccctggccgacttgaagatgttgccctccattccacgacttgctatggtttgatctgcagttccgtactattagcctttctaagtcttgcatgaaataaagccagatgagttttgttaacccttcacaa

SEQ ID NO: 274263 - DNA, 406 bp, Homo sapiens
acaaagaggagctggtaccattccttctgaaactattccaatcaatagaaaaagagggaatcctccctaactcattttatgaggccagcatcatcctgataccaaagcctggcagagacctctgcccttcttgccagccatatagtggagtcagcattgcaaccacaacgcagatgcaaagtcaattcataccctctcacacacaactacacacctccagctcaagaactgatagcagactattggacatccaggctaatgttctcctttcaatgtcttccttagggaccaatagtgtaggttggggaatctctcccacattgatggccattttatttttatttttaaaatttttttccaactttattaaggtataattggcaattaaaaatcatatataattaaa

SEQ ID NO: 274264 - DNA, 223 bp, Homo sapiens
gagaagaactaagttatgcaaatcaatgcacccatcaatcgagcatctcaagatctcaataaacaggaggcaacgggaacaccttaaagagggcaataaaggagtgcaatttagttgtattctgtgttgcaacagagaagagcctcgggatcatcaaaacccaaatctggccgggaacagtggctcatgcctggaatcccagcactttgggaggccgagacgg

SEQ ID NO: 274265 - DNA, 690 bp, Homo sapiens
cattaaaaaaaatacacacacacacatatatatacaaaacaacaaatacatatatatacaaaataaacaaaaacagtatttcagcagagcaattctaactgaaaacaatttcagagctacagatgccgccaaaatttttggccttaagtgtacaaatagggcctagattaaagaaagtaatttcccagtctcaggcactagagaaagagaaagaaattgtttaacaagacactgaaagtcaagacagacggtaaggtgggaaattggcagtcagtctaagggaaagccgagggattgcaagttaagtgcagatggagctcagatctgttgctcccaggaaacagtcttcccaattgtctagaatggttaaaaaacaaaaacaaaaaaaacagtatatcaggaaaatggggagggcaaagcatgaagggagttgtttgaatttatttttgatttaaggcataggtcagggaagtagtcctgaaatcaaaaaggaactggcgggcttcactgcttagtgaactcactcaacacccttctctgtggctggtctctgatcactcttccactttgcccaaggaccatcttgctgaatacagaaaactcaagttctttaaagacagcaactattactgtagattctatggcctcatcgtctgtccctagcagagtttaaggcacactataggtggt

SEQ ID NO: 274266 - DNA, 340 bp, Homo sapiens
aaataggccaggctatgatagccaatgtgtgaggtgctatggtttcatcttctttacagagggtttggagtttactcatctttctgttttccatagtgtctactacagcattgtaactaacagttttgtttccaattctagaggcagctgttgtaaagtgggatgataacagccttattggattagtgttgaactagacacattaccaccttgaaggaagaccacagaagggtgctttctgcatcaccttactctccccttggcctcagtatccatatgaactcttctcattaattcttttgaccttcctgtcttttgatttcgaccttcctgcctttct

SEQ ID NO: 274267 - DNA, 401 bp, Homo sapiens
gcaatgcatttacaatctgccttactccacaagtctataggcctttttatcttttatccccactgtctggtagaatacctgatacaaagcaaagggagatcagagccaggtgcgttggctcacacttgtaattcaagcactttgagagggtgagatgggcagatcatttgaggtcagcagttcaagaccagcctggccaaaatggtgacaccccgtctctactaaaaatacaaaaaaaaaaaaaaaaattagccaggcatagtggcaggtgcctgtagtcccagctacttgggaggctgagtcaggagaactacttaagtccaggagatggaggatgcagtaagccaagatcacgccactgcactccagcctgggcaacggagtgagactttgcctcaaag

SEQ ID NO: 274268 - DNA, 619 bp, Homo sapiens
ttcagcacaaatatatctatgtgatacttcagaaatatcaaatatatttatgtgatacttcagattttttgcctggctacccacaatgctagtgcattgtattaagtctaaaaggataatcattttgcatttaagtaccttgttgacattcaagattgtcttgtccacatgtatgtaggagtgaccaccatcttttgctgcacttggctatttaattgattttgtgggcactgtcaactatgcttagtcttcagtaaagaccttcccataaagagcgagctttgaacagcatgttatcaaattttcccagttgttttctgagattatataattttaagctgagatttgtatagggagtcagtaaagcatcaagctctgaagcccagctgcctggatttgaatcatggctctcctacttataacttttaaatcttgggcaagtgagttaccctctgtgccttcatttcctcatgtaaaatgagagtaataacagtaccttttacataaggtcagtgtaaggattcaatgagttttcatgtaaaacatttaaaatgatacttggcatgtaggaggtattcaaagaataataaagataacaatttgctgctattgccattac

SEQ ID NO: 274269 - DNA, 153 bp, Homo sapiens
tatcacacagagcaatttatttaagtgcattttcttctaacgtgttttttccttaatgcaaatgtaaaattttgcattctactttttcttttcttttggcttgatctcatagcatgtttccatgccattacatatatttgaccccacttcatt

SEQ ID NO: 274270 - DNA, 729 bp, Homo sapiens
cacaatggccagggtggcctcagctcagggcctctgtgacatcaccaagggcctggcaccaggtgcccagtcttccagttgcgagggcaagcaaacccgtcatgagcaactcccttccccatctctgctcaccatgtggacgctgaaatcgtccctggtcctgcttctgtgcctcacctgcagctatgcctttatgttctcttctctgagacagaaaactagcgaaccccaggggaaggtgccgtgtggagagcactttcggattcggcagaacctaccagagcacacccaaggctggcttgggagcaaatggctctggcttttgtttgctgttgtgccgtttgtgatactgaagtgtcaaagagacagtgagaagaataaggagcagagtcctcctggccttcgaggcttcccatttcgcactccactaaagaaaaatcaaaatgcttctctttacaaagactgtgtattcaataccttaaacgaacttgaagtggagcttttgaaatttgtgtccgaagtgcagaatcttaaaggtgccatggcaacaggcagtggcagtaacctcaagcttcgaaggtcagagatgcctgcagatccataccatgtcacaatctgtaaaatatggggagaagaaagctctagctgaatggatttgtgtgtcaggagagaaaaaagttgagtgttgacaaactgtatgcaaactaataaaactattctgaagaaaag

SEQ ID NO: 274271 - DNA, 760 bp, Homo sapiens
cacaatggccagggtggcctcagctcagggcctctgtgacatcaccaagggcctggcaccaggtgcccagtcttccagttgcgagggcaagcaaacccgtcatgagcaactcccttccccatctctgctcaccatgtggacgctgaaatcgtccctggtcctgcttctgtgcctcacctgcagctatgcctttatgttctcttctctgagacagaaaactagcgaaccccaggggaaggtgccgtgtggagagcactttcggattcggcagaacctaccagagcacacccaaggctggcttgggagcaaatggctctggcttttgtttgctgttgtgccgtttgtgatactgaagtgtcaaagagacagtgagaagaataaggagcagagtcctcctggccttcgaggcttcccatttcgcactccactaaagaaaaatcaaaatgcttctctttacaaagactgtgtattcaataccttaaacgaacttgaagtggagcttttgaaatttgtgtccgaagtgcagaatcttaaaggtgccatggcaacaggcagtggcagtaacctcaagcttcgaaggtcagagatgcctgcagatccataccatgtcacaatctgtaaaatatggggagaagaaagctctagctgaatggatttgtgtgtcaggagagaaaaaagttgagtgttgacgggcgtgtgttctaagagaatacaactatggtgcccaagctaaagagtaaagatctgtggcggccagact

SEQ ID NO: 274272 - DNA, 575 bp, Homo sapiens
  misc_feature (469)..(469): n is a, c, g, or t
  misc_feature (474)..(474): n is a, c, g, or t
  misc_feature (491)..(491): n is a, c, g, or t
  misc_feature (496)..(496): n is a, c, g, or t
  misc_feature (530)..(530): n is a, c, g, or t
  misc_feature (539)..(539): n is a, c, g, or t
  misc_feature (563)..(563): n is a, c, g, or t
tgtgccaataaaactttatttacaaaaacaggtggagggccaaatttggccatagtctgccagtgcctgcactcgagcactgctagaaccatcttttcttaaatgagcccaactgtcttggaactgtgtcaaaaccagcaaagtccatgatattattgaccttgaatatctttcttgacaggagcagagtcctcctggccttcgaggcttcccatttcgcactccactaaagaaaaatcaaaatgcttctctttacaaagactgtgtattcaataccttaaacgaacttgaagtggagcttttgaaatttgtgtccgaagtgcagaatcttaaaggtgccatggcaacaggcagtggcagtaacctcaagcttcgaaggtcagagatgcctgcagatccataccatgtcacaatcttttgtaatctttcccttgagtggggggggagctgggaaaacaatgactttgtnttacntaaaaaccccatagtanccccnaaaacttccctggcaacccttgaaaaaggactgngttaaccantttaactggggaagggcctttttnggcattttgaac

SEQ ID NO: 274273 - DNA, 1540 bp, Homo sapiens
  misc_feature (1151)..(1152): n is a, c, g, or t
  misc_feature (1230)..(1230): n is a, c, g, or t
cacaatggccagggtggcctcagctcagggcctctgtgacatcaccaagggcctggcaccaggtgcccagtcttccagttgcgagggcaagcaaacccgtcatgagcaactcccttccccatctctgctcaccatgtggacgctgaaatcgtccctggtcctgcttctgtgcctcacctgcagctatgcctttatgttctcttctctgagacagaaaactagcgaaccccaggggaaggtgccgtgtggagagcactttcggattcggcagaacctaccagagcacacccaaggctggcttgggagcaaatggctctggcttttgtttgctgttgtgccgtttgtgatactgaagtgtcaaagagacagtgagaagaataaggtaaggatggctccattttttttacaccatattgattcaatctcaggagtctcagggaaacggatgttctagtgagtctaggcggcaccgttgggtataatgaaccgacctcatggtcctgggcaaagctggcaaattcacttcctgatgtatccttagtgaagacaatagtccccacatccacagatattgggacaaacagtggaagatgacctctagtttcttggctcaaagttcttctggttagatggattttttcaaatgtaggatagattcaagaactcagccgggcgcagtggttcatgctgtaatcccatcactttgggaggccagggcaggtggattgcctgaggtcgggagtttgagaacagcctggccaacacggtgaaaccccatctctactaaaaatacaaaaattagctgggcatggcggcgtgtgtctgtaatcccagctactcgggaggctgaggcagaagaatggcttgaaccctggaggcagaggttgtggtgagctgagatcacactactgcactcctgcatgggcgactgagactctgtctcaaaataaagaacttatggtgtgttttagaaggtcaaaattatattattcacagggccaaattcactgttcccttgctttttacatttttcctagtgtttgacttactgaaaattcctgagctaaatggaaatgatatcatcccaacaaaatatgaaacttctgtaaggagataaaggtgtaggccgggcacagtggctcatgcctgtnntcccagaactttgggaggccgagacgggcagatcacttgaggtcaggagattgagaccagcctggccaacatggtganacctcgtctttactaaaaatacagaaattaggccaggcgcggtggctcacccctgtaatcctagcactttgggaggctgaggcgggtgaatcacgaggtcaggagttcgagaccagctgggcaacatggtgaaaccctgtctctactaaaaatacaaaacctagctgggcgtagtggcgggcgcctgtaatcccagctactcgggaggctgaggcaggagaatcacttgaaccctggaggcagaggtggtagtgagccgagatggagccactgcactccagcccaggtgacagagtgagactctgtctca

SEQ ID NO: 274274 - DNA, 468 bp, Homo sapiens
ggcacccctttgggtcgatttgtgcagctcgatttcattaagtgactggtgtgagttgtgataaagacaattccgtttaggtttccaagctgcgtcctgggcctggagactgagacagagatccacggactgcagtgcaggcagcccaccccagctccgagtcatataaggtaacccagacaaccacctacgaatttaaagctcctataagttgccctttctgcatccgaagtgtgatatttgaaagttaaaaacgttatcttacatacatagatcttaaaacgtatcttacaccacaacctactcacagatgcaaaggcagtggtcatggtcttccattgcttggggtcctggggccgggtttgaggctgaatgtcagggtttcctttgccataacctcattctgcaccacgtgctgtcagccaggcagccaatgtggacttggaggctggcatctgctgggcactg

SEQ ID NO: 274275 - DNA, 1232 bp, Homo sapiens
gccctccccgcccagccgcctccccgtcgaccacccagggctggggcgagccaggctgcctttcgaacttgggggcttctcctcttgtctcccactggtgctctggccgtgaatccatccaggcgccaggagatgacaatccggtaccaaggccggcagtacaggctgaggatggcatttctccaaaaggtttccaagctgcgtcctgggcctggagactgagacagagatccacggactgcagtgcaggcagcccaccccagctccgagtcatataaggttgaaatatcagtaaaaaacatgcagaaccaaagatggggaccaaaatccaaagccagagggtcctggaaatcagagggtcttacaacataacaggcagtacaggccatggctcaggctaggcgtggaacagactgcagttctcttctacaaatcaatctagactggacagacagaactccaagggaggaaagaaaaatgaatctgatgttacttcttgaaaccacattttctgaagtcaccatttttatgtatctatcaactcatcatttttatgtatatatcaatatgattttatgatcttattttttcctactaatgtgatgaattaccttgattgattttagaatattaaatcacttttgtattcctggaataaaccctagatggatgcttgattttttctaattccttagcaaaaatgctaatattttatttaggattttgcatctatattcacaagtgaggatttttttcctctcctgacaccaaccaattctccaacacaaactgagtgtcctacaattcaatttaattctgacactacccagagttagcattagcctccacagatttaaggcctcagccctacaagactgtcccaatcagactccagttgcaagtcctgggccacccatacttctgggcaactggttacaaattgggggttcttatgaccacctcccacaggcttgacaatttgctagaatgattagtggaaagcaagaaagtgcttaacttaatattactggtttattacaaaggatacaattcaggaagagccaaatggaagtgatgcatggagcaaggcaagggagaatgagcacagagctttcctaccctctccaggcacaccactctcccagcaccttgatgtgttcaccaacctggaagctctctgaaccccatcatttagaggttttaatggaagtttcattacataggcatgactt

SEQ ID NO: 274276 - DNA, 225 bp, Homo sapiens
tctctgttcttaacatgctctttttttctgccttcttaaatgtatggaatatagttaaaataactttcaatgttcttatctgctaattctatattttttgtcctgggtctgtttctgttgtagaattttttgcctcatggtttgtattttcctgccttttgtgtgcctagtaattttttattggatgctagacattgtagagtttaccttgttgagtgctagcta

SEQ ID NO: 274277 - DNA, 505 bp, Homo sapiens
ggtcaggttttccttttaaaaggaatgttgaaatatattctttcgaacaagagaagttcaccttatttgtgtttctcctgcttaattgcaatccttaaggaaagtgatttttcagtgcctaagcacagagctggaagctcaataaatgttagttttgttggtttatacgtgaaattgattctcaagtaatagttaagctcagaaaacatataaacaaggctttttgggagagacttcagggtcccatttaacctacatctcctaatattctattcatagaggaaactgatgcctcatggtctctgagtacatctatcccaccattcagttcttctttgggtttcctgtactaatcattgcagttatccttttcctgcaccttacttccttgggctttttgtttaaattaaccagctacctatctccttttcaagtagttacatactatttcttacccttataagacaaatttattaagtatattacacgcttgtacttggatgag

SEQ ID NO: 274278 - DNA, 1263 bp, Homo sapiens
tggactaatacatttgccatctcaaaacacctttattctactttcctgacttgagtggagaagcgagttcagggtagcttggaactgtgaagagtttttgcttcttctctcttgtgcacaagaatataaaatgcttggagccttctccttggacatatattttataaggtttatgtgtttgtattccattttgaatctatattactgcatttgacattcaaccagtttttaaccttaagaataatgagagagttctgaaaagataagcttaataataataacttacttagttgcttacagtcacttttacataaattatctcactgttctattcaggagaattcagtgaaataggaaagatatgtaatatccattttatagataagaaagccacacttagaacacttgtcccaatttacagaacagaaactcgggctttctgtagcatgagaatcagccaggagaactttgtatccccaacaagatgttatagatgttttttgatttgcaatttagataaaatactttgcagcttggaatccatagatttcagtttttctgttgtccaaatgtgaaaagaatttaaatgatgtattggattaagcacagaacatttcaacatgtaatgaaatagattttttttaaggtttttcacatatacctttttttaattgtcagataaaatcatcttaccaattatttatttaagtgagtacaggaggttgcttatactgtttagaataaagttaccatttataggctaaggataaagtaaaggagaccacagtctacaacacagcatgtgaattggatggttaaatttattagcatacaaatttctaaaggcggcaacagagagctgcattaactgcaaaataagctttttttcactgctgttgttgaagcatttataagaaaatttaaagctcagtggactgaaataaattgtgcacattttttcacacatcttgattgacatttctaacaaacttttgctactatgtgacaatatattgctctgctaccagcatagtacactcgaatataacattttcattatttaccctccacttaacattttccaaaatgtcagattgccaagtgtggtggtgtgcacctgttgtcccagcttactcaggaggctgaggcagaaggatcactagagcccaggagttcgaggatgtattgctccatgatggcgcctgtggatagtcactgcacctcagcctggacaatacagcaagacaccatcttttaaaaacc

SEQ ID NO: 274279 - DNA, 831 bp, Homo sapiens
tggactaatacatttgccatctcaaaacacctttattctactttcctgacttgagtggagaagcgagttcagggtagcttggaactgtgaagagtttttgcttcttctctcttgtgcacaagaatataaaatgcttggagccttctccttggacatatattttataaggtttatgtgtttgtattccattttgaatctatattactgcatttgacattcaaccagtttttaaccttaagaataatgagagagttctgaaaagataagcttaataataataacttacttagttgcttacagtcacttttacataaattatctcactgttctattcaggagaattcagtgaaataggaaagatatgtaatatccattttatagataagaaagccacacttagaacacttgtcccaatttacagaacagaaactcgggctttctgtagcatgagaatcagccaggagaactttgtatccccaacaagatgttatagatgttttttgatttgcaatttagataaaatactttgcagcttggaatccatagatttcagtttttctgttgtccaaatgtgaaaagaatttaaatgatgtattggattaagcacagaacatttcaacatgtaatgaaatagattttttttaaggtttttcacatatacctttttttaattgtcagataaaatcatcttaccaattatttatttaagtgagtacaggaggttgccgcctttagaaatttgtatgctaataaatttaaccatccaattcacatgctgtgttgtagactgtggtctcctttactttatccttagcctataaatggtaactt

SEQ ID NO: 274280 - DNA, 482 bp, Homo sapiens
ttagtttggtacctctgttacagttattaactgtagttcatacttcacaacagggctcattttttagtaccttttatgggttttgacaagtgtgtaatgacatgtatctaccattacactatcatacagagtagtttcattgtcctcaaaatgccctgtgctttaattcattctcctttcctccctcctctgaatcactgatgtttttaccctctccatagttttgcttttgccaaactgtcatatagttggaatcacacagcatataacttttcagattgtcttctttcacttaataatatgcacttaggtttcctccatgtctaaatgtggcttaatagcgcatttctttttatcgctgaatatttttcattgtatggatgtaccacagttttgttcatccattcacctattgaaagacatcttggttgcttacaagttttggcaattgtgaataaagctgctataaacattcatgtgca

SEQ ID NO: 274281 - DNA, 296 bp, Homo sapiens
gtgggaactctctccacccatcactttacaagtggtgaggtaggattggaacgtgatggcccaatgtatttaggagaggttgggttaaacaaagtataaacagcttccttattgcaggactttaagagtttttaatatacattgtgactgccccaaaaagggacagttacagcagattttcctagactactttattcccaaatccttttttattcaaagagcagtttccagcactagacagagtttatcgaaatcagtcgaagtgccatggctcagcctgtaatcccaggactttg

SEQ ID NO: 274282 - DNA, 378 bp, Homo sapiens
ggtcttggaagaagacaggaagatgaggaaaagtttggatcagtgtagagacttgtcaaatagttgtaattaaaaaggtgacagaaggatggacagtgatcaccaggcttagaaggtctcacatgaaaatgaggagcttgctgggaactggagccaaggtcacttttgttttttccttagcaaagaacgttgctgcacgatgcccttaacgtggagacgtgtgaaattttgaacatcagggtgataatttagagtgtatctggtggaaggaaattttaggcagcaaagcttaagaggtgtcctgtctgtgtcgaacagcctgtggtcgtatatgtgaccagagaaatgacctcatggtgaaacatatttaaaagtttg

SEQ ID NO: 274283 - DNA, 406 bp, Homo sapiens
gagagagatatgaactagagatataggctggagtgtcattaacatcatgggaacctctagattcaataaaagcccatgggaagaaggtgcagagagctaggagagaaaagagttgaggccagagccttgcaatggtctgctacaaacatcagtttaaaaatgaatgtataattgcaaaccacgatgagtgctataatgaagaggaacctggtgcttgttagagaatataacaaggaaccagaccccatctgggaatcaggcagggcttcctaaggcagtaatgtttaagctgaaagctgaagggtgagtagaagttacacagaatgtctgacatccacagtaaatgccagcttatttaaacatcaggctgagctaaaaggaattcaaaaggtaaacccaatgcttc

SEQ ID NO: 274284 - DNA, 469 bp, Homo sapiens
taaatataaatagacatccaaggaccaccaggcatttgagtacatttggcacaacagaagagaaaggccaagtgaattaacaacaaaataaaaaataaacaataacaacaaaaacagcctgtggaagaaatagaaaaaatttagggaactgtgaaggtcttttgttagtatactcaaaataatctggccaggcatagtggctcacacctctaatcccagcactttgggaggctgaggagggcagatcgcttgaggccaggagttcaagaccagcctggccaacatggcaaaacctcatctctactaaaaatacaaaagttagctggtcacggtggctcacacctgtagtcccagctacttgggaggctaaagtatgagaatcgcttgagcccgggaggcagaggttgcaatgagccaacatcccatcaatgcattccagcctgggcgacagagcgagaccctgtctaaa

SEQ ID NO: 274285 - DNA, 475 bp, Homo sapiens
tttttttaattgagttatttatgcactaacatttaccaaatgggagagttcacataaatacctggattcttggcctgtctttgaaaaatggaagcatgggagtcctggacctgcattcctacatagctgtaatagaccagggccaagaagcagctgcctgctttccaccacacctgtgctccacagagtggcccgtgaccaagcactcttcatgcattacattaccggccatgcccctgcagccttctaagactgcaaccccatctttcatcttctatgattcaggaaagaagggagggaactggaaccttttccagggtcttggagccaggcagagccttgtccttgggctggagctaagacttcctttttttgtttgttttgttgtgttttttttttttgagacggagtctcactctgtcacccaggctggagtgcagtggcgtgatctcggctcactgcaacctccgcctcc

SEQ ID NO: 274286 - DNA, 378 bp, Homo sapiens
gtgagaacatgcggaagactgcacccaactttcaacgccaaatgcaagccccaggtggttttacttgttcttctgaccagctagttcccatgcataagtttgattaatttgctagaacagcacacagaactcaggaatgaccaaccaaatggaacagaagcataaggcctgggagaagggacatgaagcttccatggcctctccaggcacgcctgccctccaggaatttccacgtgctagctatcccagaagctcctgaacccagtcttttagagtttttatggaaattccatttatacaggaatggttgattaggcattggccattagtaatcagctcaacctcagtccctctcaattacaactgtagctaaagaga

SEQ ID NO: 274287 - DNA, 389 bp, Homo sapiens
ccacagtcacaaatttttatttaccatctgctattcccacggtggcaaatgcagaggtagaagtagatgtttggcaggtcacctctcagtgtagtctctgtccctatgtctcaaagatgcagagctgcctcagaaaagggcactggaaccacagaactgattccagttgattgtaatgaatgcagaccccacattcagattacatatggaaaacaacgaagctttattagtactaggctcattcctgggaacataagggggaggggtggagatgcagttcacatactaacccaattaactttcaaatggttttgctgaaaccaggagccaattagaaagaacgtgacatttgcaaaactctgaaatagttgaatagcaactgtgtttac

SEQ ID NO: 274288 - DNA, 569 bp, Homo sapiens
cagtacatgacatagtcactaagttaaattgcactttacgtggcttctattatatcacaattgttttttacttgctcctattatttctcaaaatgtagtcttcagaggaatagcataatatagtgagaagaacactagactagaagtagattcttccactgggcttcttaatacagcagtttctaaccaatcacacacttctctaactttgcgttctttacccatcaaatggaaatgatactactaccttccctcctgtttcctcatggagagcatagaaataaaattaggatatcatgagtataaagggcaaagcaaacagattgtatcattatcatctttttgtcattttggcaagttatctcagtctaattttgtattaaacattctctcacagtaaaagggaccatctgcccttacctctgaagataaactcttgacaagaacagcaagacctctgtgaaaatatgaaaatgacttttatgtatggcagattaacattttttctctccttaccaactctttacttatgctatttttatttaccaaataaaattccatgaaataat

SEQ ID NO: 274289 - DNA, 460 bp, Homo sapiens
gatgtgtgggagggggtggaaggtggcataaaaacgtgaaagtttacagaagttttattcataagcaccaaaacttgaaagcaaccaagctatgtccttcagtaggtgagtagatacataaactgtggtacatccagacaactaaatatcactcagcgctaagaagaaatgagctatcaagccgcaaaatgatacggagtaaacttaaatacatattacaaagtgcaggaagccagtctgaaaaggctacatactctatgattccaactatgtgacattcttgaaaaggcaaaactatggggacagtaaaaagaacagtaattgccacgggtttgggggaaggagaggtgaataggcaaaacatagagagttttttgtttgctttttgtttttgagaaagggtcccactttgtggtccaggctggagtgcactggtgcaatcttggctcactgtagcctc

SEQ ID NO: 274290 - DNA, 217 bp, Homo sapiens
cctgcctcagcctctcaagtagctgggaccacaggtgcatgccaccacacctggctagttttttactttttagagatggggtcttgattgttgcccaggctagataatgcatttttgacattaaatccccccaaaatggtgttgcatccctcccagagcatcctatcgtggggtttatgatactgacctgtcttttactggtgatgacggtcatgat

SEQ ID NO: 274291 - DNA, 347 bp, Homo sapiens
aaagccactagacagcaacttttaagactccaccctggggttccccactccaggggtcaccagaattctgaggcaggcactctgctgtgtcccctgaggcccacagcagccccagggtctgggggactcagggaggacctcctagcatcctgacctcctccagccctggttgcagcccacagacccagatcaatatggccttaatggtgtggctcccagggattaagcagccaaggccagagacctgaatgggtttagaggctgagaagggatttaatcaaggtagccctccatacagttcctcctgacaccctcctctcctgtttccagtccctggagatgacaaa

SEQ ID NO: 274292 - DNA, 419 bp, Homo sapiens
gatccccaaattcatatgttgaagtcccaactccaaatgtatttggaggtgggcctttcagacgtaattgagtttagatgacgtcatgagggtggagcccccatgatgacactaagtccttctaagaaaaggaagagagtctgagccctcctctacaccatgtgagggcacagagagagagcagccatcaacaagctgagagaggaggactgagaatgaaacctacctcgccagaaccttgtcatatcccttcccggtttccaaacgagtgagaaatcaatttctgttgtgtaagctactcagtgtatgaaactttgttatggcagccagagcagattaatgcatgcttcttggactttgtttttaactcaatatgaaaaacatatgttttaataaaaaaattaccccattcatctgta

SEQ ID NO: 274293 - DNA, 317 bp, Homo sapiens
aatgtacagtcaactgtatattttgtgtttcaggaaactgttaatgacttgggctttggaagtagctgttgtaatgaagaagtccgaaacatatgcacctttattctgtcttccgtctttccataaattttgcaaaggccttttagccgacagtaagactctggttttttttttctattttgtttatcagtccttaaaagggtctttggtaatgggagatggtcatgaatcgagctcttttcctgacctgaagatgtgtaatcctcattttaatgacagatacacagtcttgattttttttcattcttagtattaga

SEQ ID NO: 274294 - DNA, 291 bp, Homo sapiens
ttgagacacttaacctcccggcctccaggagcctggagcctgtcctccctgggctctgagctttgtgcagattaactgcctgctgattacagagagctatataaatgctaagtggagtggagatagggcgatcctgggggacgggagcccgtggtccaggctcccagctgtctgcagaggcagagaggctccatctgccatgcccacccctttcccctaccctgccccaggcacgttgcaggtcatccacaggagagagagcctccaggaacaatggaaacttccctagag

SEQ ID NO: 274295 - DNA, 592 bp, Homo sapiens
caccatgtcccgctgcgcccgctgctgctggccctggcccttgcctccgtgccttgcgcccaggcgcctgccccgcctccgccgacctcaagcactcggacgggacgcgcacttgcgccaagctctatgacaagagcgacccctactatgagaactgctgcgggggcgccgagctgtcgctggagtcgggcgcagacctgccctacctgccctccaactgggccaacaccgcctcctcacttgtggtggccccgcgctgcgagctcaccgtgtggtcccggcaaggcaaggcgggcaagacgcacaagttctctgccggcacctacccgcgcctggaggagtaccgccggggcatcttaggagactggtccaacgctatctccgcgctctactgcaggtgcagctgatgcattgctggtctctcatctgcagcttccacagagtgccaagcccctcactcagcccatccctgggctctgctccggggccccaagacccaggaggaggagcgttctgcctgccccctcccacctcccctgcaatacagcctttgtgcagttgtaaaaaacaacaaacaacaaaacaaacaggg

SEQ ID NO: 274296 - DNA, 664 bp, Homo sapiens
cccagactccccagcccccacccagtctcaggcttctagaactcaccagactctgggtctctgagagcccctggaaggaattcttgattacatttcaggtgcagctgatgcattgctggtctctcatctgcagcttccacagagtgccaagcccctcactcagcccatccctgggctctgctccggggccccaagacccaggaggaggagcgttctgcctgccccctcccacctcccctgcaatacagcctttgtgcagttgtcttgaaaaaaaaaaaaaaatcaatacaagaaaaaaaacaaaaacaaaacaattttgacaacaaacaaaacaaaaaaaaaaagggggggcgcggcgcaaaaaagtgactcctccccaacgggaaggggccccaacagagtgaggcgagcccccagcaccgtttttctgtagaccaaacaagaggtggcgcccccccaagtaggagagggccggcgtatatatagacaacgcaaagaggaagcagcggcggcacgacgtggtactatacaacagcgggtctggtcgcgtggggaggacaacacgtggcgtacgaccgtggagaactcatctggggagagcgaccgagcacacataacttcctgggggggtgagacaacaacattggtgacaacaacatcacca

SEQ ID NO: 274297 - DNA, 562 bp, Homo sapiens
caccatgtcccgctgcgcccgctgctgctggccctggcccttgcctccgtgccttgcgcccaggcgcctgccccgcctccgccgacctcaagcactcggacgggacgcgcacttgcgccaagctctatgacaagagcgacccctactatgagaactgctgcgggggcgccgagctgtcgctggagtcgggcgcagacctgccctacctgccctccaactgggccaacaccgcctcctcacttgtggtggccccgcgctgcgagctcaccgtgtggtcccggcaaggcaaggcgggcaagacgcacaagttctctgccggcacctacccgcgcctggaggagtaccgccggggcatcttaggagactggtccaacgctatctccgcgctctactgcaggtgcagctgatgcattgctggtctctcatctgcagcttccacagagtgccaagcccctcactcagcccatccctgggctctgctccggggccccaagacccaggaggaggagcgttctgcctgccccctcccacctcccctgcaatacagcctttgtgcagttgt

SEQ ID NO: 274298 - DNA, 1563 bp, Homo sapiens
cccacgcgtccgctgaggaacagacgttccctggcggccctggcgccttcaaacccagacatgctgctgctgctgctgctgctgcccctgctctgggggacaaaggggatggagggagacagacaatatggggatggttacttgctgcaagtgcaggagctggtgacggtgcaggagggcctgtgtgtccatgtgccctgctccttctcctacccccaggatggctggactgactctgacccagttcatggctactggttccgggcaggagacagaccataccaagacgctccagtggccacaaacaacccagacagagaagtgcaggcagagacccagggccgattccaactccttggggacatttggagcaacgactgctccctgagcatcagagacgccaggaagagggataaggggtcatatttctttcggctagagagaggaagcatgaaatggagttacaaatcacagttgaattacaaaactaagcagctgtctgtgtttgtgacagaccctccttggaacttgaccatgactgtcttccaaggagatgccacagcatccacagccctgggaaatggctcatctctttcagtccttgagggccagtctctgcgcctggtctgtgctgtcaacagcaatccccctgccaggctgagctggacccgggggagcctgaccctgtgcccctcacggtcctcaaaccctgggctgctggagctgcctcgagtgcacgtgagggatgaaggggaattcacctgccgagctcagaacgctcagggctcccagcacatttccctgagcctctccctgcagaatgagggcacaggcacctcaagacctgtatcacaagtgacactggcagcagtcgggggagctggagccacagccctggccttcctgtccttctgcatcatcttcatcatagtgaggtcctgcaggaagaaatcggcaaggccagcagcgggcgtgggggatacaggcatggaagatgcaaaggccatcaggggctcggcctctcagggacccctgactgaatcctggaaagatggcaaccccctgaagaagcctcccccagctgttgccccctcgtcaggggaggaaggagagctccattatgcaaccctcagcttccataaagtgaagcctcaggacccgcagggacaggaggccactgacagtgaatactcggagatcaagatccacaagcgagaaactgcagagactcaggcctgtttgaggaatcacaacccctccagcaaagaagtcagaggctgattctcacagaacaagaaccctctagagccccatgctatgcagtaggtcaccagggctccctcctcctgtctaaccaaaacttggaccaatgtctcccctttccccggctaccagggacccatccctgcctctagcttctactacccaccattctcctctcgacctctctgaggttgactattttagattccacatagagatgaggtcatgtggtacttgcctctctgtgtgtggctcattttacacaaaaaaatatcccctaggttcatccatgttctctca

SEQ ID NO: 274299 - DNA, 2890 bp, Homo sapiens
cccacgcgtccgctgaggaacagacgttccctggcggccctggcgccttcaaacccagacatgctgctgctgctgctgctgctgcccctgctctgggggacaaaggggatggagggagacagacaatatggggatggttacttgctgcaagtgcaggagctggtgacggtgcaggagggcctgtgtgtccatgtgccctgctccttctcctacccccaggatggctggactgactctgacccagttcatggctactggttccgggcaggagacagaccataccaagacgctccagtggccacaaacaacccagacagagaagtgcaggcagagacccagggccgattccaactccttggggacatttggagcaacgactgctccctgagcatcagagacgccaggaagagggataaggggtcatatttctttcggctagagagaggaagcatgaaatggagttacaaatcacagttgaattacaaaactaagcagctgtctgtgtttgtgacagccctgacccataggcctgacatcctcatcctagggaccctagagtctggccactccaggaacctgacctgctctgtgccctgggcctgtaagcaggggacaccccccatgatctcctggattggggcctccgtgtcctccccgggccccactactgcccgctcctcagtgctcacccttaccccaaagccccaggaccacggcaccagcctcacctgtcaggtgaccttgcctgggacaggtgtgaccacgaccagtaccgtccgcctcgatgtgtcctaccctccttggaacttgaccatgactgtcttccaaggagatgccacagcatccacagccctgggaaatggctcatctctttcagtccttgagggccagtctctgcgcctggtctgtgctgtcaacagcaatccccctgccaggctgagctggacccgggggagcctgaccctgtgcccctcacggtcctcaaaccctgggctgctggagctgcctcgagtgcacgtgagggatgaaggggaattcacctgccgagctcagaacgctcagggctcccagcacatttccctgagcctctccctgcagaatgagggcacaggcacctcaagacctgtatcacaagtgacactggcagcagtcgggggagctggagccacagccctggccttcctgtccttctgcatcatcttcatcatagtgaggtcctgcaggaagaaatcggcaaggccagcagcgggcgtgggggatacaggcatggaagatgcaaaggccatcaggggctcggcctctcaggtgagtgatgtgggcttctccacaccgagcatccagcctggacacctctgacaggattggcccccaggatcgctctctttggtatggccaaagtcacttcctcgtctcctcctccttcccacaggccggcttctacaggactcccccatcttgctgacagcatggcagtccctacccccaatttttcccaggccaggcactgagtaggagttatctcctctctgtcctccttttcttctctatagccccgattcaccatctctcctccatttttcctccccaagaatagctggcatctcttctccctggccccagccatcctgacccctctcattatttttcctattggcgggacctgatttctttgaccggcttgtcatccttacgccactaacctgtgagcttccccaggtcaggtatcatgtctcaattaaggccctgtaattctctctcatttactctcgttttgcccgttgtatcataatttacatgtagatactcatttcttatttttatttttttctcgaggcagaatcttgctctgtcacctaggctggagtgcagtggggcaatctcggctcactgcaacctctgcctcccaggttcaagcaattctcctgcctcagcctcccaagtagccgggattgcaggcgcgcgccaccaggccaggctaatttttgtatttttagtagagacggggtttcaccgtgtcggccagctggtctcgaactcctgacctcgtgatccgcccgcctcagcctcccaaagtgttaggattaggggcatgagccaccgcacccagcttgcattgaatattttcaaggagctaaaagaagattttaaatggtctcacaaaaacagataaatatttgcacagatgggtgtgctaatcattgtgccttgatggttccacgatgtatccgggtgtggaaatctcactgggtctctctcaaggccactcggctactcaggacagggctggaatttaaagcctgtccgattctgaggtctcttctctcatctagcactgagtcaagcaatcagcaggctgggcaccccttagccataagttttcaggaaataaattccttgagggcattgacttttacaaaagagggagcagcaatggcctagagtctcaggaacaagacaggtgcactgaggagatgaaggccgggaccccctgcccaacctgtatggcgggtctgtacttattttgtttacccccaatttaaaacgtttttttttattgcaggttgtttgtttgatatggtttggctgtgtccccacccaaatcttatctagaattgtaatcagaattataatccccatgtgttgggggagggacctggtgggaggtgataggatcatgggggtggttcccccatgctgttctgatagtgagtgagttatcacgagatctgatggttttgtaagtggtggtttcccctgctcttctctcttgcctgccaccatgtaagatgtgcctggttccccttccgccatgattgtaagtttcctgaggcctcccccgccatgtggaactgtgagtcaattacacctctttcatttataaattactcag

SEQ ID NO: 274300 - DNA, 458 bp, Homo sapiens
gatgtttgtctgtccagtgtgtagtcctgtcagtttggggagactgcctgagatggtgccggggacacctggctggacttaaggaaagcatcagggatgcctggatgtgacagtcagtgttggttttctgcacagtaagaaaagttgagagctcaaatgattaacctgcaactatggagttaagttgagtcttctaatactatcttcctctcttctgcctgctttgaatctgttgctactaagctgttggtgctgaggtaagactcattatttatggtctaactgaaatataaacattggaaactcatttgaaactgaaggaaacaacgggtaaaagaggttttttaaaacaaactgtcatagagactgctttacccaaattttggtccacaactttccttagattatctattggggtaaacaaaatttagccatgtgaacaggttccaattttgtac

SEQ ID NO: 274301 - DNA, 253 bp, Homo sapiens
cctgctcccacctgccttttgctctgctatcgggcagatggcattgtctctgctttgcaactgatgaaataggaactctggcttctgggctaggctgagagggtgcttgctgctgccattccgggcccaggtgagacattcggtcatgagcatctgtagctcttgcctgagcctctgagcctgccagggcagagcagaagcaaatgcatgaaggcccctcccccaggggctgctcttagccagtgactgatga

SEQ ID NO: 274302 - DNA, 618 bp, Homo sapiens
acagacattcatacattgttcatgagagtgtaaaatgggacagctcctataaagaataggcaatagctaataaaattttatgtgtagtgggctgggcgtggtggctcacgcctgtaatcccagcactttgggaggccaaggcgggtggatcatctcaggacaggagctcgagaccagcctggccaacatggtgaaaccccgtctctactaaaaatacaaaaattagctgggtgtggtggcaggcacctgtaatcccagctactcaggaggctgaggcggaagaatcacttgaactcaggaggcagaggttgcaatgagccgagatcgcgccattgtactccagcttaggcaacgagcaaaactccatctcaaaaaaaaaaaaatttatgcgtagctactctttgagccagcaatcccacttctgggaattttctctgaggaaaacgccatatgcacagagttattggatgtggcattataatagcaaattactcaaaataatctaaatgtccttccaaggaaaccatttgaataaacattgtgcaatccctatcatggaatactatgcagctacatagaaataaataattaaaaacaagctctctatgttctaatatg

SEQ ID NO: 274303 - DNA, 374 bp, Homo sapiens
gcttttcctgactccgcgttgcaggaggtcacccgagtctgtcttgtgacacccactgtcgttctgacagagccacgtggtgctgggactgaaggagaggggagtgggtaacaaaggagagtagagggagaaccacagcaaggaggaagcctaggaagttgggggtgctagagagtgggaacaaaggagatgtaacagggaaaagggaatttaacagggaagagggattttaacagggagagcagacagggagctcagatgggggaaaagaggcaggaatacgtggcggctggggacaatgggaaagtttggggagaaagagcaacaagaggtgaaataaatttcgaagcattgggcagaatagacataaaaga

SEQ ID NO: 274304 - DNA, 290 bp, Homo sapiens
gcttttcctgactccgcgttgcaggaggtcacccgagtctgtcttgtgacacccactgtcgttccttcccaaatttttactccactggaaaatgtgctcttccgggaggtgggcatcgtattcctcccctttcctcctgaatgtgtgggtgagagggatcaggagaggaaaagagggggagcgacgggacagaaagaaaaactggggagaaaagaatgagtacacggcaaaatggatgataatttaggtactggcaaagagagcaagagtgcaagaggacgcatggagaa

SEQ ID NO: 274305 - DNA, 542 bp, Homo sapiens
caggcccacgaacctgaacagaacgcgagccggggccgcgggcgcgccggcctcctttcagtgcgcccgcctcgcctccagacgtgccgtctcgccagctgcctcagcagcgctcggactcagcgggactctgccccgactcggtgccggagcttctgtcctttgcgctccgccccctagggacaagacctccccagagcgctttccgaaacagacacagcgctgctcacacacacacacacacacacacacacacacaatgccccgcgcggtgcccgctcgcccgcccacccgccctcggtttcgatgcgcccggagcgatcctccttccctctcctcgggggagggtgggtcacttcgcggcgctcggtgaacgccgaggaaaggggaagccgcgagccgcctacgggcagcgggcgcggggctggtcccgggtcacagagggagccgcagggttggcagcgaagcgcggggcgtttctgagcggcgggcgcagggaggtcgcaggtcaagccggagggtgggtccgctctcgcggccgc

SEQ ID NO: 274306 - DNA, 403 bp, Homo sapiens
ttttttcttttgagaagtctcactctgtcgctcaggctggagtgcagtggcgcaatctcggctgcctgcaagctctgcctcctgggttcatgctattctcctgcctcagcctccctaggagctgagactgcaggcgcccaccaccacgcctagctaatttttttgtattttttagtagagacggggtttcaccgtgttagctaggatggtctcaatctcctgacctcgtgatccacccgtctcggcctcccaaagtgctgggattaagggcgtgagccgccgtgcctggcctcaattttcttaaatagacaaaatacttgaatacatatttttccaagaatacatgaaaatggtaattgagtacataaaagatgataaaattaattagtcatcattaaaatgc

SEQ ID NO: 274307 - DNA, 399 bp, Homo sapiens
actttggtgagactctggtgagcaccggcctctactccagtccccggccaggcagacctcagccccagaaaccctcctgagttacaaattaggaaaccgaagcccaggccaggcatgtggctcaagcctgtaatcccagcactttgggaggccgaggcaggtagatcacttaaggtcaggagtttaagaccggcctggccaacgtggttaaaccccgtctctacttaaaatacaaaaattagccagatgtggtggcgtgtgactgtaatcccagctactggggaggcagaggcaggaaaattgcttgaaaacgggaggtggaagttgcagtgagccgagatcacactactgcactccagcctgggcaacagagtgagactacatctcaaaaaaaaaaaa

SEQ ID NO: 274308 - DNA, 216 bp, Homo sapiens
ttgagttgtttccacattattgctattgtgtataaataactctacaatgagtagtcttatgcttgtattgttttatatttgtcaagttgtatcttcatagtaaattcctagaagttgcattactgggccaaaagataaataatatatgagcattaggctgggcgcggtggctcacgcctgtaatcccagcactttgggaggtcgaggcgggtggat

SEQ ID NO: 274309 - DNA, 442 bp, Homo sapiens
atacaatacatgattattaactatatttacctagctgtgctaaagatcaccagaacttatttctcctaactgaaattttgtacccttttgcaaacatttcccctttccctgctcacaccaccccactttcccagcctctggtaatcaccattctactctctacttctatgagtttggctgtgttagattccacatacatgatattatgtgatatttgtctttctgtgcctggttcatttcacgcagcattatgtcctctagactcatctatgttgtttgtaataatagaattgcattcattgtaaagacgaatagtatttcattgtgtatatataccacattcaagaaatccatttatctattgatggacacttagtttatttccatatcttggctattgtgaataatgctgcaataaacatcagagtgcagatatcttttc

SEQ ID NO: 274310 - DNA, 294 bp, Homo sapiens
  misc_feature (61)..(61): n is a, c, g, or t
tgaaatgggttaatataaattatatctgttttctcattgggcgtaaatgcagaacttccancctcaagcagccaccccctgattttacagtttttgggggttcattttgtttggggctcttttctgatggctgttctgttcaaaaccaatctattctggccactgttaaaggtttatactctctgtgaataaagtaggaatatgctagcagtacgaaagagattttgtaaaactgttaatgctaattacaaatggtgcttctagtaaataaagctggcctccttaaaactcaaa

SEQ ID NO: 274311 - DNA, 386 bp, Homo sapiens
gagagggagtctcgttctgttgcccaggctggagtgcagtggtgtgatctcagctcactgcagcctccgcttctggagttcaagtgattctcctgcctcagcctcccaagttgctgggattacaggcatctgccgccacgcccggctaattttgtatttttagtagaggcaggatttcacgttggccaggctgctctcagtctcccaaagtgccaggattacgggtgcgagccaccatgcttggcctaaaatttttctaaaataaaaactttttaaccaaagaaaaaaagaaaatcacccacttccctcacactgcattcctgcaaagacaaaatgccccgtatgcggtgattgcttccctccccaattctgagcagatgctgctc

SEQ ID NO: 274312 - DNA, 408 bp, Homo sapiens
atggacagtcactgccaggagaggcccctgcgtgtcctgggaacctgggattcagtgcgtgctcagagacgttttaggagtgcaagatttaccataggcttggcgatgtcttttgtttatttttaagttaactgaaacaacccaggaactggatttcttcaaatttaccaatttatactttaatttgggaaaaggaaaagccctcaaaaataaatttaattagtcaatctataattatgatacgaataagttccacttaaatataatattcccagcataataatttgttgagtaaatcaaatcgttgatacatcttagtgttcctaaagttaggaaatcatctaagcttcataaaaagaaagcatttcacgtatttaaattttccccatggcctccatgactttttca

SEQ ID NO: 274313 - DNA, 388 bp, Homo sapiens
tcaatgcttctccctacacatgcttccctcagctttgtagagcaactctggaaatcattcatgaaggatacgtagaaaaggcttctcagctggacacggtgcctcacacttgtaatcccagcactttaggaggccaaggtgggcaaatcatgtgggtcaggagttcaagaccagcctggccagcatggtgaaacgccattgtctactaaaaatacaaaaattagctgggcgtggtggcgggcacctgtaatcccagctactcgggaggcaaaggcaggagaatcgctgaaaaaccgcttgaaccttggaggtggaagttgcagtgagccgagaccacgccactgcactccagcatgggcaacagagtgagactccatctcaaaaacaa

SEQ ID NO: 274314 - DNA, 713 bp, Homo sapiens
aaaaggggtgagatgaatagatggagtacagtggatattttaagacaataaaactattttgtataatgcaataatggatacatgtcatgtcatcatgcatttgtcaaaatccacagagtgtaaaacagaaaacatgaattcgaatgcaaactttagattttagttaataacttttctatattagttcattaagagtaacaaatatgccacactaatgtaaggtgttaataatagaggagaagctgggtgtggggagaggatatatgggaactctgtatgttccgctcaatgtttatgtaaactcgatactcatctaaaaaataagtcatattaaatatcccagtgatgactatcaaaagtagaatagatttaaaaattatactatgttcatataattgaatatagtactatgcagcaattaaaataaataaattctgatgttaaatgtcatcaccatgatggtaatcacaaaaagaagctatagaatatacacaaaggaaataaaaagttaaaatattttactaaaaaaaattaacccaatacataagaagaaaataatgtagaaaatgtaaaataaaaagacgtaaggtatacagaaaacaaatagcaaaatgacagaaatctacctatgaataattattttaaatgtaaatggattgaactatcaaattaaaaggcagagatcagcaaaacagactaaaaaacatgatgca

SEQ ID NO: 274315 - DNA, 187 bp, Homo sapiens
catacgactatcatcaactgcatattttcccaggcttcttgcctttagttaatcaagtaatcactttgaaatcacaggagttggtttggttgtcattagcaaattggattgctacctaaaagcaacatctctctcctctcagactttttttttttttcattaattctgccactgtactagcctcatc

SEQ ID NO: 274316 - DNA, 520 bp, Homo sapiens
gttttgaagattaaatcagataacatgtcaaatatttaatactttgctgctattcttactgtgtgaatatgtacaatatgatacctgtttgtaggcagctgatattttgtgttactgtttgcattaatttaacattaatgggtaaagatggcaggtgaaaactcctaaacatctgggggccgaaatggcagtggactccttactgaaaacaaggagataaagtgaaactctgcatactgaacaatgagctagcttcttgccttatttcgtctctgagaactgacagctcagttcctactacctgagatagatttctctccagaaaaactgacccatcctgaagaaaaacctttaaaaaacaatgctgggggtgtgaggctgaggaaaatgttttgctgttcccttacctataatgaagctcaccactgaaaatatgaaggatcctgagataattacggccaagcttctaacttgaaagactatgaccaaaccaaacagcaaaaaggaacttaaaggaaat

SEQ ID NO: 274317 - DNA, 574 bp, Homo sapiens
gttttgaagattaaatcagataacatgtcaaatatttaatactttgctgctattcttactgtgtgaatatgtacaatatgatacctgtttgtaggcagctgatattttgtgttactgtttgcattaatttaacattaatgggtaaagatggcaggtgaaaactcctaaacatctgggggccgaaatggcagtggactccttactgaaaacaaggagataaagtgaaactctgcatactgaacaatgagctagcttcttgccttatttcgtctctgagaactgacagctcagttcctactacctgagatagatttctctccagaaaaactgacccatcctgaagaaaaacctttaaaaaacaatgctgggggtgtgaggctgaggaaaatgttttgctgttcccttacctataatgaagctcaccactgaaaagtcctacccatgtacacagagatgttccagatagctttctctgtgtctctcaaatatgaaggatcctgagataattacggccaagcttctaacttgaaagactatgaccaaaccaaacagcaaaaaggaacttaaaggaaat

SEQ ID NO: 274318 - DNA, 408 bp, Homo sapiens
tagtgttaagtcccttagttttattgagaaacattttcttacatggtagagtgaaagcttttcattcaatgctacatctaaaattcacaatttcaaactgcgcttaatctgtaagcaaagtcccagctcctctaactctaatgtatgtttcttcaacaaaaggctaccttaatataagcagcatggagactcttttgatttatccagtgggtaaaatctgaaagcttttggaggcaaaaggatttcatataacaagtagcaaatctcttgtctcagaggcctgaagaggcaagtcagagaatcagtggttctttaatttttgaatgtaatgaaaaatgtaggtgaagatctctctccagtaaacactgattagatacgtgaataaaagcacctaaattattctgttcc

SEQ ID NO: 274319 - DNA, 480 bp, Homo sapiens
ttctttcctgcaccaggttctatggagaattggttgcatggtttctcgtgctgtgggcatcagggacttcaggtgaaggtatttagctgtggctttgtgcaaacctcagaactgtgtcctccaagggcctggggtatttggcaggcgctgtctcttgctgcctttgctgctgtatgacagacaaaatagaagccacctggaggcaacttcctcacccatcgacaagctcaccagccttcatgcctgtcctttggagcttccctgcagacagtggcagccaccttcctcgggaaccaccttcctgggcctctccttcagtcaagctgcacagcagcattttctacacttgctctggcggcatcctcactgtcatgcactagcggttgttggtgaggttcttcaggctgcagatggagacatgggaagggctggactggctccccttctcactgtggctgggcagggtagggggtaccccgg

SEQ ID NO: 274320 - DNA, 1196 bp, Homo sapiens
attcgaaacactgtccctgcgagttctttaagttccctgcaatctgtacacaagagaaagagggagagagagagggagagagacagagagagcagggatcaggtaaaggagtggggctgctgcagccattcagacctcaggagctggaaaattgccaaggatgcagaaggaaatgaagatgatcaaagacgaggatgtgcatttcgacttggctgtagagaagaccccctcctttccccactgcctgcagccagtggcttctcggggaaaggctccccaaagacaccccttcccggaagctctccgagggccattttcccagtttcggtatgaacctcccccaggagacctagatgggttccccggggtcttcgaaggagcagggtctaggaaacggaagagcatgcccacaaagatgccctataaccaccctgcagaagaagtcaccctcgccctccactcagaggagaacaaaaaccacggccttcccaacctccctttgctgttcccgcagcccccgcgccccaagtatgactctcagatgatcgacctgtgcaacgtgggcttccaattctaccgcagcctggaacactttgggggcaagcccgtcaagcaggaacccattaagcccagcgccgtgtggccccagccaacgcccactccattcctgcccacgccctacccctactaccccaaagtccacccgggcctcatgttccccttcttcgtgccctcgtcctcgcccttccccttcagccggcacaccttcctgcccaagcagcccccggaacctctgctgccccggaaagccgagccccaggagagcgaggagaccaagcagaaggtggagagggtggacgtgaacgtgcagatcgatgacagctactacgtggacgtgggcggctcgcagaagcgctggcagtgccccacctgcgagaagtcctacacctccaagtacaacctggtcacccacatcctgggccacagtgggatcaagccgcacgcgtgcacgcactgcgggaagctcttcaagcagctcagccacctgcatacccacatgctgacccaccagggcacgcggccccacaagtgccaggtgtgccacaaggccttcacccagaccagccacctgaagcgccacatgatgcagcacagcgaggtgaagccgcacaactgccgcgtgtgcggccgcggct

SEQ ID NO: 274321 - DNA, 436 bp, Homo sapiens
tctctttcttaagtcattcgaaacactgtccctgcgagttctttaagttccctgcaatctgtacacaagagaaagagggagagagagagggagagagacagagagagcagggatcaggtaaaggagtggggctgctgcagccattcagacctcaggagctggtaagttacccatgcaatcatttctgcttccttttcaaggttcctgggtggatactgctgtgggcatcttcaacagaaaataccttactgggagtagtccttaaccaaagggtataagtgatagatggcccagaatttcagctaatacttttttttggtaagagaatactgatgctttgcagaactaaggctggcaaaactagaaatagaattacattgggactaaagaggacactgcgttaaatctgaattttggcacagatcatgtggctggg

SEQ ID NO: 274322 - DNA, 214 bp, Homo sapiens
cctcacggtggcctgttgatgcccaactcatgcctctggcaccctgcccagaggcgtgagtccctgcctcacaccgacccctcccacgctgaggaaggtcggcatgagccccttgcctcacaccggcccctcccacgctgagagaggtcggcgtgagccccttgcctcacaccggcccctcccatgctgaccccttgcctcacaccggcccctc

SEQ ID NO: 274323 - DNA, 1267 bp, Homo sapiens
agactcataaagtataagcttttagtgtctgaactttgtatctattttgaatgtacagaagcctttttgttggcttgtttctcatgtaatcctttcaagaattaaataagaattgtacttgagtcatttctgaataaaaaatgcattatatacctgtcaaaagccaggtgacaagaggtgacaagtagttacttaaaggtaacgactaaaactttggaaaaatatcagtattacagaaaatacagacaagttacataagtattttcatgtaagaagccaagtgtctgaatataaattattttccaactttggtttctctgatatttagttcacactcacttaatcaagttctcatttagatgtacttaaaaatctgatgaataacaatgagaagatatcataaatagcactatatgatcatttaataatattttatcaagaaatgacaatctcctgagtattcaaaaacataaatctttgcttttcaactttaagtatctgtcagccttccaaatactgaatagctaacagcataatgtggtcaaactaaagtgaaagagaataatattcaaatatctctcttatttaaaacacacaatacacataaaataatatgtctggctatctgcaaatatcttactaaaaaataaaaacccttaaccttttattttaatatagtttaatgaattatgttgagattgtagccttgggaaattttctcttgatggaaaaatattaaagcatttataaaaataaaatcccaacacagcaatgaacataagcaacatttaacacactaatctactggaaaaatattttttaagtcacatgaatatgtaaaagtcaagcagatattatgaatataggcaaacaaattttggtttatcaaatggataaaaaaaattttataaaaatgggctctctattggaaagtcccaactctacttcccaataaatccaatttgtaaagatagcaagaaaacttcaataataactttggtgacaataaaaaaagaactatatgaccatttggatatagtagaaaccaaaaggaatattctataatgaaaaacaaggagttagaaatgcagtataagttacggggctctgtaggaaagagaaccatggatattaaaattaagagcggggccaggcatggtggctcatgcctgtaatcccagcactttggaaggccgaggtgggcggatcacctgaggccaggagtttgagaccggcctggccaacatggtgaaaccccgtctctacc

SEQ ID NO: 274324 - DNA, 417 bp, Homo sapiens
gcttccctgaccagaggtcgttttgagtttccttctctggaatttgaccactgagcagagacacataggagagaagatgtgaatgctgagtcatcaatcagcatcactgggaagaaaaagcctctcagtttcttctgctgggactcccggagctggagtattttctgctcttcctaaggcctgaatctcaccttgtcacccaggctggagtgcaatggcataatctcagctcactgcaacctctgtctcccaggctcaaatgattctcctgcctcagcctcctgagtagctgggattacaggcgcccatggactaccagctttttaagtagactttttagccaaaggccaagggaaactaccctcttgctactggggttcaaattgattaaaatggtttgctttgaaaaaagttgaa

SEQ ID NO: 274325 - DNA, 384 bp, Homo sapiens
gcttccctgaccagaggtcgttttgagtttccttctctggaatttgaccactgagcagagacacataggagagaagatgtgaatgctgagtcatcaatcagcatcactgggaagaaaaagcctctcagtttcttctgctgggactcccggagctggagtattttctgctcttcctaaggcctggtaattcagctctttgtgagactgtgagctttaccatacccttccagtagcaaccttcttcttttttaagttcattgcggggaatagggagtgatggctgatggacatagggtttctttttggggtgacaaaaatcttctaaaattaagtggtgatgatggttgcacaattttgaatatactaaaaaccgtgaattctaaa

SEQ ID NO: 274326 - DNA, 405 bp, Homo sapiens
gcctccacatctctacggccctggaacctggtgttccaatgaaaccctgcaggaaaatccaaactcagccaagggttctcacccaccccaagccacgtcccatccagagcagctgtcaaaggaagcacttggagacccacccctgctggcctcactctctcctcaggggagctcctaccccaaccaccccaccctgctggaccttggcactgtccacaccaggctgacagtgttccggcggtgctgactgtgggtgccccgggcagggtctgactttttatctccccagcgcagggtgtgacccagggatgagaaaacccagaacaggacttgctgtgtgcagaggcaggtggttcacatgcattccccatttctcacctcccagctctgagtcccaggggcagt

SEQ ID NO: 274327 - DNA, 389 bp, Homo sapiens
tgtggtgcctcccacggcagaagccttggccgtgggtgaactggtgtgtgcagtggctctgctggccagctcccggctgtggccatggtgactctggcatcactccctcttggcagcactgggccccctcccccagcatttcaggatgtgtgtgatggcagggaaactcaaaatttccatgagccactgagaaattctagaaacagcctgtacttgtggactttcctttttcttcctctgccacagggaagagtgggaatgttatttttggtgggattatcagctggttgaccttctcagggatgtggaaagggaggctgcctgcccgcccgggcctctctcccactgcctgcctttgtgtcccccaccccacctcactttatgtttta

SEQ ID NO: 274328 - DNA, 376 bp, Homo sapiens
tgtggtgcctcccacggcagaagccttggccgtgggtgaactggtgtgtgcagtggctctgctggccagctcccggctgtggccatggtgactctggcatcactccctcttggcagcactgggccccctcccccagcatttcaggatgtgtgtgatggcagggaaactcaaaatttccatgagccactgagaaattctagaaacagcctgtacttgtggactttcctttttcttcctctgccacagggaagagtgggaatgttatttttggtgggggacacaaaggcaggcagtgggagagagggccgggcgggcaggcaagctccctttccacatccctgagaaggttcaccagctgataatcgcaccgtcgacg

SEQ ID NO: 274329 - DNA, 195 bp, Homo sapiens
atggaatatgttttagccaacagctacctgtacttaaaaacaaaaccccaaaaacctgctcatttgattttcagtaagagtctattaaaaattcttaaatcagaaaccaggtagtaaacaatttctgtaaaagccgattttcaagtggagacattttgacctggagctagtgaattcaatgaaaaaaacaaaaaa

SEQ ID NO: 274330 - DNA, 205 bp, Homo sapiens
cctgtgacataagcactgcctgaccagccttaaaaatccctccatgctgtggtacatccatacaatggaatactacttggcactgacagcggccacactgttgaactgcaaatccactgcgctaagtgaaagaagccagactcgaagactgcatatggtatgatccctctatgtaacactccagaaaatacaaaatgatgccagc

SEQ ID NO: 274331 - DNA, 455 bp, Homo sapiens
tacgctatatctcaaaatgcagcaacagtgatggccccaccagcaactgcagggcaaacaatgctcaggaattctgttgagattttttgaggtgtgtgtttagggagtgagtgactgcaggggaaggaatcccagagtctcgaaagtggttatggaggagtccgtgtttttggccttggtccctgtgccagggctggtttgctaagcaaaacttctagtggcattggcattcctacaaaaggcacttgttccaaatcctcccattgttactgccattttgctaagaatttctgtactttgtaatttagggctctgtttatcttgtatctctggagtttggctttgctagaatactgtgagaaaattcagtaaaacattatccagcagtttaagttttccagaggacctctggggatgaattgctttgtacaataaatggaaagtcttgctttacc

SEQ ID NO: 274332 - DNA, 394 bp, Homo sapiens
cctcgtgattctcccgcctcggcctcccagagtgctgggattacaggcgtgagccaccgcgcccggccagaacccgtacttttaaacactacaccatactacctctttaatgagaatcatcacattaaaattctgttgtggagctgggcatggaggtatgtgcctgtagtcctagctactcagtaggctcaggcaagaggatcacttgagcccaggaagttcaggctgcagtgagatacgattatgccactgcactccagctgggtgacagagtgaaatgctgtctctaaaaataaataaattaattaaattctgttacagaaagcgggggaggttgtctgtgtagtgtagaattttttttttcccctagaagatggggattatagattttgcc

SEQ ID NO: 274333 - DNA, 173 bp, Homo sapiens
tttttttttgagacggagtagtctcgccctgcactccagctgggtgacagagtgaaatgctgtctctaaaaataaataaattaattaaattctgttacagaaagcgggggaggttgtctgtgtagtgtagaattttttttttcccctagaagatggggattatagattttgcc

SEQ ID NO: 274334 - DNA, 391 bp, Homo sapiens
gagatcctgtctcaaaaaaaaaaacaaaaccaaaacaacaacaacaacaacatgcgaactttggtctcctacccatctctaacaaatggtggggcttactatgagcagagaggggcttatcatagagtaacggttcagagcaagggctttggggtcagacttgggcttgagtgccagcttcacagtcaactgtgacctgagaaaagggaagagtgagcccttcccagctgtttcagagaataatggtagaatagtagcctgcacatggctaagtgctcagtaaacaacaagtcttattattaggtattccctggggccatatgttttatttcagctaaatgctgatattcgtagaatcatgtagaagaatgtgtaggtataaaggaatgta

SEQ ID NO: 274335 - DNA, 749 bp, Homo sapiens
tcctttccccatccaaaacctctgtccctgcatcccccagcctctccactgcctctgcccactgcctgaagaccctggggatgaggaaggaggctcctctgagcagcaagagatggcagacttgctgcgtggctcaggggagcatgccctgaatctagcagagaagggtttaggtcccagaaatgaccagaacgcctacttctgccctggttaatttagccctaactctcatctgctggagagtcagctcccaaactgttctttcttgtaggcagaggatatgtgtgtgtgtattacatgggactgtctagaggttccatttcccaatagggtgggttgcctttccttgtcttaattaggcctaactgttccagagcagaggccatgatttagtggaccatgaatgattgagattttgcctgtgtactatcaatgccacttgaacccaagcattcactttaatacttactgagcatctcccatgtgcaaggtcctggaactacagggataagacagggtccatgccgtctcaaggcatttacggtttaaaaagacctttgtaattactaacgaaaatgcaaagcagaaagcagtctgtaataaagattaaaataatgccgtgggagcaaagaggaagggataatgaattctgattggggacagtgggaaaggctttatgcaagaagcaatgaggatggccttgacaaatgaggatttttggttttggaaaatggatgcagagaagtttt

SEQ ID NO: 274336 - DNA, 625 bp, Homo sapiens
tcctttccccatccaaaacctctgtccctgcatcccccagcctctccactgcctctgcccactgcctgaagaccctggggatgaggaaggaggctcctctgagcagcaagagatggcagacttgctgcgtggctcaggggagcatgccctgaatctagcagagaagggtttaggtcccagaaatgaccagaacgcctacttctgccctggttaatttagccctaactctcatctgctggagagtcagctcccaaactgttctttcttgtaggcagaggatatgtgtgtgtgtattacatgggactgtctagaggttccatttcccaatagggtgggttgcctttccttgtcttaattaggcctaactgttccagagcagaggccatgatttagtggaccatgaatgattgagattttgcctgtgtactatcaatgccacttgaacccaagcattcactttaatacttactgagcatctcccatgtgcaaggtcctggaactacagggataagacagggtccatgccgtctcaaggcatttacggtttaaaaagacctttgtaattactaacgaaaatgcaaagcagaaagcagtctgtaataaagattaaaataatgccgtggga

SEQ ID NO: 274337 - DNA, 324 bp, Homo sapiens
gaccccaccccagtgctgctgggccctgtgggcactcacagagcagtccttgctggcctgactcatattcctgagtctcaggggttcctgtgccaccagagaacgaactccccaactgtcagtcactcagctcagtgcctgtatcttaaattgggcacctttagcaaaagtgcagtgtggaactgtgtatcctgctgccccagcccaggacctagcacagagccgggtactgtgccataataagccttggtaaaggctgctgtaggcttcacagtacagatggcagggctgtgcccgggctgcaggctcccatttaccagatgt

SEQ ID NO: 274338 - DNA, 297 bp, Homo sapiens
agctgggcgtggtggtgcatgcctgtagtcccagctacttgggaggctgaggttggaggattgtttcagcccaggaggcagaggttgcagtgagcctgggcaacagagcaagatcctgtcttgaaaagaaaaaaaaattagaaggcagagaagcaaatctgtctggggatcctggaggccagtccccagggccagtccctcgtggcagccaaaggggtggtgtctgcattctataaacaaacacccacaggtgtgcatggaaagccagagccaaatgacaaacacagctgggacaat

SEQ ID NO: 274339 - DNA, 529 bp, Homo sapiens
gctgcagtcatgtgctcaccactggagccaatcagtatcatcagccccaccttaccatatggccaaagagcagaagaggggtgattccccacggaaaaattgggatgccgttaccaaaaaaaaggggagaaattgtaagtgggcaaaccgaaacaattggaatttaattgaaagcatttttttttgtagatcaattttcgtgttcttaaagaagtcttgatttaaagcttaagcaatatttataagaatattatgactacgtttcaaataagaaacagtattaaataagttgactcaaatataatgtttgctgttgaaaataaaaaaccatagctactcaatgtaaacaatgtaattcaaatacttctttcacttaaaacatgtaaagtgaatcttactgagattctttccttggtaaagctattttattattatggaaggtagcaaatacagggaaaaatattttggaatgaaatgacataaaacccattggcaatttgtttttgtttttgtgtttggaaaaaagaaa

SEQ ID NO: 274340 - DNA, 244 bp, Homo sapiens
aaaattatgttcatgaatatgcaatacaaaaaggtaatttgtatcattaacaacgttaagtggggagggtagagatgtaaaaaagtagagttttaatacatggctgaagttaggctgtttttagtttcaaatagattgttagaactttaagatgttttatgtaattgcaatggtaaccacaaagaaaacatttatagaataatacacaaagggaaatgagaagggagtgaaaacatgtcagtac

SEQ ID NO: 274341 - DNA, 262 bp, Homo sapiens
gccactatccccggctaattttgtatttttggtagagacagggtttctccatgttggtcaggctggtctctaactcccgacctcaggtgatctgcccgcctcggcctcccaaaatgctgggattacaggcatgagccactgcgcctggcctgctcttcccattttcttttgtctttcttactaacctagtcaatcccccactactccaagtcccgttatagttaataattctttgtattaaactttcactgttgaaatcatt

SEQ ID NO: 274342 - DNA, 301 bp, Homo sapiens
gcgttttcaatcgctcacctgcagagccgccagattctggccaatctcggcttttttccctctcactgtgggttcttcagagccccatggtttagacacaacggtggattctcttgtgccccaattaccacatgcgtcatggggagaagagcttgaaccccccagagggtcaggtccagggacttgagcatccatggattttggtgcctgaggagagtcctggaaccaatcccccatggatactgagggacaactgtaatcttttttggaataaggaattaaaaatttccccaaaatgctt

SEQ ID NO: 274343 - DNA, 380 bp, Homo sapiens
caagcgtcataatgctacaaaaggcatgcaaagtgcaatgggagaacagaatatgcacactcagtttcctctgaaatgtcaggaaaagctacctagaaacgaagataggatttaaatttggatttagtaaatgaatagaacttggacaaacagggcatggagagatttacatatcatatttacgagtttcaaatttatcttataggcaaagagagacgtggaaattttaagcaatttggagggtagaagaaggctgatgtggtcggatttacatttaaacctctgtggttgttgtgtgaaagtagatttcacaaaatccgggatggattcagggagaagggttaaaggaccatttagctaatcctggcaaaaaaaaaaaa

SEQ ID NO: 274344 - DNA, 259 bp, Homo sapiens
accccatgcactctgagcccagatcatggcttcaggtcatgtgtgaccacagccccctgcctgcctggctgaggcgaagtctgtctcctctggctcacacttcgtccgtctgtaaaatagagatagcactatttggccccctcatggacacagaactgctgtgtggatggtgtgggacgattgtgggaaatggctttttagcaagtgttaatgggtcgcagcctgccgacatagcatttaaactgttttcaataatcag

SEQ ID NO: 274345 - DNA, 299 bp, Homo sapiens
taaactaaagagcttctgcacagcaaaagaaactaccatcagagtgaacaggcaacctacagaatgggagaaaatttttgcaacctactcatctgacaaagggctaatatccagaatctacaatgaactcaaacaaatttacaagaaaaaaacaaacaaccccatcaaaaagtgggcgaaggatatgaacagacacttctcatactgtagcgttttgcactttcccaagcaatgtatgaaagttccagtagtttcacatcctccccaatacttggtatatgttatcagttttgtcattt

SEQ ID NO: 274346 - DNA, 516 bp, Homo sapiens
gccatgataccgttgttgaattcataaaaccttcttaaatataaagtagatacagttctaagatagggaggttcttaactagttaaatagttgttggaaaagtgcaccttggtggaaataaaacagagccttgactttgccagagtccatcattgactccaaatatgtagcaacacctgtgtgttctaaaactacgtcaagtggtggggagaagttggggtaaaataaattagattttgaaatggaataaagaaaaaataatggtagaacactgtaaggtgaagacagacatatagtagatgctagttacagactggactctgaacttccttgcaaatgattcagaaaagaatatatgagaaattgcctttaaattataaagctttacacaaatgttcattagtattaattgtactatgaaaatttcaaaaggagttaaaactccaggagtttatggttttgtagtcccgagtataaagctgtgttctcaaattttcttttctttctttttttttt

SEQ ID NO: 274347 - DNA, 238 bp, Homo sapiens
ttttttttttttgcttctttctgtggatctgtttggaaatgtaacattttaaagcccttcttggctggaggattttttatggtaaacataaaacgttcattgaaacattaaacattttacagctgtttttcagcacataaattttcatagacatccaccccctcactgccacaccccctcatagatttcttcttttcctcctccttctcctcctccctcttcctcctctttttccccc

SEQ ID NO: 274348 - DNA, 221 bp, Homo sapiens
taattcaagtatactacttagagtatttcacttactccaggataagctttcaaatttatagctaaactgagccttgctgcagaatcaactagattactctctccaaaggaatttttttccaactggattcaatttcttattttaaatgtttgaacattctgaaaaacataggccgtgaggcttggctcttgttttaacataaagttaaaagaaaaatcact

SEQ ID NO: 274349 - DNA, 251 bp, Homo sapiens
ccgattccatgggggctgtcacttcccttataccagttgcttagctccaggatggcagaggccactcctttttcatctttctattctcagagttgacctaaaaataggtgtttgtcaagtggcctaaatggattacccaccccagctcctgtagttcctgccacatgggacaccatgagaatcttcttttctagctctgtgccaggaaagcttttgctgcctccgaagacctgggaagttttctccttggg

SEQ ID NO: 274350 - DNA, 405 bp, Homo sapiens
caccccaaagtcaagacgtagaactcattccacctccttcacccgaggctgctttcccaaacgtcttcccagtcccaccttctgtttttttgttgttgttgttgttgttgtttgtttttgagacagagtcttgcttgttgcccaggctggagtgcagtggcgtgatctcggctcactgcaacctctgcctcccaggttcaagcgattctcctgcctcagcctcctgagtagctgggattacaggcgtgagccactgtgcccggcctccacatagatgtcggataggtgttctgaacttatgccagagctgaactccacctgatccagaaacggctgccgtccacctgctcagaccatacctcagaactgttgctggctcctccttttccctcatgccccacattt

SEQ ID NO: 274351 - DNA, 301 bp, Homo sapiens
ctatcttcctgcctcagcctcccaaagtgctgggattacaggtgtgagccactgtgcctggcctcttggtgactctttgcaagggcattgctggctggctgatatggcctgcagcctctgcctgtaaccatcagagcgatactctcattatcggcaaggtgggacccaccctggcccaagagacagggcctgttattccactgtatggaggagaagctgaggcttagggaaggcagatgacttggcaaggtcataaagacagcaagctgcaggaccagctcattctaaggcatgaaccccc

SEQ ID NO: 274352 - DNA, 429 bp, Homo sapiens
ttttttttgagacagaatctcactctgttgcccaggctggagggcagtggagtgatcttggctcactgcaacctctgcctcctgggttcaagtgattctcctgcctcagcctcccgactagctgggattacaggtgcccgccaccacgtctggctaatttttgtatttttagtagagacagggtttcaccatgttggtcaggctggtgtcaaactcctgacctcatgtgattcgcctgccttggccttgcaaagtgctgggattacaggcatgagccactgagccaggctgaaaacaactttttatgtggttcagttttctcatctataaaatagggataacactaaaacatacttgtattatcacagtaatggttatttaattaaaaatgggaagcattgtatgaaatacattccaataaatgttgaa

SEQ ID NO: 274353 - DNA, 391 bp, Homo sapiens
gaaatgaccccagaataagcttcttgatttgtaaaattctatgtcattgactcaagtttgtatggcatctcaaaatataaatatagacatctcagataatatatttgaaatagcaaattcctgttagaaaagaatagtacttaactagataagaataacaggtcaccattatttgaattgtctcctattaatttttgttctgttgtgttactcatgttttacttatgggggatatacataacttctgctgttttcagaattattgtatgcagtcagtatgagaatgcaattttagtttccttgatgctttctcacacctctattactagaaataagaatacagtaatattggcaaagaaaattgaccagttcaataaatttttttagtaaa

SEQ ID NO: 274354 - DNA, 154 bp, Homo sapiens
tcctctgtgtatgactctgggtataaatagaacagtaataaattggttttggaaaaatgtggtacacattggaaaagatgaaggctagcgcctggtacactttggattaaaatacgtatcaaacttccatattatccccttctgtcgtcttctc

SEQ ID NO: 274355 - DNA, 900 bp, Homo sapiens
tgtgtacctgtgcagtgttctggggcacggtttataagcagcgggggagttagcctaccgtacatggggaaaagttagccttgtttgcctgggaaataccaagataatctgggctgcacgtttctaaggaattaatggctctgttgacttggtctttgggaaatttgcatatacacttctggtagatgtctcttcccctccctgctccccaaaagaaagggtctccctctgttgcccaggctggagtggagtacagtggcatgatcatggctcactgcagcctctaactcctgggctcaagtgatcctcccaccctagccttctgagtagctgggactacaggcgcaggcacctatgcctgggtaatttttatttttgtttttgtagagacagagtctcactgtgttgcccaggctggtctccgaactcctggcttcaagtcatcctcctgcctctcttttctcctcttaaaaaatactgtcttaaaaaggaaaacctccaaatacctttactggtttttaaaatttcaaatgctatgtaatatttctgataaaatttcagatgtaatcggagtggtcatcatgagtggccagaagctcctgaagtcctaagtgacctagagatgggccctgttgaccccgcagcatctgctaagcgtgtggcttttgtgcagctccctggagagctggagtgcagtagccacagcccccacaccagcagcaggaactgaagagtggctttctcgaaacacaaccatgttgcctttcacttaatttgtttgatccaaataattattttctcgggagaatttataaacgataacttgtctctttcaaaagtgtcagaggggccgggcacggtggctgacgcctgtaattccagcactttgggaggccgagg

SEQ ID NO: 274356 - DNA, 593 bp, Homo sapiens
tggctgcatagccaagggaatttagggttggaatgacacaggcctgagtggaaattcaagagctgtcatttcctagcaccatgaagttgggcaagtcacttaacctctaagaggctcagctctatcactttatctaagtggggcctgacacttgggtagtactcaataagaaaatttcctttctcatgaggtggctgctcagggagagatggtcaggacagaatatctacccaaggttgagaagacagaggagaaaccagggcacatcctggagaaggcagcttcaggagtgggtcctggggtctggggtggggtgggagacgttttcgatgttgtttaatgggcggtagtgggaccaaggagagttccagtcacttggaaaacaggactgcagagtggaggcaagagccatagaaaagagagaaagccctagaaggggctaggagggccatcttctgccacttcactcatctgtggatcaccaggtctacccacagttttacaaatttcactccagttctgccctaacttattacatatcagggcctttcactcattatctcaaaaatgacatatagagatctttgcctgtg

SEQ ID NO: 274357 - DNA, 539 bp, Homo sapiens
tggctgcatagccaagggaatttagggttggaatgacacaggcctgagtggaaattcaagagctgtcatttcctagcaccatgaagttgggcaagtcacttaacctctaagaggctcagctctatcactttatctaagtggggcctgacacttgggtagtactcaataagaaaatttcctttctcatgaggtggctgctcagggagagatggtcaggacagaatatctacccaaggttgagaagacagaggagaaaccagggcacatcctggacgatgttgtttaatgggcggtagtgggaccaaggagagttccagtcacttggaaaacaggactgcagagtggaggcaagagccatagaaaagagagaaagccctagaaggggctaggagggccatcttctgccacttcactcatctgtggatcaccaggtctacccacagttttacaaatttcactccagttctgccctaacttattacatatcagggcctttcactcattatctcaaaaatgacatatagagatctttgcctgtg

SEQ ID NO: 274358 - DNA, 304 bp, Homo sapiens
ttacttgaaaccaaactgactcatgagaaaaagaaaaaggatcagagggttgcaactttcagccccacccactgacctctaaaaaattggggaaagagcctgggaaacatggcaaaaccccatctctacaaaaaatgcaaaattagtcgggtggggtggtatgtgcctgtagtcccagctactcaggaggctgaagctggaggatctgcttgagcccaggaagcagaggttatggtgagccaagatggtgccactgcacttaagcctgggcaacagagccagaccctgtctccaaaaaaaaaaa

SEQ ID NO: 274359 - DNA, 432 bp, Homo sapiens
ctctctgttgcctcctgggctcaagcaatcctcttctctcagcctcccaagtagctgagactacaggtgcatgcctgtagtagatatagcatcttgctctgttgcccagactggtcttgaactcttggtcacaagcgatcctcttgccttggcctctcaaagtgctggaattacacgcgtgagccattgagcccaaccagataagatgatctttaagggcccttcccatggtaccataatccaagtcagcgagactgtggctatagcaagtttaacataaccagatacgctagtattatgggctgcatggtgtgccccccacccctaattcatgtattgaagccatgaccctccagaccttagaggtgaccttattggaaccagagtctttacagaggtgatcaagttaaaatgaggtcactagaggccagg

SEQ ID NO: 274360 - DNA, 402 bp, Homo sapiens
cacatcgcttacaattagaattatgcagctcttcagcaagcagccatcgcttctctttcaacgaattagctccatatttcagccgccctgtcttctcgctcttatcggctccagcgactcggcggtgacatttcatctttgacagaccttctctattttcactccaatgtgataaaacttttatggaaccacaactaagaaatgaagttttcccaaggatgatggaaacagagccgcacattagcctgaggaccgttttatttacgcttggatccaacagcttctcccaccctcctctcccctttctctggcaggggaaatcgaacgtgcttcccctccctccgcctcgagttttatttagtgatttaattttacttagttttaaagtttgacctgagaagt

SEQ ID NO: 274361 - DNA, 753 bp, Homo sapiens
ctcgtcgtggtgagcgcagccactcaggctggtcctgggggtggggctgtaggggaaagtgctaaagtgcacctggcctgacattctttatgaaatttagaattgttgaagaactataacatttcagtagggttcaaggtggtcccaaaagttatataaaagattagtttttactataaacccttgtcttttactcagatcctagcatcccttttcacatggtttctccatgtatataacagaatcaagaaacaaattttaattaaacaatctgtaacagaatcaagaaacaaatacattttaattaaacaatctatatggaacaaacattcccaaattctaagaataaatttttctttaagtaaaaaaaaaaaaaaaaaaaaaaaaaaaaaaaaaaaaaaaaaaaaaacaaacaaaagacaaaaaaaaaaagcaagagaaccagaaaaaaagaaaataaagaagagtgaaccactcaaaccgaagcacggcagcgagctgggaacggcccgcgcgtatgagaagaaaggccgcgaatactgtgacaaaacaaaaagaggagtaccccggacgccgacgaacgagcggagacacagcccgaccgccgtgaccacagatactgccgcgttttgtgtatagtgacacgaggaggcaaacaacgcgaaccgactagcacagatagttcatggaacgagatgcacacaacgtgcagcgagcaagtagcaaacatacgcaacacaaggaaatacaaag

SEQ ID NO: 274362 - DNA, 698 bp, Homo sapiens
caggaggttgaagtgagaggatcgcttgagccccagtgttggagacggaagtgtcattacaccactgcactccagcctgggggatagagagagaccctgtctcaaaaacaaacaactaagacatgattaagttatgtgcatgattttgttagacagttcaagtttgtgtgaaaggaatagagttgtgctactccaggctgctgtggaactctgataaagattatgcttctcttttaagtagagaactgctttatgaagccttgaatttaggttccagagtttctgaatgaaaatgagaaaactgcaacattcttttgcttttctgtacccaatataaatcagatactttctactgacctctcagaaaactcagagtcacctcctgataccatcagggtcttgcagaagccatttgtcaacaaatatttgctaagaagtgaattcatgttcccaggtaatgagagaaatgcctcctccctatatcctaagcatactgaggccaaatttggcaacaaaaggggaaatttgcctgaaatacatgcttttatgcaatgtttgctatttcacagattaatcattaaattagaaccaccaataatagcatgctagtataatccaaactagtttcactaatgatttaaagggaatgttagaataatggtgttatattgtccttaatattgcagagttgacattga

SEQ ID NO: 274363 - DNA, 3258 bp, Homo sapiens
aggcggggcgcgggcggaggcggggcgcggagaagtggcggaggtggaagcggaggcgtacccgcccctggggacgtcattggtggcggaggcaatggccggcaaccagctgtaagcgaggcacggaagacatatgcttgtgagacaaaggtgtctctgaaactatggatggtacaagaacttcacttgacattgaagagtactcggatactgaggtacagaaaaaccaagtactaactctggaagaatggcaagacaagtgggtgaacggcaagactgcttttcatcaggaacaaggacatcagctattaaagaagcatttagatactttccttaaaggcaagagtggactgagggtattttttcctctttgcggaaaagcggttgagatgaaatggtttgcagaccggggacacagtgtagttggtgtggaaatcagtgaacttgggatacaagaattttttacagagcagaatctttcttactcagaagaaccaatcaccgaaattcctggaaccaaagtatttaagagttcttcggggaacatttcattgtactgttgcagtatttttgatcttcccaggacaaatattggcaaatttgacatgatttgggatagaggagcattagttgccattaatccaggtgatcgcaaatgctatgcagatacaatgttttccctcctgggaaagaagtttcagtatctcctgtgtgttctttcttatgatccaactaaacatccaggtccaccattttatgttccacatgctgaaattgaaaggttgtttggtaaaatatgcaatatacgttgtcttgagaaggttgatgcttttgaagaacgacataaaagttggggaattgactgtctttttgaaaagttatatctacttacagaaaagtaaatgagacatagataaaataaaatcacactgacatgtttttgaggaattgaaaattatgctaaagcctgaaaatgtaatggatgaatttttaaaattgtttataaatcatatgatagatctttactaaaaatggctttttagtaaagccatttactttttctaaaaaagttttagaagaaaaagatgtaactaaacttttaaagtagctcctttggagaggagattatgatgtgaaagattatgcctatgtgtcttgcagattgcaagatattttaccaatcagcatgtgttacctgtacaattaaaaaaatatttcaaaatgcaatgcatattaaatataatacacacagaaaaactggcatttattttgttttatttttttgagatggagtttcgttcttgttgcccaacctggagtgcaatggtgcaatctcagctcactgcaacctctgcctcccaggttcaggtgattctcctgcctcagcctcctgagtagctgggattacaggtgtgcgccaccacgcccagctaattttttgtatttttagtagagacagggtttcaccatgttggtcaggctgatctcgagctcctgacctcaggtgatctacccacctcggcctcccaaagtgctgggattacaggcgtgagccactgcacctggcctgacattctttatgaaatttagaattgttgaagaactataacatttcagtagggttcaaggtggtcccaaaagttatataaaagattagtttttactataaacccttgtcttttactcagatcctagcatcccttttcacatggtttctccatgtatataacagaatcaagaaacaaattttaattaaacaatctgtaacagaatcaagaaacaaatacattttaattaaacaatctatatggaacaaacattcccaaattctaagaataaatttttctttaagttttctctgagtttggcaattgttgttttttataatttaatctgtttaaatcatcaggtcttataaaatataatgtacttagagctggattcatggctgtttattatgaaaggttagatttctcagttcttctttaaccacattttgttatatcagacagtcctctataactctgtactacccaacaactaaatggtttagattgtttagctcatgttaataggatggttgtgtattataaaaaacgagttacgtgtgtgtgtgcacgcatgcacgcacatgtgctggcttaaaggttgttaatgcaaggtttggggtcccctttaacactggtgaaagctacggtactctccccagagatatgtcttgtcagcctctctagttccccttggcctgcatgtacaaacttctaccctagaagctctctgccatcgatgtattctaatagatttgtaaggctattaatttgaagcaactccttgctcacagtgattcttgcttctctgagacctgctcccagtcgatactgtgggcttcagaagccatgactccccaactctgcctgtatcaccggttgaatggacaactaacccgagctggaccaacacaattctctccagagacttttgattttacttttatgtagagacagggtctcactttgttgcccacgctgatgttgaacttgacgtgaggcctcaagcagtcctcctgtcttggccacccaaagtgctaggattacaggtatgagccattgcgctggccctcttcataggcttttggacttgggaatagaaaagcaaccccgtctctactaaaaatacaaaaaaattggccaggcgtggtggcgcgtgcctgtaatcccagctacttgggaggctgaggcaggagaatcacttgaacctgggaggcggaggttgcagtgagctgagatcatgccactgcacgccagcctgggcaacagagcaagactctgtctcaaaagaaagaaaaagaaaagaaaaaaaagaaaggcaagttgactgctgaaaggggaatctgtgtacgcctgggagctgtggggcagccacattccagcacatggatctgagaaacagaacgctgatctgcagaaagagatgagaaccaaagagaggccacctgcgtcctgggtccattttcatcctccctgaagcccagctgcccagggtggggagaaacaccctgtgtccatgggatagagtcctttccgcttgcagttgtgcccaaagaatcttaaatacaaatgagatatccttaggtagttgatcttttatgtaatatgtgtcttcactggggaatactgacttcctaaaatctcaagatggaagatataccacatgtaaattattttagagcaattaaattgttttcaggattttccaaaa

SEQ ID NO: 274364 - DNA, 3238 bp, Homo sapiens
  misc_feature (4)..(4): n is a, c, g, or t
  misc_feature (10)..(10): n is a, c, g, or t
  misc_feature (44)..(44): n is a, c, g, or t
aganactccntgctctaaaagctgcggaaatccaactgaacccncttgcaactgcgtcattggtggcggaggcaatggccggcaaccagctgtaagcgaggcacggaagacatatgcttgtgagacaaaggtgtctctgaaactatggatggtacaagaacttcacttgacattgaagagtactcggatactgaggtacagaaaaaccaagtactaactctggaagaatggcaagacaagtgggtgaacggcaagactgcttttcatcaggaacaaggacatcagctattaaagaagcatttagatactttccttaaaggcaagagtggactgagggtattttttcctctttgcggaaaagcggttgagatgaaatggtttgcagaccggggacacagtgtagttggtgtggaaatcagtgaacttgggatacaagaattttttacagagcagaatctttcttactcagaagaaccaatcaccgaaattcctggaaccaaagtatttaagagttcttcggggaacatttcattgtactgttgcagtatttttgatcttcccaggacaaatattggcaaatttgacatgatttgggatagaggagcattagttgccattaatccaggtgatcgcaaatgctatgcagatacaatgttttccctcctgggaaagaagtttcagtatctcctgtgtgttctttcttatgatccaactaaacatccaggtccaccattttatgttccacatgctgaaattgaaaggttgtttggtaaaatatgcaatatacgttgtcttgagaaggttgatgcttttgaagaacgacataaaagttggggaattgactgtctttttgaaaagttatatctacttacagaaaagtaaatgagacatagataaaataaaatcacactgacatgtttttgaggaattgaaaattatgctaaagcctgaaaatgtaatggatgaatttttaaaattgtttataaatcatatgatagatctttactaaaaatggctttttagtaaagccatttactttttctaaaaaagttttagaagaaaaagatgtaactaaacttttaaagtagctcctttggagaggagattatgatgtgaaagattatgcctatgtgtcttgcagattgcaagatattttaccaatcagcatgtgttacctgtacaattaaaaaaatatttcaaaatgcaatgcatattaaatataatacacacagaaaaactggcatttattttgttttatttttttgagatggagtttcgttcttgttgcccaacctggagtgcaatggtgcaatctcagctcactgcaacctctgcctcccaggttcaggtgattctcctgcctcagcctcctgagtagctgggattacaggtgtgcgccaccacgcccagctaattttttgtatttttagtagagacagggtttcaccatgttggtcaggctgatctcgagctcctgacctcaggtgatctacccacctcggcctcccaaagtgctgggattacaggcgtgagccactgcacctggcctgacattctttatgaaatttagaattgttgaagaactataacatttcagtagggttcaaggtggtcccaaaagttatataaaagattagtttttactataaacccttgtcttttactcagatcctagcatcccttttcacatggtttctccatgtatataacagaatcaagaaacaaattttaattaaacaatctgtaacagaatcaagaaacaaatacattttaattaaacaatctatatggaacaaacattcccaaattctaagaataaatttttctttaagttttctctgagtttggcaattgttgttttttataatttaatctgtttaaatcatcaggtcttataaaatataatgtacttagagctggattcatggctgtttattatgaaaggttagatttctcagttcttctttaaccacattttgttatatcagacagtcctctataactctgtactacccaacaactaaatggtttagattgtttagctcatgttaataggatggttgtgtattataaaaaacgagttacgtgtgtgtgtgcacgcatgcacgcacatgtgctggcttaaaggttgttaatgcaaggtttggggtcccctttaacactggtgaaagctacggtactctccccagagatatgtcttgtcagcctctctagttccccttggcctgcatgtacaaacttctaccctagaagctctctgccatcgatgtattctaatagatttgtaaggctattaatttgaagcaactccttgctcacagtgattcttgcttctctgagacctgctcccagtcgatactgtgggcttcagaagccatgactccccaactctgcctgtatcaccggttgaatggacaactaacccgagctggaccaacacaattctctccagagacttttgattttacttttatgtagagacagggtctcactttgttgcccacgctgatgttgaacttgacgtgaggcctcaagcagtcctcctgtcttggccacccaaagtgctaggattacaggtatgagccattgcgctggccctcttcataggcttttggacttgggaatagaaaagcaaccccgtctctactaaaaatacaaaaaaattggccaggcgtggtggcgcgtgcctgtaatcccagctacttgggaggctgaggcaggagaatcacttgaacctgggaggcggaggttgcagtgagctgagatcatgccactgcacgccagcctgggcaacagagcaagactctgtctcaaaagaaagaaaaagaaaagaaaaaaaagaaaggcaagttgactgctgaaaggggaatctgtgtacgcctgggagctgtggggcagccacattccagcacatggatctgagaaacagaacgctgatctgcagaaagagatgagaaccaaagagaggccacctgcgtcctgggtccattttcatcctccctgaagcccagctgcccagggtggggagaaacaccctgtgtccatgggatagagtcctttccgcttgcagttgtgcccaaagaatcttaaatacaaatgagatatccttaggtagttgatcttttatgtaatatgtgtcttcactggggaatactgacttcctaaaatctcaagatggaagatataccacatgtaaattattttagagcaattaaattgttttcaggattttccaaaa

SEQ ID NO: 274365 - DNA, 1794 bp, Homo sapiens
aggcggggcgcgggcggaggcggggcgcggagaagtggcggaggtggaagcggaggcgtacccgcccctggggacgtcattggtggcggaggcaatggccggcaaccagctgtaagcgaggcacggaagacatatgcttgtgagacaaaggtgtctctgaaactatggatggtacaagaacttcacttgacattgaagagtactcggatactgaggtacagaaaaaccaagtactaactctggaagaatggcaagacaagtgggtgaacggcaagactgcttttcatcaggaacaaggacatcagctattaaagaagcatttagatactttccttaaaggcaagagtggactgagggtattttttcctctttgcggaaaagcggttgagatgaaatggtttgcagaccggggacacagtgtagttggtgtggaaatcagtgaacttgggatacaagaattttttacagagcagaatctttcttactcagaagaaccaatcaccgaaattcctggaaccaaagtatttaagagttcttcggggaacatttcattgtactgttgcagtatttttgatcttcccaggacaaatattggcaaatttgacatgatttgggatagaggagcattagttgccattaatccaggtgatcgcaaatgctatgcagatacaatgttttccctcctgggaaagaagtttcagtatctcctgtgtgttctttcttatgatccaactaaacatccaggtccaccattttatgttccacatgctgaaattgaaaggttgtttggtaaaatatgcaatatacgttgtcttgagaaggttgatgcttttgaagaacgacataaaagttggggaattgactgtctttttgaaaagttatatctacttacagaaaagtaaatgagacatagataaaataaaatcacactgacatgtttttgaggaattgaaaattatgctaaagcctgaaaatgtaatggatgaatttttaaaattgtttataaatcatatgatagatctttactaaaaatggctttttagtaaagccatttactttttctaaaaaagttttagaagaaaaagatgtaactaaacttttaaagtagctcctttggagaggagattatgatgtgaaagattatgcctatgtgtcttgcagattgcaagatattttaccaatcagcatgtgttacctgtacaattaaaaaaatatttcaaaatgcaatgcatattaaatataatacacacagaaaaactggcatttattttgttttatttttttgagatggagtttcgttcttggttgcagtgagctgagatcatgccactgcacgccagcctgggcaacagagcaagactctgtctcaaaagaaagaaaaagaaaagaaaaaaaagaaaggcaagttgactgctgaaaggggaatctgtgtacgcctgggagctgtggggcagccacattccagcacatggatctgagaaacagaacgctgatctgcagaaagagatgagaaccaaagagaggccacctgcgtcctgggtccattttcatcctccctgaagcccagctgcccagggtggggagaaacaccctgtgtccatgggatagagtcctttccgcttgcagttgtgcccaaagaatcttaaatacaaatgagatatccttaggtagttgatcttttatgtaatatgtgtcttcactggggaatactgacttcctaaaatctcaagatggaagatataccacatgtaaattattttagagcaattaaattgttttcaggattttccaaaa

SEQ ID NO: 274366 - DNA, 1644 bp, Homo sapiens
aggcggggcgcgggcggaggcggggcgcggagaagtggcggaggtggaagcggaggcgtacccgcccctggggacgtcattggtggcggaggcaatggccggcaaccagctgtaagcgaggcacggaagacatatgcttgtgagacaaaggtgtctctgaaactatggatggtacaagaacttcacttgacattgaagagtactcggatactgaggtacagaaaaaccaagtactaactctggaagaatggcaagacaagtgggtgaacggcaagactgcttttcatcaggaacaaggacatcagctattaaagaagcatttagatactttccttaaaggcaagagtggactgagggtattttttcctctttgcggaaaagcggttgagatgaaatggtttgcagaccggggacacagtgtagttggtgtggaaatcagtgaacttgggatacaagaattttttacagagcagaatctttcttactcagaagaaccaatcaccgaaattcctggaaccaaagtatttaagagttcttcggggaacatttcattgtactgttgcagtatttttgatcttcccaggacaaatattggcaaatttgacatgatttgggatagaggagcattagttgccattaatccaggtgatcgcaaatgctatgcagatacaatgttttccctcctgggaaagaagtttcagtatctcctgtgtgttctttcttatgatccaactaaacatccaggtccaccattttatgttccacatgctgaaattgaaaggttgtttggtaaaatatgcaatatacgttgtcttgagaaggttgatgcttttgaagaacgacataaaagttggggaattgactgtctttttgaaaagttatatctacttacagaaaagtaaatgagacatagataaaataaaatcacactgacatgtttttgaggaattgaaaattatgctaaagcctgaaaatgtaatggatgaatttttaaaattgtttataaatcatatgatagatctttactaaaaatggctttttagtaaagccatttactttttctaaaaaagttttagaagaaaaagatgtaactaaacttttaaagtagctcctttggagaggagattatgatgtgaaagattatgcctatgtgtgttgcagtgagctgagatcatgccactgcacgccagcctgggcaacagagcaagactctgtctcaaaagaaagaaaaagaaaagaaaaaaaagaaaggcaagttgactgctgaaaggggaatctgtgtacgcctgggagctgtggggcagccacattccagcacatggatctgagaaacagaacgctgatctgcagaaagagatgagaaccaaagagaggccacctgcgtcctgggtccattttcatcctccctgaagcccagctgcccagggtggggagaaacaccctgtgtccatgggatagagtcctttccgcttgcagttgtgcccaaagaatcttaaatacaaatgagatatccttaggtagttgatcttttatgtaatatgtgtcttcactggggaatactgacttcctaaaatctcaagatggaagatataccacatgtaaattattttagagcaattaaattgttttcaggattttccaaaa

SEQ ID NO: 274367 - DNA, 3592 bp, Homo sapiens
caggaggttgaagtgagaggatcgcttgagccccagtgttggagacggaagtgtcattacaccactgcactccagcctgggggatagagagagaccctgtctcaaaaacaaacaactaagacatgattaagttatgtgcatgattttgttagacagttcaagtttgtgtgaaaggaatagagttgtgctactccaggctgctgtggaactctgataaagattatgcttctcttttaagtagagaactgctttatgaagccttgaatttaggttccagagtttctgaatgaaaatgagaaaactgcaacattcttttgcttttctgtacccaatataaatcagatactttctactgacctctcagaaaactcagagtcacctcctgataccatcagggtcttgcagaagccatttgtcaacaaatatttgctaagaagtgaattcatgttcccaggcacggaagacatatgcttgtgagacaaaggtgtctctgaaactatggatggtacaagaacttcacttgacattgaagagtactcggatactgaggtacagaaaaaccaagtactaactctggaagaatggcaagacaagtgggtgaacggcaagactgcttttcatcaggaacaaggacatcagctattaaagaagcatttagatactttccttaaaggcaagagtggactgagggtattttttcctctttgcggaaaagcggttgagatgaaatggtttgcagaccggggacacagtgtagttggtgtggaaatcagtgaacttgggatacaagaattttttacagagcagaatctttcttactcagaagaaccaatcaccgaaattcctggaaccaaagtatttaagagttcttcggggaacatttcattgtactgttgcagtatttttgatcttcccaggacaaatattggcaaatttgacatgatttgggatagaggagcattagttgccattaatccaggtgatcgcaaatgctatgcagatacaatgttttccctcctgggaaagaagtttcagtatctcctgtgtgttctttcttatgatccaactaaacatccaggtccaccattttatgttccacatgctgaaattgaaaggttgtttggtaaaatatgcaatatacgttgtcttgagaaggttgatgcttttgaagaacgacataaaagttggggaattgactgtctttttgaaaagttatatctacttacagaaaagtaaatgagacatagataaaataaaatcacactgacatgtttttgaggaattgaaaattatgctaaagcctgaaaatgtaatggatgaatttttaaaattgtttataaatcatatgatagatctttactaaaaatggctttttagtaaagccatttactttttctaaaaaagttttagaagaaaaagatgtaactaaacttttaaagtagctcctttggagaggagattatgatgtgaaagattatgcctatgtgtcttgcagattgcaagatattttaccaatcagcatgtgttacctgtacaattaaaaaaatatttcaaaatgcaatgcatattaaatataatacacacagaaaaactggcatttattttgttttatttttttgagatggagtttcgttcttgttgcccaacctggagtgcaatggtgcaatctcagctcactgcaacctctgcctcccaggttcaggtgattctcctgcctcagcctcctgagtagctgggattacaggtgtgcgccaccacgcccagctaattttttgtatttttagtagagacagggtttcaccatgttggtcaggctgatctcgagctcctgacctcaggtgatctacccacctcggcctcccaaagtgctgggattacaggcgtgagccactgcacctggcctgacattctttatgaaatttagaattgttgaagaactataacatttcagtagggttcaaggtggtcccaaaagttatataaaagattagtttttactataaacccttgtcttttactcagatcctagcatcccttttcacatggtttctccatgtatataacagaatcaagaaacaaattttaattaaacaatctgtaacagaatcaagaaacaaatacattttaattaaacaatctatatggaacaaacattcccaaattctaagaataaatttttctttaagttttctctgagtttggcaattgttgttttttataatttaatctgtttaaatcatcaggtcttataaaatataatgtacttagagctggattcatggctgtttattatgaaaggttagatttctcagttcttctttaaccacattttgttatatcagacagtcctctataactctgtactacccaacaactaaatggtttagattgtttagctcatgttaataggatggttgtgtattataaaaaacgagttacgtgtgtgtgtgcacgcatgcacgcacatgtgctggcttaaaggttgttaatgcaaggtttggggtcccctttaacactggtgaaagctacggtactctccccagagatatgtcttgtcagcctctctagttccccttggcctgcatgtacaaacttctaccctagaagctctctgccatcgatgtattctaatagatttgtaaggctattaatttgaagcaactccttgctcacagtgattcttgcttctctgagacctgctcccagtcgatactgtgggcttcagaagccatgactccccaactctgcctgtatcaccggttgaatggacaactaacccgagctggaccaacacaattctctccagagacttttgattttacttttatgtagagacagggtctcactttgttgcccacgctgatgttgaacttgacgtgaggcctcaagcagtcctcctgtcttggccacccaaagtgctaggattacaggtatgagccattgcgctggccctcttcataggcttttggacttgggaatagaaaagcaaccccgtctctactaaaaatacaaaaaaattggccaggcgtggtggcgcgtgcctgtaatcccagctacttgggaggctgaggcaggagaatcacttgaacctgggaggcggaggttgcagtgagctgagatcatgccactgcacgccagcctgggcaacagagcaagactctgtctcaaaagaaagaaaaagaaaagaaaaaaaagaaaggcaagttgactgctgaaaggggaatctgtgtacgcctgggagctgtggggcagccacattccagcacatggatctgagaaacagaacgctgatctgcagaaagagatgagaaccaaagagaggccacctgcgtcctgggtccattttcatcctccctgaagcccagctgcccagggtggggagaaacaccctgtgtccatgggatagagtcctttccgcttgcagttgtgcccaaagaatcttaaatacaaatgagatatccttaggtagttgatcttttatgtaatatgtgtcttcactggggaatactgacttcctaaaatctcaagatggaagatataccacatgtaaattattttagagcaattaaattgttttcaggattttccaaaa

SEQ ID NO: 274368 - DNA, 3207 bp, Homo sapiens
aggcggggcgcgggcggaggcggggcgcggagaagtggcggaggtggaagcggaggcgtacccgcccctggggacgtcattggtggcggaggcaatggccggcaaccagctgtaagcgaggcacggaagacatatgcttgtgagacaaaggtgtctctgaaactatggatggtacaagaacttcacttgacattgaagagtactcggatactgaggtacagaaaaaccaagtactaactctggaagaatggcaagacaagtgggtgaacggcaagactgcttttcatcaggaacaaggacatcagctattaaagaagcatttagatactttccttaaaggcaagagtggactgagggtattttttcctctttgcggaaaagcggttgagatgaaatggtttgcagaccggggacacagtgtagttggtgtggaaatcagtgaacttgggatacaagaattttttacagagcagaatctttcttactcagaagaaccaatcaccgaaattcctggaaccaaagtatttaagagttcttcggggaacatttcattgtactgttgcagtatttttgatcttcccaggacaaatattggcaaatttgacatctatgcagatacaatgttttccctcctgggaaagaagtttcagtatctcctgtgtgttctttcttatgatccaactaaacatccaggtccaccattttatgttccacatgctgaaattgaaaggttgtttggtaaaatatgcaatatacgttgtcttgagaaggttgatgcttttgaagaacgacataaaagttggggaattgactgtctttttgaaaagttatatctacttacagaaaagtaaatgagacatagataaaataaaatcacactgacatgtttttgaggaattgaaaattatgctaaagcctgaaaatgtaatggatgaatttttaaaattgtttataaatcatatgatagatctttactaaaaatggctttttagtaaagccatttactttttctaaaaaagttttagaagaaaaagatgtaactaaacttttaaagtagctcctttggagaggagattatgatgtgaaagattatgcctatgtgtcttgcagattgcaagatattttaccaatcagcatgtgttacctgtacaattaaaaaaatatttcaaaatgcaatgcatattaaatataatacacacagaaaaactggcatttattttgttttatttttttgagatggagtttcgttcttgttgcccaacctggagtgcaatggtgcaatctcagctcactgcaacctctgcctcccaggttcaggtgattctcctgcctcagcctcctgagtagctgggattacaggtgtgcgccaccacgcccagctaattttttgtatttttagtagagacagggtttcaccatgttggtcaggctgatctcgagctcctgacctcaggtgatctacccacctcggcctcccaaagtgctgggattacaggcgtgagccactgcacctggcctgacattctttatgaaatttagaattgttgaagaactataacatttcagtagggttcaaggtggtcccaaaagttatataaaagattagtttttactataaacccttgtcttttactcagatcctagcatcccttttcacatggtttctccatgtatataacagaatcaagaaacaaattttaattaaacaatctgtaacagaatcaagaaacaaatacattttaattaaacaatctatatggaacaaacattcccaaattctaagaataaatttttctttaagttttctctgagtttggcaattgttgttttttataatttaatctgtttaaatcatcaggtcttataaaatataatgtacttagagctggattcatggctgtttattatgaaaggttagatttctcagttcttctttaaccacattttgttatatcagacagtcctctataactctgtactacccaacaactaaatggtttagattgtttagctcatgttaataggatggttgtgtattataaaaaacgagttacgtgtgtgtgtgcacgcatgcacgcacatgtgctggcttaaaggttgttaatgcaaggtttggggtcccctttaacactggtgaaagctacggtactctccccagagatatgtcttgtcagcctctctagttccccttggcctgcatgtacaaacttctaccctagaagctctctgccatcgatgtattctaatagatttgtaaggctattaatttgaagcaactccttgctcacagtgattcttgcttctctgagacctgctcccagtcgatactgtgggcttcagaagccatgactccccaactctgcctgtatcaccggttgaatggacaactaacccgagctggaccaacacaattctctccagagacttttgattttacttttatgtagagacagggtctcactttgttgcccacgctgatgttgaacttgacgtgaggcctcaagcagtcctcctgtcttggccacccaaagtgctaggattacaggtatgagccattgcgctggccctcttcataggcttttggacttgggaatagaaaagcaaccccgtctctactaaaaatacaaaaaaattggccaggcgtggtggcgcgtgcctgtaatcccagctacttgggaggctgaggcaggagaatcacttgaacctgggaggcggaggttgcagtgagctgagatcatgccactgcacgccagcctgggcaacagagcaagactctgtctcaaaagaaagaaaaagaaaagaaaaaaaagaaaggcaagttgactgctgaaaggggaatctgtgtacgcctgggagctgtggggcagccacattccagcacatggatctgagaaacagaacgctgatctgcagaaagagatgagaaccaaagagaggccacctgcgtcctgggtccattttcatcctccctgaagcccagctgcccagggtggggagaaacaccctgtgtccatgggatagagtcctttccgcttgcagttgtgcccaaagaatcttaaatacaaatgagatatccttaggtagttgatcttttatgtaatatgtgtcttcactggggaatactgacttcctaaaatctcaagatggaagatataccacatgtaaattattttagagcaattaaattgttttcaggattttccaaaa

SEQ ID NO: 274369 - DNA, 3204 bp, Homo sapiens
aggcggggcgcgggcggaggcggggcgcggagaagtggcggaggtggaagcggaggcgtacccgcccctggggacgtcattggtggcggaggcaatggccggcaaccagctgtaagcgaggcacggaagacatatgcttgtgagacaaaggtgtctctgaaactatggatggtacaagaacttcacttgacattgaagagtactcggatactgaggtacagaaaaaccaagtactaactctggaagaatggcaagacaagtgggtgaacggcaagactgcttttcatcaggaacaaggacatcagctattaaagaagcatttagatactttccttaaaggcaagagtggactgagggtattttttcctctttgcggggaaatcagtgaacttgggatacaagaattttttacagagcagaatctttcttactcagaagaaccaatcaccgaaattcctggaaccaaagtatttaagagttcttcggggaacatttcattgtactgttgcagtatttttgatcttcccaggacaaatattggcaaatttgacatgatttgggatagaggagcattagttgccattaatccaggtgatcgcaaatgctatgcagatacaatgttttccctcctgggaaagaagtttcagtatctcctgtgtgttctttcttatgatccaactaaacatccaggtccaccattttatgttccacatgctgaaattgaaaggttgtttggtaaaatatgcaatatacgttgtcttgagaaggttgatgcttttgaagaacgacataaaagttggggaattgactgtctttttgaaaagttatatctacttacagaaaagtaaatgagacatagataaaataaaatcacactgacatgtttttgaggaattgaaaattatgctaaagcctgaaaatgtaatggatgaatttttaaaattgtttataaatcatatgatagatctttactaaaaatggctttttagtaaagccatttactttttctaaaaaagttttagaagaaaaagatgtaactaaacttttaaagtagctcctttggagaggagattatgatgtgaaagattatgcctatgtgtcttgcagattgcaagatattttaccaatcagcatgtgttacctgtacaattaaaaaaatatttcaaaatgcaatgcatattaaatataatacacacagaaaaactggcatttattttgttttatttttttgagatggagtttcgttcttgttgcccaacctggagtgcaatggtgcaatctcagctcactgcaacctctgcctcccaggttcaggtgattctcctgcctcagcctcctgagtagctgggattacaggtgtgcgccaccacgcccagctaattttttgtatttttagtagagacagggtttcaccatgttggtcaggctgatctcgagctcctgacctcaggtgatctacccacctcggcctcccaaagtgctgggattacaggcgtgagccactgcacctggcctgacattctttatgaaatttagaattgttgaagaactataacatttcagtagggttcaaggtggtcccaaaagttatataaaagattagtttttactataaacccttgtcttttactcagatcctagcatcccttttcacatggtttctccatgtatataacagaatcaagaaacaaattttaattaaacaatctgtaacagaatcaagaaacaaatacattttaattaaacaatctatatggaacaaacattcccaaattctaagaataaatttttctttaagttttctctgagtttggcaattgttgttttttataatttaatctgtttaaatcatcaggtcttataaaatataatgtacttagagctggattcatggctgtttattatgaaaggttagatttctcagttcttctttaaccacattttgttatatcagacagtcctctataactctgtactacccaacaactaaatggtttagattgtttagctcatgttaataggatggttgtgtattataaaaaacgagttacgtgtgtgtgtgcacgcatgcacgcacatgtgctggcttaaaggttgttaatgcaaggtttggggtcccctttaacactggtgaaagctacggtactctccccagagatatgtcttgtcagcctctctagttccccttggcctgcatgtacaaacttctaccctagaagctctctgccatcgatgtattctaatagatttgtaaggctattaatttgaagcaactccttgctcacagtgattcttgcttctctgagacctgctcccagtcgatactgtgggcttcagaagccatgactccccaactctgcctgtatcaccggttgaatggacaactaacccgagctggaccaacacaattctctccagagacttttgattttacttttatgtagagacagggtctcactttgttgcccacgctgatgttgaacttgacgtgaggcctcaagcagtcctcctgtcttggccacccaaagtgctaggattacaggtatgagccattgcgctggccctcttcataggcttttggacttgggaatagaaaagcaaccccgtctctactaaaaatacaaaaaaattggccaggcgtggtggcgcgtgcctgtaatcccagctacttgggaggctgaggcaggagaatcacttgaacctgggaggcggaggttgcagtgagctgagatcatgccactgcacgccagcctgggcaacagagcaagactctgtctcaaaagaaagaaaaagaaaagaaaaaaaagaaaggcaagttgactgctgaaaggggaatctgtgtacgcctgggagctgtggggcagccacattccagcacatggatctgagaaacagaacgctgatctgcagaaagagatgagaaccaaagagaggccacctgcgtcctgggtccattttcatcctccctgaagcccagctgcccagggtggggagaaacaccctgtgtccatgggatagagtcctttccgcttgcagttgtgcccaaagaatcttaaatacaaatgagatatccttaggtagttgatcttttatgtaatatgtgtcttcactggggaatactgacttcctaaaatctcaagatggaagatataccacatgtaaattattttagagcaattaaattgttttcaggattttccaaaa

SEQ ID NO: 274370 - DNA, 2171 bp, Homo sapiens
caagagatattacagcacgcacctcgttttatttcagttacgctggcctagcgtttacagctctagttacttgccctgtgtctacaacaaagaggttccgggcgtagccctcgtcggataactccgagctcaaaatacgagacctctgccttctagtatcgtgtcctagtgcttagtcacttggctccctgagatcagttaaactgtttcttaacctgtgcacagggacagcagcacctgtcctgcacacctccgctctagggcatagtacatgccagactcctgttggagagaattgaattagaggcatagaagaaagttccctggacacgaagccaggagatctgtgttctaagcccagactcactgtcaccttaggctagtgcctccctctctgagccacagcttccttgggcggatttaagggaactaggcacgtttaatatattgagagagctgctgggaacatttgcacctggcctgacattctttatgaaatttagaattgttgaagaactataacatttcagtagggttcaaggtggtcccaaaagttatataaaagattagtttttactataaacccttgtcttttactcagatcctagcatcccttttcacatggtttctccatgtatataacagaatcaagaaacaaattttaattaaacaatctgtaacagaatcaagaaacaaatacattttaattaaacaatctatatggaacaaacattcccaaattctaagaataaatttttctttaagttttctctgagtttggcaattgttgttttttataatttaatctgtttaaatcatcaggtcttataaaatataatgtacttagagctggattcatggctgtttattatgaaaggttagatttctcagttcttctttaaccacattttgttatatcagacagtcctctataactctgtactacccaacaactaaatggtttagattgtttagctcatgttaataggatggttgtgtattataaaaaacgagttacgtgtgtgtgtgcacgcatgcacgcacatgtgctggcttaaaggttgttaatgcaaggtttggggtcccctttaacactggtgaaagctacggtactctccccagagatatgtcttgtcagcctctctagttccccttggcctgcatgtacaaacttctaccctagaagctctctgccatcgatgtattctaatagatttgtaaggctattaatttgaagcaactccttgctcacagtgattcttgcttctctgagacctgctcccagtcgatactgtgggcttcagaagccatgactccccaactctgcctgtatcaccggttgaatggacaactaacccgagctggaccaacacaattctctccagagacttttgattttacttttatgtagagacagggtctcactttgttgcccacgctgatgttgaacttgacgtgaggcctcaagcagtcctcctgtcttggccacccaaagtgctaggattacaggtatgagccattgcgctggccctcttcataggcttttggacttgggaatagaaaagcaaccccgtctctactaaaaatacaaaaaaattggccaggcgtggtggcgcgtgcctgtaatcccagctacttgggaggctgaggcaggagaatcacttgaacctgggaggcggaggttgcagtgagctgagatcatgccactgcacgccagcctgggcaacagagcaagactctgtctcaaaagaaagaaaaagaaaagaaaaaaaagaaaggcaagttgactgctgaaaggggaatctgtgtacgcctgggagctgtggggcagccacattccagcacatggatctgagaaacagaacgctgatctgcagaaagagatgagaaccaaagagaggccacctgcgtcctgggtccattttcatcctccctgaagcccagctgcccagggtggggagaaacaccctgtgtccatgggatagagtcctttccgcttgcagttgtgcccaaagaatcttaaatacaaatgagatatccttaggtagttgatcttttatgtaatatgtgtcttcactggggaatactgacttcctaaaatctcaagatggaagatataccacatgtaaattattttagagcaattaaattgttttcaggattttccaaaa

SEQ ID NO: 274371 - DNA, 1797 bp, Homo sapiens
attggggggaacctgagactgaccatcacattggtgaggaagtcctccacctggatgagagtttggaataactaggagactctttaaacctacttctgcacctggcctgacattctttatgaaatttagaattgttgaagaactataacatttcagtagggttcaaggtggtcccaaaagttatataaaagattagtttttactataaacccttgtcttttactcagatcctagcatcccttttcacatggtttctccatgtatataacagaatcaagaaacaaattttaattaaacaatctgtaacagaatcaagaaacaaatacattttaattaaacaatctatatggaacaaacattcccaaattctaagaataaatttttctttaagttttctctgagtttggcaattgttgttttttataatttaatctgtttaaatcatcaggtcttataaaatataatgtacttagagctggattcatggctgtttattatgaaaggttagatttctcagttcttctttaaccacattttgttatatcagacagtcctctataactctgtactacccaacaactaaatggtttagattgtttagctcatgttaataggatggttgtgtattataaaaaacgagttacgtgtgtgtgtgcacgcatgcacgcacatgtgctggcttaaaggttgttaatgcaaggtttggggtcccctttaacactggtgaaagctacggtactctccccagagatatgtcttgtcagcctctctagttccccttggcctgcatgtacaaacttctaccctagaagctctctgccatcgatgtattctaatagatttgtaaggctattaatttgaagcaactccttgctcacagtgattcttgcttctctgagacctgctcccagtcgatactgtgggcttcagaagccatgactccccaactctgcctgtatcaccggttgaatggacaactaacccgagctggaccaacacaattctctccagagacttttgattttacttttatgtagagacagggtctcactttgttgcccacgctgatgttgaacttgacgtgaggcctcaagcagtcctcctgtcttggccacccaaagtgctaggattacaggtatgagccattgcgctggccctcttcataggcttttggacttgggaatagaaaagcaaccccgtctctactaaaaatacaaaaaaattggccaggcgtggtggcgcgtgcctgtaatcccagctacttgggaggctgaggcaggagaatcacttgaacctgggaggcggaggttgcagtgagctgagatcatgccactgcacgccagcctgggcaacagagcaagactctgtctcaaaagaaagaaaaagaaaagaaaaaaaagaaaggcaagttgactgctgaaaggggaatctgtgtacgcctgggagctgtggggcagccacattccagcacatggatctgagaaacagaacgctgatctgcagaaagagatgagaaccaaagagaggccacctgcgtcctgggtccattttcatcctccctgaagcccagctgcccagggtggggagaaacaccctgtgtccatgggatagagtcctttccgcttgcagttgtgcccaaagaatcttaaatacaaatgagatatccttaggtagttgatcttttatgtaatatgtgtcttcactggggaatactgacttcctaaaatctcaagatggaagatataccacatgtaaattattttagagcaattaaattgttttcaggattttccaaaa

SEQ ID NO: 274372 - DNA, 1788 bp, Homo sapiens
tgtgaagtatttgggtatctaaacatagaaaatgttcaataaagatacaatataacagataaaaatgggattacaggcgtgagccactgcacctggcctgacattctttatgaaatttagaattgttgaagaactataacatttcagtagggttcaaggtggtcccaaaagttatataaaagattagtttttactataaacccttgtcttttactcagatcctagcatcccttttcacatggtttctccatgtatataacagaatcaagaaacaaattttaattaaacaatctgtaacagaatcaagaaacaaatacattttaattaaacaatctatatggaacaaacattcccaaattctaagaataaatttttctttaagttttctctgagtttggcaattgttgttttttataatttaatctgtttaaatcatcaggtcttataaaatataatgtacttagagctggattcatggctgtttattatgaaaggttagatttctcagttcttctttaaccacattttgttatatcagacagtcctctataactctgtactacccaacaactaaatggtttagattgtttagctcatgttaataggatggttgtgtattataaaaaacgagttacgtgtgtgtgtgcacgcatgcacgcacatgtgctggcttaaaggttgttaatgcaaggtttggggtcccctttaacactggtgaaagctacggtactctccccagagatatgtcttgtcagcctctctagttccccttggcctgcatgtacaaacttctaccctagaagctctctgccatcgatgtattctaatagatttgtaaggctattaatttgaagcaactccttgctcacagtgattcttgcttctctgagacctgctcccagtcgatactgtgggcttcagaagccatgactccccaactctgcctgtatcaccggttgaatggacaactaacccgagctggaccaacacaattctctccagagacttttgattttacttttatgtagagacagggtctcactttgttgcccacgctgatgttgaacttgacgtgaggcctcaagcagtcctcctgtcttggccacccaaagtgctaggattacaggtatgagccattgcgctggccctcttcataggcttttggacttgggaatagaaaagcaaccccgtctctactaaaaatacaaaaaaattggccaggcgtggtggcgcgtgcctgtaatcccagctacttgggaggctgaggcaggagaatcacttgaacctgggaggcggaggttgcagtgagctgagatcatgccactgcacgccagcctgggcaacagagcaagactctgtctcaaaagaaagaaaaagaaaagaaaaaaaagaaaggcaagttgactgctgaaaggggaatctgtgtacgcctgggagctgtggggcagccacattccagcacatggatctgagaaacagaacgctgatctgcagaaagagatgagaaccaaagagaggccacctgcgtcctgggtccattttcatcctccctgaagcccagctgcccagggtggggagaaacaccctgtgtccatgggatagagtcctttccgcttgcagttgtgcccaaagaatcttaaatacaaatgagatatccttaggtagttgatcttttatgtaatatgtgtcttcactggggaatactgacttcctaaaatctcaagatggaagatataccacatgtaaattattttagagcaattaaattgttttcaggattttccaaaa

SEQ ID NO: 274373 - DNA, 1164 bp, Homo sapiens
aggcggggcgcgggcggaggcggggcgcggagaagtggcggaggtggaagcggaggcgtacccgcccctggggacgtcattggtggcggaggcaatggccggcaaccagctgtaagcgaggcacggaagacatatgcttgtgagacaaaggtgtctctgaaactatggatggtacaagaacttcacttgacattgaagagtactcggatactgaggtacagaaaaaccaagtactaactctggaagaatggcaagacaagtgggtgaacggcaagactgcttttcatcaggaacaaggacatcagctattaaagaagcatttagatactttccttaaaggcaagagtggactgagggtattttttcctctttgcggaaaagcggttgagatgaaatggtttgcagaccggggacacagtgtagttggtgtggaaatcagtgaacttgggatacaagaattttttacagagcagaatctttcttactcagaagaaccaatcaccgaaattcctggaaccaaagtatttaagagttcttcggggaacatttcattgtactgttgcagtatttttgatcttcccaggacaaatattggcaaatttgacatgatttgggatagaggagcattagttgccattaatccaggtgatcgcaaatggtccaccattttatgttccacatgctgaaattgaaaggttgtttggtaaaatatgcaatatacgttgtcttgagaaggttgatgcttttgaagaacgacataaaagttggggaattgactgtctttttgaaaagttatatctacttacagaaaagtaaatgagacatagataaaataaaatcacactgacatgtttttgaggaattgaaaattatgctaaagcctgaaaatgtaatggatgaatttttaaaattgtttataaatcatatgatagatctttactaaaaatggctttttagtaaagccatttactttttctaaaaaagttttagaagaaaaagatgtaactaaacttttaaagtagctcctttggagaggagattatgatgtgaaagattatgcctatgtgtcttgcagattgcaagatattttaccaatcagcatgtgttacctgtacaattaaaaaaatatttcaaaatgcaatgcatattaaatataatacacac

SEQ ID NO: 274374 - DNA, 429 bp, Homo sapiens
  misc_feature (4)..(4): n is a, c, g, or t
  misc_feature (10)..(10): n is a, c, g, or t
  misc_feature (44)..(44): n is a, c, g, or t
aganactccntgctctaaaagctgcggaaatccaactgaacccncttgcaactgcgtcattggtggcggaggcaatggccggcaaccagctgtaagcgaggcacggaagacatatgcttgtgagacaaaggtgtctctgaaactatggatggtacaagaacttcacttgacattgaagagtactcggatactgaggtacagaaaaaccaagtactaactctggaagaatggcaagacaagtgggtgaacggcaagactgcttttcatcaggaacaaggacatcagctattaaagaagcatttagatactttccttaaaggcaagagtggactgagggtattttttcctctttgcggaaaagcggttgagatgaaatggtttgcagaccggggacacgtgtagaaatgacacgggatctccttgaatcga

SEQ ID NO: 274375 - DNA, 330 bp, Homo sapiens
ttgcaaatattttccacgtaggcacggaagacatatgcttgtgagacaaaggtgtctctgaaactatggatggtacaagaacttcacttgacattgaagagtactcggatactgaggtacagaaaaaccaagtactaactctggaagaatggcaagacaagtgggtgaacggcaagactgcttttcatcaggaacaaggacatcagctattaaagaagcatttagatactttccttaaaggcaagagtggactgagggtattttttcctctttgcggtgagctgagatcatgccactgcacgcaagcctgggcaacagagcaagactctg

SEQ ID NO: 274376 - DNA, 1250 bp, Homo sapiens
aggcggggcgcgggcggaggcggggcgcggagaagtggcggaggtggaagcggaggcgtacccgcccctggggacgtcattggtggcggaggcaatggccggcaaccagctgtaagcgaggcacggaagacatatgcttgtgagacaaaggtgtctctgaaactatggatggtacaagaacttcacttgacattgaagagtactcggatactgaggtacagaaaaaccaagtactaactctggaagaatggcaagacaagtgggtgaacggcaagactgcttttcatcaggaacaaggacatcagctattaaagaagcatttagatactttccttaaaggcaagagtggactgagggtattttttcctctttgcggaaaagcggttgagatgaaatggtttgcagaccggggacacagtgtagttggtgtggaaatcagtgaacttgggatacaagaattttttacagagcagaatctttcttactcagaagaaccaatcaccgaaattcctggaaccaaagtatttaagagttcttcggggaacatttcattgtactgttgcagtatttttgatcttcccaggacaaatattggcaaatttgacatgatttgggatagaggagcattagttgccattaatccaggtgatcgcaaatgctatgcagatacaatgttttccctcctgggaaagaagtttcagtatctcctgtgtgttctttcttatgatccaactaaacatccaggtccaccattttatgttccacatgctgaaattgaaaggttgtttggtaaaatatgcaatatacgttgtcttgagaaggttgatgcttttgaagaacgacataaaagttggggaattgactgtctttttgaaaagttatatctacttacagaaaagtaaatgagacatagataaaataaaatcacactgacatgtttttgaggaattgaaaattatgctaaagcctgaaaatgtaatggatgaatttttaaaattgtttataaatcatatgatagatctttactaaaaatggctttttagtaaagccatttactttttctaaaaaagttttagaagaaaaagatgtaactaaacttttaaagtagctcctttggagaggagattatgatgtgaaagattatgcctatgtgtcttgcagattgcaagatattttaccaatcagcatgtgttacctgtacaattaaaaaaatatttcaaaatgcaatgcatattaaatataatacacac

SEQ ID NO: 274377 - DNA, 1768 bp, Homo sapiens
aggcggggcgcgggcggaggcggggcgcggagaagtggcggaggtggaagcggaggcgtacccgcccctggggacgtcattggtggcggaggcaatggccggcaaccagctgtaagcgaggcacggaagacatatgcttgtgagacaaaggtgtctctgaaactatggatggtacaagaacttcacttgacattgaagagtactcggatactgaggtacagaaaaaccaagtactaactctggaagaatggcaagacaagtgggtgaacggcaagactgcttttcatcaggaacaaggacatcagctattaaagaagcatttagatactttccttaaaggcaagagtggactgagggtattttttcctctttgcggaaaagcggttgagatgaaatggtttgcagaccggggacacagtgtagttggtgtggaaatcagtgaacttgggatacaagaattttttacagagcagaatctttcttactcagaagaaccaatcaccgaaattcctggaaccaaagtatttaagagttcttcggggaacatttcattgtactgttgcagtatttttgatcttcccaggacaaatattggcaaatttgacatgatttgggatagaggagcattagttgccattaatccaggtgatcgcaaatgctatgcagatacaatgttttccctcctgggaaagaagtttcagtatctcctgtgtgttctttcttatgatccaactaaacatccaggtccaccattttatgttccacatgctgaaattgaaaggttgtttggtaaaatatgcaatatacgttgtcttgagaaggttgatgcttttgaagaacgacataaaagttggggaattgactgtctttttgaaaagttatatctacttacagaaaagtaaatgagacatagataaaataaaatcacactgacatgtttttgaggaattgaaaattatgctaaagcctgaaaatgtaatggatgaatttttaaaattgtttataaatcatatgatagatctttactaaaaatggctttttagtaaagccatttactttttctaaaaaagttttagaagaaaaagatgtaactaaacttttaaagtagctcctttggagaggagattatgatgtgaaagattatgcctatgtgtcttgcagattgcaagatattttaccaatcagcatgtgttacctgtacaattaaaaaaatatttcaaaatgcaatgcatattaaatataatacacacagaaaaactggcatttattttgttttatttttttgagatggagtttcgttcttgtgcacgccagcctgggcaacagagcaagactctgtctcaaaagaaagaaaaagaaaagaaaaaaaagaaaggcaagttgactgctgaaaggggaatctgtgtacgcctgggagctgtggggcagccacattccagcacatggatctgagaaacagaacgctgatctgcagaaagagatgagaaccaaagagaggccacctgcgtcctgggtccattttcatcctccctgaagcccagctgcccagggtggggagaaacaccctgtgtccatgggatagagtcctttccgcttgcagttgtgcccaaagaatcttaaatacaaatgagatatccttaggtagttgatcttttatgtaatatgtgtcttcactggggaatactgacttcctaaaatctcaagatggaagatataccacatgtaaattattttagagcaattaaattgttttcaggattttccaaaa

SEQ ID NO: 274378 - DNA, 1975 bp, Homo sapiens
aggcggggcgcgggcggaggcggggcgcggagaagtggcggaggtggaagcggaggcgtacccgcccctggggacgtcattggtggcggaggcaatggccggcaaccagctgtaagcgaggcacggaagacatatgcttgtgagacaaaggtgtctctgaaactatggatggtacaagaacttcacttgacattgaagagtactcggatactgaggtacagaaaaaccaagtactaactctggaagaatggcaagacaagtgggtgaacggcaagactgcttttcatcaggaacaaggacatcagctattaaagaagcatttagatactttccttaaaggcaagagtggactgagggtattttttcctctttgcggaaaagcggttgagatgaaatggtttgcagaccggggacacagtgtagttggtgtggaaatcagtgaacttgggatacaagaattttttacagagcagaatctttcttactcagaagaaccaatcaccgaaattcctggaaccaaagtatttaagagttcttcggggaacatttcattgtactgttgcagtatttttgatcttcccaggacaaatattggcaaatttgacatgatttgggatagaggagcattagttgccattaatccaggtgatcgcaaatgctatgcagatacaatgttttccctcctgggaaagaagtttcagtatctcctgtgtgttctttcttatgatccaactaaacatccaggtccaccattttatgttccacatgctgaaattgaaaggttgtttggtaaaatatgcaatatacgttgtcttgagaaggttgatgcttttgaagaacgacataaaagttggggaattgactgtctttttgaaaagttatatctacttacagaaaagtaaatgagacatagataaaataaaatcacactgacatgtttttgaggaattgaaaattatgctaaagcctgaaaatgtaatggatgaatttttaaaattgtttataaatcatatgatagatctttactaaaaatggctttttagtaaagccatttactttttctaaaaaagttttagaagaaaaagatgtaactaaacttttaaagtagctcctttggagaggagattatgatgtgaaagattatgcctatgtgtcttgcagattgcaagatattttaccaatcagcatgtgttacctgtacaattaaaaaaatatttcaaaatgcaatgcatattaaatataatacacacagaaaaactggcatttattttgttttatttttttgagatggagtttcgttcttggttgcagtgagctgagatcatgccactgcacgccagcctgggcaacagagcaagactctgtctcaaaagaaagaaaaagaaaagaaaaaaaagaaaggcaagttgactgctgaaaggggaatctgtgtacgcctgggagctgtggggcagccacattccagcacatggatctgagaaacagaacgctgatctgcagaaagagatgagaaccaaagagaggccacctgcgtcctgggtccattttcatcctccctgaagcccagctgcccagggtggggagaaacaccctgtgtccatgggatagagtcctttccgcttgcagttgtgcccaaagaatcttaaatacaaatgagatatccttaggtagttgatcttttatgtaatatgtgtcttcactggggaatactgacttcctaaaatctcaagatggaagatataccacatgtaaattattttagagcaattaaattgttttcaggattttccaaaacaaaacaaaacaaggggggacgacataaaattccccaaagggccaaactaaaaggacccgatttgtaacaggggcccaaagggggggaaaaaaacaaacggcgccatcacactgggatggaaaagaacatcactcagaagaacaatcggggacacacgacaaccacaaacaaccaagcaac

SEQ ID NO: 274379 - DNA, 3172 bp, Homo sapiens
aggcggggcgcgggcggaggcggggcgcggagaagtggcggaggtggaagcggaggcgtacccgcccctggggacgtcattggtggcggaggcaatggccggcaaccagctgtaagcgaggcacggaagacatatgcttgtgagacaaaggtgtctctgaaactatggatggtacaagaacttcacttgacattgaagagtactcggatactgaggtacagaaaaaccaagtactaactctggaagaatggcaagacaagtgggtgaacggcaagactgcttttcatcaggaacaaggacatcagctattaaagaagcatttagatactttccttaaaggcaagagtggactgagggtattttttcctctttgcggaaaagcggttgagatgaaatggtttgcagaccggggacacagtgtagttggtgtggaaatcagtgaacttgggatacaagaattttttacagagcagaatctttcttactcagaagaaccaatcaccgaaattcctggaaccaaagtatttaagagttcttcggggaacatttcattgtactgttgcagtatttttgatcttcccaggacaaatattggcaaatttgacatgatttgggatagaggagcattagttgccattaatccaggtgatcgcaaatggtccaccattttatgttccacatgctgaaattgaaaggttgtttggtaaaatatgcaatatacgttgtcttgagaaggttgatgcttttgaagaacgacataaaagttggggaattgactgtctttttgaaaagttatatctacttacagaaaagtaaatgagacatagataaaataaaatcacactgacatgtttttgaggaattgaaaattatgctaaagcctgaaaatgtaatggatgaatttttaaaattgtttataaatcatatgatagatctttactaaaaatggctttttagtaaagccatttactttttctaaaaaagttttagaagaaaaagatgtaactaaacttttaaagtagctcctttggagaggagattatgatgtgaaagattatgcctatgtgtcttgcagattgcaagatattttaccaatcagcatgtgttacctgtacaattaaaaaaatatttcaaaatgcaatgcatattaaatataatacacacagaaaaactggcatttattttgttttatttttttgagatggagtttcgttcttgttgcccaacctggagtgcaatggtgcaatctcagctcactgcaacctctgcctcccaggttcaggtgattctcctgcctcagcctcctgagtagctgggattacaggtgtgcgccaccacgcccagctaattttttgtatttttagtagagacagggtttcaccatgttggtcaggctgatctcgagctcctgacctcaggtgatctacccacctcggcctcccaaagtgctgggattacaggcgtgagccactgcacctggcctgacattctttatgaaatttagaattgttgaagaactataacatttcagtagggttcaaggtggtcccaaaagttatataaaagattagtttttactataaacccttgtcttttactcagatcctagcatcccttttcacatggtttctccatgtatataacagaatcaagaaacaaattttaattaaacaatctgtaacagaatcaagaaacaaatacattttaattaaacaatctatatggaacaaacattcccaaattctaagaataaatttttctttaagttttctctgagtttggcaattgttgttttttataatttaatctgtttaaatcatcaggtcttataaaatataatgtacttagagctggattcatggctgtttattatgaaaggttagatttctcagttcttctttaaccacattttgttatatcagacagtcctctataactctgtactacccaacaactaaatggtttagattgtttagctcatgttaataggatggttgtgtattataaaaaacgagttacgtgtgtgtgtgcacgcatgcacgcacatgtgctggcttaaaggttgttaatgcaaggtttggggtcccctttaacactggtgaaagctacggtactctccccagagatatgtcttgtcagcctctctagttccccttggcctgcatgtacaaacttctaccctagaagctctctgccatcgatgtattctaatagatttgtaaggctattaatttgaagcaactccttgctcacagtgattcttgcttctctgagacctgctcccagtcgatactgtgggcttcagaagccatgactccccaactctgcctgtatcaccggttgaatggacaactaacccgagctggaccaacacaattctctccagagacttttgattttacttttatgtagagacagggtctcactttgttgcccacgctgatgttgaacttgacgtgaggcctcaagcagtcctcctgtcttggccacccaaagtgctaggattacaggtatgagccattgcgctggccctcttcataggcttttggacttgggaatagaaaagcaaccccgtctctactaaaaatacaaaaaaattggccaggcgtggtggcgcgtgcctgtaatcccagctacttgggaggctgaggcaggagaatcacttgaacctgggaggcggaggttgcagtgagctgagatcatgccactgcacgccagcctgggcaacagagcaagactctgtctcaaaagaaagaaaaagaaaagaaaaaaaagaaaggcaagttgactgctgaaaggggaatctgtgtacgcctgggagctgtggggcagccacattccagcacatggatctgagaaacagaacgctgatctgcagaaagagatgagaaccaaagagaggccacctgcgtcctgggtccattttcatcctccctgaagcccagctgcccagggtggggagaaacaccctgtgtccatgggatagagtcctttccgcttgcagttgtgcccaaagaatcttaaatacaaatgagatatccttaggtagttgatcttttatgtaatatgtgtcttcactggggaatactgacttcctaaaatctcaagatggaagatataccacatgtaaattattttagagcaattaaattgttttcaggattttccaaaa

SEQ ID NO: 274380 - DNA, 870 bp, Homo sapiens
  misc_feature (768)..(768): n is a, c, g, or t
  misc_feature (772)..(772): n is a, c, g, or t
  misc_feature (777)..(777): n is a, c, g, or t
aggcggggcgcgggcggaggcggggcgcggagaagtggcggaggtggaagcggaggcgtacccgcccctggggacgtcattggtggcggaggcaatggccggcaaccagctgtaagcgaggcacggaagacatatgcttgtgagacaaaggtgtctctgaaactatggatggtacaagaacttcacttgacattgaagagtactcggatactgaggtacagaaaaaccaagtactaactctggaagaatggcaagacaagtgggtgaacggcaagactgcttttcatcaggaacaaggacatcagctattaaagaagcatttagatactttccttaaaggcaagagtggactgagggtattttttcctctttgcggaaaagcggttgagatgaaatggtttgcagaccggggacacagtgtagttggtgtggaaatcagtgaacttgggatacaagaattttttacagagcagaatctttcttactcagaagaaccaatcaccgaaattcctggaaccaaagtatttaagagttcttcggggaacatttcattgtactgttgcagtatttttgatcttcccaggacaaatattggcaaatttgacatgatttgggatagaggagcattagttgccattaatccaggtgatcgcaaatgctatgcagatacaatgttttccctcctgggaaagaagtttcagtatctcctgtgtgttctttcttatgatccaactaaacatccagccccatttatgttccacaggtganttgnaggtngttggccaattgccctcgtggctggaaggtggggctttgagaaacactaattgggaagcgcgggttggacgcttttctccccgagtggcacca

SEQ ID NO: 274381 - DNA, 1077 bp, Homo sapiens
  misc_feature (4)..(4): n is a, c, g, or t
  misc_feature (10)..(10): n is a, c, g, or t
  misc_feature (44)..(44): n is a, c, g, or t
aganactccntgctctaaaagctgcggaaatccaactgaacccncttgcaactgcgtcattggtggcggaggcaatggccggcaaccagctgtaagcgaggcacggaagacatatgcttgtgagacaaaggtgtctctgaaactatggatggtacaagaacttcacttgacattgaagagtactcggatactgaggtacagaaaaaccaagtactaactctggaagaatggcaagacaagtgggtgaacggcaagactgcttttcatcaggaacaaggacatcagctattaaagaagcatttagatactttccttaaaggcaagagtggactgagggtattttttcctctttgcggaaaagcggttgagatgaaatggtatgagcagataaacattaacagaattatcttgtcttaatgatgaattctttgggtgatttaacaggatgtgagttttaaaactccattttcaggaaatacacagaaattccttatttttctattagtgatgggtatataattggaaataatattctcaaacagtaagaaacaacagaaacaggtatgaagtctttctggattgagttttgaaattaaaaaatcagtttggagccaatggggggagaaaaaacagccttcccttttacattttctggatccttgtatgtggttcagtttttgtaggtggtttaggaatttagctaagttaatttttagatatttgaaatggtggtggacagagaaattcaaaatgaattacagctttttggcaggacaatgttcatagtccacagttcagctcaaccttcccctcccaccagggaacacaggagtttctgttatcgtgaatcattgttataaaaccagtgattaagaaagtatttcttgtgagtaattctctacaaagagaattcactttaacaagccacttttactatgagttaccctaaagtcacctcgacatcattctctatactgaactctcttgtaatgataatatacagatacaatcatacctgccaagatatgcatttatttataagcttgaatgttgagaactttgaccactgagcaggaa

SEQ ID NO: 274382 - DNA, 484 bp, Homo sapiens
cctttgagcgtccctacctcacctcccgagtagctgggatacaggtgcgtgccaccatgcctggctaattttgtatgtttagtagagacaggtttcgccgtgttggtcaggctgctctcgaactcctgacctcgtgatccacctgcctcgggctctcaaagtgttgggattacaggcatgtgccaccaggcatggctaatttttgtatttttagtggagacagggtttcactctattaggctggtctggaactcccgacctcaggtgatccacgtgcctttgtctcccaaagtgctgggattacaggcatgagtgacggtgcccagccattcgtgacatgtttatacaaatataactttagcaaatatttagcataactatcaaaattacaaatcatattaaatttgtataaatgtatgcaatttttggaacacgcatatcaacaacatacccataaatataactgagatgagatctaatgtca

SEQ ID NO: 274383 - DNA, 596 bp, Homo sapiens
ctattggcctcatagaaagattttggaagtattttctcctgcatttttcagaaaagtatgttggtgctgttgctttaggaccttcagacctggatggggacgtatgataaggatcctggttctcaggccttctggtctgcactgtagctatacctccagctttcctgtgctgtcagtttggagacagcaggtcatgagacttcactgcattcataattatgtgagccagtttgtcatggtaaatatgtatgtatgcatgtatgtatccatccatccatcctgttgattctgtttctctggagaacgctgattaaaacacctctctgccttcagaacctttttctttcctctgacgtattaatactttgaattttatagagagatattacatgagcagatgtggcaacattattgaatataaaatggttaattttgctgcatcacccaattttcttactctgataaaaactataatgtaagaaatgagataataattataagtgattatgacaagtgtaataataacatcacttttatggggaaataaggaaaagcaataatttataatgaaataaaaactaatgatcaacatacct

SEQ ID NO: 274384 - DNA, 697 bp, Homo sapiens
atcctggctcactgcgatctcctaccaggttcaagaacagcctggccaacaagagctgagaacccactctatcaacattaaacagcggcagttcctgtaagtttttaagggttattggaagatgactttacttgtcttcatacagtttcacctaaattatgttggtgctgttgctttaggaccttcagacctggatggggacgtatgataaggatcctggttctcaggccttctggtctgcactgtagctatacctccagctttcctgtgctgtcagtttggagacagcaggtcatgagacttcactgcattcataattatgtgagccagtttgtcatggtaaatatgtatgtatgcatgtatgtatccatccatccatcctgttgattctgtttctctggagaacgctgattaaaacacctctctgccttcagaacctttttctttcctctgacgtattaatactttgaattttatagagagatattacatgagcagatgtggcaacattattgaatataaaatggttaattttgctgcatcacccaattttcttactctgataaaaactataatgtaagaaatgagataataattataagtgattatgacaagtgtaataataacatcacttttatggggaaataaggaaaagcaataatttataatgaaataaaaactaatgatcaacatacct

SEQ ID NO: 274385 - DNA, 942 bp, Homo sapiens
cattttaaaaaactgatatatattctttaataagtgatttatctttgcatatatattttatatcaatcacatttagagtaagaatcacagttattaatgctttatgtgtaacaactgaatcatcagctcctgaaataagtattaatgatattctcatttcagaggtgaggaaacttaggacagataagcaaaataatcaaattaggctgggcacagtggctcatgcctgtaatcccagcactttgggaggccgaggcggggggatcacctgaggtcaggaattcgagaccagcctgatcaacatggtgaaaccccgtctctactaaaaatacaaaaattagctgggtgtgatggcgggcgcctgtaatcccagctattcgggaggctgaggcaggagaattgcttgagcctgggaggcggatgttgcagttagccgagttcccaccattgcactccagtctcagtgacagagcgggactccatctctctctctctctctctctctctttctctctctctctctctctctctctctctatatatatatatatatatatatatatatatatatatatatttagaaaatgggtagaactatgaagagacatttcactgaagcagttatactgagataaataggcacataaaaagatttccaacatcaccatccatcaaatctcagatctcagcatattctgctttaaaagactcatcttgtcacatttcagtaagaggcagaatcgagatttgaatccatgttgtctggttgcaaagacaaagcttttaatgatgatgctacagtaacaatgctagttatttttgtcctttactcaccatctatacctattttgttagtatctcttgtaatttttaaatggtttatcttcatatatcattgtgattgtggtaactttgtattaaatctatatttttatagatcaa

SEQ ID NO: 274386 - DNA, 299 bp, Homo sapiens
tcaatttcaaattccttgtgcagacaatctaattggcccagaggaagtaggcattgcttctaatgtaatcagcctgtgtgtgtggtgggcgtagggatgaggtggggggtgagggaggcacagaggacatggggctgcccagtggcaggaggagaggatctgcaggagacaaaataagaaggaaatagcagcatctctagcccaaccagcaactcccaggagccacctgtggctggtggaatacaactctctgtctctgacttagaggatttggtggtaatttttaaacacctgctttc

SEQ ID NO: 274387 - DNA, 238 bp, Homo sapiens
gagagtgagaccctgtctcaaaaagaaaaaaaaaaacaacacaaaaaatccttgcaatttgccttaagtaaagtttgcaagcttttattttgtgtctgaaggagtttacgctctgaattcttcaacagggcgtcaaggtagcagctttctgcattgactggtgattatccttttctgatatgttttaagacccttaacacttttaatttttttaattaccatttgtagtattagacta

SEQ ID NO: 274388 - DNA, 905 bp, Homo sapiens
atcaaagagctgttctttttagttgtgggtcaggcagttaagtcggagtagggtaggtgcttggaggtagagagtgagtagaagcatacttggtccttgagccagagggtgaacaaaactgggccccgttccttcagagggtgaccagcagacagaccgagggaagctgcagaccgtgggcacaaatccaatccaggctccccagggacagctggggtggggaagcataggagagggtgtgtgtgtgtgtgtgtgtgtgagagagagagagagagagtatgggaatgagaataactgtgtctgtagtggtaataagtgtgggcactggtgggatattgaagattctctgtcccagagccccagatcgatagcagagagaggaaggagacattaacaggaaggctgtgggagtctaaatgaggtgtgtctctatgcaaagtaggcacaggagtgaggggggctgattgttgttctgtttcagccaatttcctcactgttctgctcataaggggaaagtacagctggaatcaggactgcagtctacagttaacatatgaatagaaggaaattggccaagggtcattggtgtgtgtgataggaaagggggtttgttaaggagtgagttgtgggaatgggaaggtgtaggctaagaggcacggggccaaaaggtatgggcctgaggtgtaaggggagagtctgggagaggcggacctttgtagcttaagtctcttggttgccggaaggagagtacgatagacaagaactggatcccaactggagaggctagactggtggctggctgtgcccgttcatacattctcaattccagtaatgtaaaatcaatttttaaaaattgcatttgttaaaagaaaaaacatgacaatatttaaaagctaaagaaaaaa

SEQ ID NO: 274389 - DNA, 486 bp, Homo sapiens
agatgatcagcaaaggctaggagagaaaaaaacaggagatgctacacacaatatataatcatgggatttaggaaatcccctattaaagaacagatcccaaactcagtgaaacctgaagaaaaaaaggccagttttatgcgtcaacaagagacataactaaaataaaacaacacaggaaagttgaaaataagggatgggctggatacagtgagcaaatgctaatcaaaagaaacagaattggccgggtgtggtggctcacactagtgatcccagagcttagggggctgaggcaggaggatggcttgaggccaggagttcgagaccagcctgggcaacatggtgagacccccatctgaaaaaaattcgtaaaagataaaccaggtatggtggtgtgcacttgtagtcccagctgttcaggaggctgatgcgggagggtagcttgagctgcactcctagacaacagagcaagaacccgtctcttaaata

SEQ ID NO: 274390 - DNA, 1176 bp, Homo sapiens
acagaatcagaatcagtgagacggctttccatggtaacctgtatttgtatactttgaaaaatgactgttcctttttgtgtggttttgggtggtcaatttgcgcgggaatgaattgtagaggtgacgttacccatctgtgtgaatataaacaaaaaacctgattttattaacggcaaactttaaaaaacgaggtatgagtttttttttttttccttttcgagacattgttctacacatttattactagattggacattatatttaagcattttcataaatgtctatttgatgcttattttaatgcataattttctccccctcaaaggcaaaaagaaactaattgtcattcatcagtgttgccccccaaacctactgacctagcccctccaccccacccagtacttttacaatgtgttattaaagaccactgaacagctggagatccaggggtctccttcaatgcgtaatcccatccagaaggaaggaaaaaaaaagaaatctctttaagtcacgtgaaaatgccacgtttcttaatcttgcagagctgacaggcaaaaatgctatgctgttcatgaccttgtgcaggattgaaatataattccgcaacatgctgcgacctagtattccgtaagacacatcgagcttagggtgatatagttatggagaaatcttacctatgtttgttggataagggtatgatgacttagcctgggctcagaggcctgacagaaatgaaataatttatgctttggtcactaaattacaatccaaaggttaagatttggggagtgaaagatggtagagcatttgcttgctaattactccactacttgggagcagtatgtttgtttctgtgctaattagtttagaactgtacttcatgccctagaattaagaaaaactctaaagctgagatgaatctcctgcagggaagcagggatttagaagcacaggctgcaaggttggcctctcgccctccggtttctccgcctgcatgagagggtgggactgaacgctaaggtgaaaagcttctgttccgtttcgtttccctcttcattttctgttgctttattcttctcttattctcccctattcattataggggaggcttctgataaatgtgtagaatattagaaacttgataataaatatacacattcaaagcagcagtacgaa

SEQ ID NO: 274391 - DNA, 316 bp, Homo sapiens
tcttaaggtctttaagaaacataagtttaattcaggaaataatgacaacaccatattgttagatttataacacatagatcccatatatatgtacataaatacatatgacaaagcaggtgggaggaagcggagctatatggagcaatgtggttacgttccactggaattcagtcggtgttcacctcagtgagtgttcactgtggtgagttcaagatgcatgttgtaatctctagaggaatcactgaaataataaagcacacagataaagtatcaacaggagaactaaaacgtgtattagtctgcttgggcttctgta

SEQ ID NO: 274392 - DNA, 543 bp, Homo sapiens
cagagtttggaagaaataacaatgaagcgagccaaaatgttaattccctctttcgtttttgttatctcctttctttcttctctttaatctctattaagatctctaaaaatatggaagattttacttttcaaaggagaagacattgcatttccctttccttatgggtattatcaatttctctctgcctttatacaggcataccttggaggtgttgtgggtttttttccagaccaccaaaataaagtgagtcacactagtttttggtttcccagtgcatataaaagttatgtttacattatactgtgtctattaagtgtgcaatagaattatgtctctctatctctatctctatctctctctctctataaatataaattaaggtataaatatatagatatatatgtcttaattttaaaatacttgctgagtgtagtggttcacatcagtaatctcagctactcaggaggctgtggcgggaggatctcttgaggctagtagtgcaacaccagcttgagcaatagtgagacctcctctcttaaaaaa

SEQ ID NO: 274393 - DNA, 198 bp, Homo sapiens
tactgggagcatttgaccccgaattgaggattcattggaagcaagtgttttatagaaaattggaacgacacctttattaagcttcgtagataaaacttattaaatgtttatcaaaagtttattcatagcaattctgtatggtttttaattagcccagatttattagagtaattccagaaattcccttcagtatttcta

SEQ ID NO: 274394 - DNA, 403 bp, Homo sapiens
gtggggaaatctggcagataccatcttgttttcaagtaatcaaagttaaccgcattaataatggtacattcagcctgggcaacatagtgagaccttgtctttgcaaaacaaaaatcttttaaattagacaggcatggtggtgcatgcctgtagtctcaactagtcagaaggctgaggcaggaggattccttgagtcgaggaggtagaggctgcagtgagccaggattgtgctgctgcactctagcctgggtgacagagtgagatgctatctctaaaaacaaacaaacaaaaacaaaggtacaaactgacagcaggttcttcctggtgtgatataccaaaaaggaaacatcattatacagtattattgccaaaagtgctgaatgaaattaagagaatataacca

SEQ ID NO: 274395 - DNA, 556 bp, Homo sapiens
gtggccgcgtcttcttcctggaggcggccagatcgcgcgacctccaggcagtgctcctgcttggcagcacccacctgcctctgcttgagaaagcacaaactgccctctggggaagcagccagctggggagtgctctcggcctgtgaccccgggagggctgggtaggtggccacatgtcctgccccggctctgggtgtggctggtggcagagggtctatgagggaagggcaggacaaaggcaacccctaaggctaatctgaaatttagggctggggcgtggtggctaagcctgtgatcccagcactttgggaggccgaggcgggtggatcacgaggtcaggagatcgagtccatcctggctaacatggtgaaaccccgtctctactaaaaatacaaaaaattagccaggtgtggtggcggacacctgtagtcccggctactcgggaggctaaggcaggagaatggtgtgaacccgggaggcggagcttgcagtgagccgagatagcgccactgcactccagcctgggagacagagcaagactctgtctcaaaaaaaa

SEQ ID NO: 274396 - DNA, 364 bp, Homo sapiens
caatctaatcacataaatccttaaaatcagtacagatgtggcaaagcgaaagtcagagagatcaagataatgagaggaacaatttgacaaggaatgcaggttgccatagggaaccaagagcggctcctgactgacagccagcaaggaaatggagacctcagccacacagccgcaaggagttgaattctgtcaacaacctaaataaaactgaaagcacactcttccccagaggtaccagacaaaagctcaggtaagctgacaccttgatttcacccttatgagacctggaacagaggaaccagtcaactcttgctggacttctgacctacagaactgtgacataataaacttgagttgttttaag

SEQ ID NO: 274397 - DNA, 256 bp, Homo sapiens
ggtattgccattggcaggaatgtcttttttccttggccttctggcaaactcttcttctagaaccatcctttgagaccccacactacctcatgtgccccctattctcagtaatgatttccctaacaaccacctcccccataaaagaacaggactcggccaggcagggtggctcacgcctgtaatcccagcactttgggaggccgaggcaggtggatcacaagaggttaggagattgagaccatcctggctaacacag

SEQ ID NO: 274398 - DNA, 451 bp, Homo sapiens
ctctttcagcttgctctctgcactgatgctctctgcatgatacatatggtgcattttgaatacatactgcaaagaaaataacagcttctccaccagcttaatgcaaacacaagcctttgcataccaaatgacctgacaggcatatagccatgtaaatgtactcccatagcatattttcctgtttgaattcttctctactaaaacttcatgcataattctccattcaatacacctaatttatctttcttgctccatttttcctcaactgctgaaaaaatagtcaagtagaaaacgacccacgtcatgaatttccttaggagattgggatatcctatatgataacttgcacagaagttaatatttttttcttactgacatggccatatcatgtatctgacactactcttatagtttaaatcaaaataataaaaatacctgtagcaaatttaat

SEQ ID NO: 274399 - DNA, 285 bp, Homo sapiens
ttacaagtatgagagatataacccaaccacgttagtgaagccaagtaagaactacttaagtttagtgaatagtctaagaacgccaattaaaagacagagattgccagaatggataacaagcaagacccaataatatgttgtctataaaaaactcaatttaaatattaagacacgggtaaatcaaaagtgaaaagtgaaagggttggagcaaggtaggttggaggttggtgcaaaagtaattgcggttttgcaaatggcattgaaagtaatgtaatgaaattgaaa

SEQ ID NO: 274400 - DNA, 312 bp, Homo sapiens
gactccaggttggtgcacttcaatgccaagtactaaccacacaattacaggatgccaccaaaaccttgatatggggctgctgcatcctaattaaaaaaacagttaatagacattattttttagaacagttctaggtttacagaaaacttgagtggataatacagagagttctcctaggctcccctgtcctccagcacacaattttccctactagtatgttgtattagtgtggtccattcattacaattgatgaaccactgttgatacgtcattatcaactaaagtccatagtttacattagaggtcattctt

SEQ ID NO: 274401 - DNA, 491 bp, Homo sapiens
acattttgtgactattttatcacatgttcaaattccaaagcaaaataataatactgcatttttaccacagtctgtgttttctaagttaatatcttattacacacacaagaacccagcagcagctcagccaaaagttaaaactttgatgatgatgacagatgtaactgctgtgggcttctgggaaaacatgaatgatgtatgttagccaaggaggtagtgtggtaaacacagggatgcaacagccatcgatgccactggagaaagacaaaagtgatgccctgttggccatacccaggattggcacgtgataccttaaaattgatcctttaggcttaatggcatggcagttaaagaatatgataattggccgggcatggtgactcatgcctgtaattccagcactttgggaggccgaggcaggcggatcacgaggtcaggagtttgaaaccagcctggccaacatggtgaaaccccgtctctactaaaaatac

SEQ ID NO: 274402 - DNA, 466 bp, Homo sapiens
acggagctgagatgtatagtccagtccttgaagatcaacctggactccatgagaaatctgaaggccagcttggagaacagcctgagggaggtcgaggcccgctatgccttgcagagggagcagctcaacgggatcctgctgcacctggagtcagagctggcacagacccgggcagagggacagtgccaggctcaagagtacaaggccctgctgaacatcaaggtcaagctggaggctgagagcactgcctactgctgcctgctggaggatggcaaggacttcaatcttggtgatgccctggacagcagcaactccatgcaaaccatccaaaagaccaccacccgccggatagtggatggcaaagtggtgtctgaccaacgacaccaaagttctgagacattaagccagcagaagcagggtacactttggggagcaggaggccaataaaaagttcagaggtcaaaaa

SEQ ID NO: 274403 - DNA, 353 bp, Homo sapiens
cactgtatccatttataattgggtaaatcttgagtaaaaagaaagattatattacactcgtaaatcaataactattttacattttggaaaaagcaacaaacaccaaggataagaattaagtgttgtttctacatactacagataattttcaagacacagaatgtaaggcctggaaaatgagggcagaaggccttgtttatttgtctatacccaatgtttagttctttgtaggtactcaataaatacttgctgagtaaatgtcgaatgagtctacttatctacttttagaactgcaaagctttcagcttcaacagagaaaagagtacatcaatatggcgagggcttccccaaaa

SEQ ID NO: 274404 - DNA, 1575 bp, Homo sapiens
  misc_feature (524)..(524): n is a, c, g, or t
  misc_feature (1052)..(1052): n is a, c, g, or t
  misc_feature (1429)..(1429): n is a, c, g, or t
  misc_feature (1503)..(1503): n is a, c, g, or t
  misc_feature (1514)..(1514): n is a, c, g, or t
cattttaaaaagaaacttctccaaaactacattagatatttatatctcacatgtctttagattccattttcctaagctgggtttgggtggatcactctggtaatatgagatgggccatgttctgcatcttgaagttagagtttggccaatttaggctacatctggagggggtgatctcattctcattctgcttctgggaatggtgtactagtgtggggatgtgcttgtggtaaatggagaagagcaagaaactccaatgtggaagccatctcaaagacgtatacaaaatttactaatttccagttcatcaaagcaaattacatgagtgagctcagattccaaggtcaaggtagtcaccctgcctatggcaggaggacactgcaagataatatatcaaaggatgagggagtcaagagtatttacaaaacagctgaatagtttaattaaataattaatatttaaacattaaatagacttgagagtaactttaccaaaggcctaagcatgagaaatatgtttgatanatattattctggtctgaaaaccctgagtgggaaaacagaactaattccacctggatgaccttctggaaactcattttttcatttttttaaattaaaagaaaataattccttccaaccccaatgggtttaagtgtgtgtttttgtgtttatgagcttgttaacaataaagtcatataaaagtattggttagcagcaacctgattttaaggcgtattggccttcttgtggttcccaagaaaaccttggatgattttgataaaaggtttgggttctgtatatttaaatctagcattaaaaaataaatccatatttatacgatcctaggtatgaccaagctcttttaacagtttagacatttactgtatgacatatgtattgggttttaaaatttccctatgaaacaactgaaaatgctgaatacaaattatggagaggttaaacaaggaaaaacattgcaaaacaatgaaaaagaatatgtctttttttgcatactagcaaacgggaattcacctttcacttcaacatcanttttaaaaatttcagcgtatagcaagaacagacagtggaataggattcaatttcagctattttgggaataagaaaattttccataaatgcagcattgaactcatccattagcatatgctggtgcttttctgttgacattagtcaaataatttagaagcacaaagaatattattacacatttaggaatgaagtgtatatccaatttaaggtctagatattaaaggaatcacaatctgtgttattaggcctgcatttttcctttctttttgtctcttcagacatgttaaaatttctacttatcattttgtcaactctgtgtgtttgcattcgttcttggaaatttgtctccacaaaaatgttaaaattagcaggcttgntggtgcatgcctgtagttccagttacttggcaagctgaggcaggaaggcaagagtatcacttgtgtccaggagntcaagactacngcgaggtatgattgtgccactgcactccagcttgggtgagagagcaagagcctgtctcaga

SEQ ID NO: 274405 - DNA, 368 bp, Homo sapiens
tcattgataaggaaaaattgtatctatttatggtgtacagtatgatgttttgatatatgtataccttatggaatggctaagtcaagctggttaacatgggcattacttcacatatttatcatttttttgtggtaagaacacttaaaatctacccttagcaatgttcaaatgtacagtgtactgttattcactataatcactgtaatgtataatatcttgaacttatttctcctgtcttactgaaattttgtgtcctttgacagatatctccctggttccctcacccctcagcctctagtaaccaccattttactctttttctgtgagtttgacttttttagatcccacaaataagtaaaatcatgggg

SEQ ID NO: 274406 - DNA, 387 bp, Homo sapiens
gaaagggggagagactgtatcaagggtctagcacagatgataactagagttgagcattaaattaaatgctaagcctcctgcaaccaaagcaaacagggaagtaactcattttttcaggagatacagcttttttctacattaatttctatgaggtatcaatcacatagtttttttatttccttacataaagcccactgaataacttgacaggatcctaacacttgacaggtggtttttgctaaagttacaaaaccaatttttgctattgaaagttaatagtaaaatttgtggcatgggggttaactgtaactcagctaaagctttttaaaggtttaagtttacaaatacttggtgatatagctagatatatagtaaaattacttagag

SEQ ID NO: 274407 - DNA, 538 bp, Homo sapiens
ggaggccaaggcaggagaatcgcttgaacctgggaggcggaggttgcagtgagccaagattgcagcattgcactccagcctgggcaacaagagtgaaactctgtctcaaggttaaaaaaaaaaaaaaaaaaaaaaaaaatctaagtcccaagcatgtatggtggaattgaccagtgtttaataaatatcttctgaaatactagacagaattggttgcagactatgaaataatttccatgtctttatttcaacaactgcaatttttattgtctttttaggatttccaattccatgtgtgtccctctcttcctgccttaactgtgtctcatttccttataatgtgctctctgattactgagcattttctgcgtattttcatatgcaaaaactaattacccatctaataattatttagtggtttcagatacagacgtactataatagagtcatagatacatggaaacatttaaaatacattcaaaaccaagatgagactagccatgatttgagtaacaagcatctttaaaataatgttaaa

SEQ ID NO: 274408 - DNA, 378 bp, Homo sapiens
ggagaggctaagtgacttgcctgggacctccaagccaggtctcccgaggcccacaggggctcccatgcaggagcgggagtgccccccaggccttcagagcccactgtgtctcctgctcatggcatgtcttgtaaaggggggtggaggacggctgtgtttgcagactaagaatctgaggcgcagaggctgccctggttcattcaggccatacgcttcgctaggccagaaggaccccagggaagctggggagccagtctcgtgggcagttgtcagatgaattctgtaggggatcgatggtcctaggcggctaaggggtgagtgcaggtgcatggtgcattctggaacctgcaagctcagaccccaacaggacagagggca

SEQ ID NO: 274409 - DNA, 162 bp, Homo sapiens
tgaattcaacaacaggagtttatttcccccaagctctggagactggaagtccaagatcaaggtgtgagcaggtttggtttctccggcgccttccttccttggctggtagacagccatcttcccgctgtgcccgcacgtggtcttttccctgtgcacacccct

SEQ ID NO: 274410 - DNA, 294 bp, Homo sapiens
acaggggaggcttcctggaagaggcaggaatatagaagcacggaatcttggcgtgggaagggatctcaaagatcaccttgtacagccctctctgagtcatgggtcacctctcctgcaagctctcttctcccaggaagggctgaggacatacttcctccatggacctggtgactgcttgctgtacacctgcccccagtcatgcaggctatggggatgatcttccaggagtacccagcctagccctgggcaggtgagagcgggctaggagtaggtgaaggagctcatcacccaccc

SEQ ID NO: 274411 - DNA, 455 bp, Homo sapiens
tgccatatgaagaaacaatgagaagaggtcagtctgcaaactggaagagagccctcaccagaacttgaccaagctgacattctgatctcagccttccaaaactgtgagaagtaaattcctgttgttcataagccacccaatttatggcactttgttaatcgcagcctgtactaagacaggagcaccatgaattgacttgaaacatgtgggatacagcctttatttaagctgttattgaaaaagcaagagagaacttaagccacactgtgacagagactgtcacaagccgtggagggagcaggagcggtagactggcaagctataagcactgacatctacttttcctctccagaggggctctgccaggaagttcccaacccttcctactaaagcttctccttctctgacatatcccaaatcaacttggacttctctatccccatgccctcctttaa

SEQ ID NO: 274412 - DNA, 757 bp, Homo sapiens
ttctgcatgtctggggaggcctcaggaaacttacagtcatggcagaagatgaaggggaagtgaggcacatcttacatgatggcaggagagagagtgtccaggagaaacagccacttttagaactatcagaactcatgagaactccctcactatcatgagaatagtgtgggagaaactgtgcccacgccaatcacctcctaccaggtccctccctcaacacatggagattacagttcgacatgagatttgggtagggacacagagccaaaccatatcaaatggccaggttaattggtaaatgtcgtatcttctgactgctccactgactgactgttctcctatgtctccctctcctggatctccctattccctgagacacaacaatattgaaattttaggcgaattcacaaccctgcagtggcctttatgtatttaagtgaaagacagagttgaacgcctctcactttcagtcagaagctaggtggctcacgcctgtaatcccagcactttcagaggccaagtggggcggatcacttgaggtcaggagttcaagaccagcgtggtcaacatagtgaaaacacctctctacttaaaaaaaaaaaaaatacaaaaattagctgggcgtagtagtgtatgcctgtagtcccagctacttgggaggctgaagcaggagaatcacttgaacctgggaggcggaggttgtagtgagctaagatggcgccattgcactccagcctgggcgacagagcaagactct

SEQ ID NO: 274413 - DNA, 353 bp, Homo sapiens
ctcccagagtgctgggattacagatgtgagccaccgcccctggccagagcttcattcctctttacggctcagcagtgtctcactgtacggatgggccttggcttgtcaatgcactcatccgtggatgcgcatccgggtctatccacctctcggctcctgtgagcacaacgctgtgtgtacattgcgcgtctgtttgaatccctgctctaggggaatgtacctagcgtggagttttggagactgtggtaatcctatgttgagtcttgtgagaagtggagggaccctttctttgtttgttattatttttaaatttttttccaaactctcttctctctgaaattaaaatgtgttca

SEQ ID NO: 274414 - DNA, 292 bp, Homo sapiens
cctcagatcctttttttggaagaaaaagaaagaaatggaagacagactggccagcagggggagagagagggagggagggcatatcagagaattcaatatgctgcgttttaaccagatacttttcttcctctcccacaaggcatcagagtagagactgcctttcatctctctctcccttgtgtaatagcacagtgtctggcagataactgttgcttgctaattattagaaggaagaaagggagggagaataaaagccagcatcagcatgtgatcttcctaagtgcgacagatg

SEQ ID NO: 274415 - DNA, 353 bp, Homo sapiens
atcaactccacgaagggctgtgaaaccatatctgcccgtttcctttcccgagagcctctctctagtggcaagccagtagctaatctacaccggagaagttacgacccttgtcttttgcagttaatggcagcctgtttgttttctgcacctctcttttccttttggggaacacagggctgaaaggtaacaagatccaacagggctctaatcattatataaactgtctactgaagaggtccctctacctccaccaaatttctcattaggtggccacagttgagagccaacagtctctggcaacaattttgaataactattcatattaaagaggctttttacaaaagggataaact

SEQ ID NO: 274416 - DNA, 329 bp, Homo sapiens
tgggaggctgaataatgcctccccgaagatagccatgtcctaatccctgaaatctgtgaatgttaccttgtggcataaaaaaaggatctttacagatgtaattaagaatcttgagatgggcagagtctcctggatgaccaagagcttcaccatatcccagtccgatcccactacttccctgatggaaacccttcagtgggctcctggcatgtttcccagaaggtcccagatctctggcatcactctctgtggtttgaacttgctttctttcaagattcacctgtaattttattctgcttttcactataaactgtagactatagttacac

SEQ ID NO: 274417 - DNA, 215 bp, Homo sapiens
gtcaaggatgactctccaatttctaacatgagtgtctagccagatcacactacagtcaagtaagataaggatacaggaggagagaggagtaggtctgatggagggaagatcatcagtggttgtggtgagtataagatggatgtgggacttccaagtggagacatctaacatgcaactggatatgtaaactggaagcttgagggaaaggccgggag

SEQ ID NO: 274418 - DNA, 283 bp, Homo sapiens
ctatgggcctgggacctgggtctggggtctcagaggaagcgagggtttgaggagaggaagggaagtgagcttggagaagggacactgggaagaggagcaacagggcttggaagagggctgggagtctggggtgacagggtctggctgcagtctgggaagtggccaccagagggcgactcaggcctggctcaacagcccccagggccgggctccaggctggctccacgacgttgggctcctggtcccagaacctggctctccctcaagccccactctcaggccc

SEQ ID NO: 274419 - DNA, 364 bp, Homo sapiens
gaattaacatgccactccctgcctgtgactgcctttttttgcagctgtttttaaagaatgtattcaaattaatccataaagtacagttgtccctcatatctatggggtatttgttccaggacccccaaggataccaaaatccagggatactcaagttcctcatatagaatggtgtagagtttgcatatcctatgcacaccctcctgtatactttaaatcatctctaaattacttataatacctagtacaatgttaatgctatgtaaatggttgttataaggtattttttaatttgtgttatttttattgttgtattatttatttatatattttttggaaactgggtgacaaactgagatcctgt

SEQ ID NO: 274420 - DNA, 443 bp, Homo sapiens
aaacacccacaaacttacgaggatcacagaaaacacccctacaccaacttatagccaatctattcaacctgcattgttagcaggtcacctctcctggatctctgcctgtagtgcccaattaagaatggaaggaggagatttttcagcttttgaagtctgcataccttcaaggaaattcttcaaaaacagccaagacattttaagatgaggagctacagaacagggtacatgccccacagtcttcaatactttttattattgtttcaagaaaactggataaattcattctgaacatcacagacttgaaagtcattgttaccatgcctttgagaatgcctatagttatcattgccatcatctcaaaggagaagaattctttaactcttattgtatatgcaattttgaataaaaaaatcaagttgcattgttattgaaattaaaga

SEQ ID NO: 274421 - DNA, 401 bp, Homo sapiens
tatttaaaattaaaagagaaggaatggtgcttggccacacccccccccccccccggtcaaagttggtagagaaagaaaatgggtttgcccgggttttaaaggaaaaaaaaaaaaagaaaaaagaaaaaggcctcttttaagaaaaagaaaaaaagaccccccaattccttatcccccccctttgttgatcattccacatagaattttagatggttggccaattagaaggttagatttctattcttttctttcttaactgaaattattccagacttgaatgctgctattaaatgttcaactccaaatttaaaaatctctaaataggcagcgtggtggcttattcctgtaatcccagcactttgggaggccaaggctggtggattatatgagcccaggagttt

SEQ ID NO: 274422 - DNA, 435 bp, Homo sapiens
aattctctcccctgcctcttaaaacacactgcactgaaaccttggggagaggagaggacttgctttgttcttactgtagcctcagtgtttggcacctaggaggtgcccatttgctaagggaaatggtctctggtcacaacatttttatcagcctatcaatatatgcccttgttttatgtgtgtttctgtttaaagatgccttatttaatatatattgttgattcattaacattgaactgatggccaacagcactctaaattacacctaaacaaagcccatctaacagtcatattttctctataaggcacatcacagccttcttgcacttaggaacactggacagcattttggctacgctcagggccattttaagcagcaaattcaccaacaaaacacaaaaatgggaaaaacgtagcactaaatagacctcaaag

SEQ ID NO: 274423 - DNA, 518 bp, Homo sapiens
taagacagagtttcactgtgtggcccaggctggagtgcagtggcgatctcggctcactgcaacctccgtctcccagttcaagcaattctttcacctcagctccctgagtagtccagcgcctgggactacaggcacgtgccaccacgcctggctgtttttgtattttttcatagagaggtggtttcaccatcttggccaggctggtctcaaactcctgacccgaagtgatctgcttgcctctgccttccaaagtgctgggattacaggtgtgagccaccatgcctggccccataccagttattctttcatttactgttacttctttcttctgtatatttactgaatttcctgctctcttttcctcttcgcctaactaaattctttccattgtttcattctcaccttacttgctgaagaatctctaaatctgtgaatgcatttggaggggtataacccaattgagtgttctgccactgtggaccctgctcctccaagttatcccttctgtcgtcttctcc

SEQ ID NO: 274424 - DNA, 503 bp, Homo sapiens
gggagcttcatttccatccttttttcttcttccctattcccctccctcaccttataggtatcaattttgaaaaaaatgttatagattatcctaccattgttttttcaatatcagcaaatatttagtcttctttttttttttttaaaaaaataggtttttcactatggtttatttcactcactccattttttgtgtatcttttggtagttagaaaggtttgtatttgggttctaatgcttatactcagccttcacatagcattcccactcccctcttgtttggtctttgttggttccaaatatgaggagtaattgaaatgagctaggagcctcttcctccccgtccatagcactggttttgaaccaatgaccttcgtactctttgggaacatttccagatctctggaatgaatgcattttgtgtagagacacatgcatggtccacaactgattaggatgcagatgcagtaagttaacttaggatcacttgaaataagtaaaaaa

SEQ ID NO: 274425 - DNA, 934 bp, Homo sapiens
tttgttatgtactcggcactaaagcaccttcaatggacttaataaaaacacattttttaaagttaaggctactttgatttaccccacattatctatccttaaattctagacttcttggtagtattgccgaaaaaatagagtaatacccatgaaattgaaagaaaattctttcagtcacccaaagctcaatttacatctgtctctcccataaagtaatctcattctggatcgcctataacttggaacctacaatataaaggagtctctcataagacatttactttcttgtggaaattaatctttttccatatgcagaagaaatacatacagattagttctagcacaaggagagggtcaaaatggccaggcgcaaaagacgtatgtgaaattcaaggtattagtcaagaaagcctccagtgagaaaaaagggctcgacatcagaagaatagcccatcactatagaaagttaaatattcggagctccaaattcacatagggggaaatagcattgctctatcctcatatatgacacaggagagaatgttacagcttgagtcttgtcatgcttacaattcaaagatgaataaacaaacaacacatagtgaaatcaaagttaaatgaagcaagtatgacaccttaagaataagaattaaactgaatgtgcatgtcatcatacttctgaaactgactttggtcagagaggaaaacttataaggaagaactcaagaagatgaaaggtagcatggaatctaaaacacaagagacagaaagtgtaattaggaaaaagatagagatgtaattctgacaagtaaaaaaaaaaaaactcttgctgaaataaattagaatatttgataaaaatgtaaataaaacttttaaaaatcttctcacagaagcctataggaatatacctgccattgtggatcttagccttaaa

SEQ ID NO: 274426 - DNA, 406 bp, Homo sapiens
caaaaatacaaaaaaaaattagccaggcatggtggcgtgcaactgtagtcccagctactcaggaggctgaggtgggaggattacttgagcccaagaggaggaggctgcagtgagtcaacattgcaccactgcactccagcctgggcaacagagtgtgaccccatctcaaaaaaaaaaaaaaaaaggagagagggtgagaaagtaaaagagagctgaactcgcccttttataacaaacccactctagcgataacaacattaatcattcactgcaccctcatggcctaattgtcacaggacagactccaaaattgggcttcatcttggaaggccacacggatttttggctttgtgcaggaaggaattcaagagcaagccgacagagtgaagtgaaagcaagtttatta

SEQ ID NO: 274427 - DNA, 583 bp, Homo sapiens
gggagaacatgaaaaaatgttgacaaaataagtcaagtaattaacaaggtactttccaagcccttaacagagaagctgccatcatggtcaggtgtaattatggatttagaaaattcatccttcattgagaaaaaaaaaacaacactcctaaaggaaatgagagcttcggccttgctgggcatcgggaaatcactacaaggagaggcttaactcacgcaggctccctgaaagcacagagggagctaaagaaaaataattcgaggtgtctgcaagcgagaagcacagtcctccaccgttcgcacctgcccgctgaatcaaaggctttgaatactagaggctctttaccttctaatggaaacacattctcaacttctgtatggattagatctcacgacgcttgcatattccttcaagcatacatgagtataaaatcatgtgcaaaaaataaagtctcacttttcttgatatgcagccagtgttgtcacacgatggccaggtagaagtttccttctaaaaccacttttacttgagagcaaagaccaaaatgattcttgaaataatttaatgccttacccaagcagac

SEQ ID NO: 274428 - DNA, 217 bp, Homo sapiens
ggccctaagaagctgtccttccctcccaggcatagccacgcgtatcgggagctgagagcagggaggggttgggggttgaggagagggcaggtacagaggctccaggcatagagcagacacagggcaggggaagaagcacagagctcacgcagggctaggggacccaggtgtgaaggagaggccagaaggatgtccttggggatcagccagtagctca

SEQ ID NO: 274429 - DNA, 270 bp, Homo sapiens
aacatggtgaaaccctgtctctactaaaaatataaaaattagccgggcgtggtggcggctacctgtaatcccagctactcgggaggctgaggcaggagaatcgcttgaacccaggaggcggaggttgctgtgagctgagatcacgccactgcactccagcctgggcgtcatagcaagactctttctctaaataaataaattaattctgtctttctgcagtttttctgatatttggcaagtactggaaattattattttccttaagacccc

SEQ ID NO: 274430 - DNA, 491 bp, Homo sapiens
attccctgaggtagtcctggggctcttaagagattacagttcttaaaacctggaaagtgacaccagagaggtagatcttagttcccaaaattaaagttactttctagggcataaaaccttttcagaattcagattaaattttatttattttttcttttttctgtaaccttatatttgaggggaaaattttgttttcaacttttgcatatatctaatttaacatttgggaaaactgtaaatgggccaaagtttctccctttatatgattttccagatttttaccactttcttagtgccacttgatgctaggcattgtctattggagactcactggtacgtaactgcaggttttaccatggaactacatatacacatgtcttggaattgagggttagggtttccagaaggacttagttgtcctgtgcttttgtctgccccatgccaaagaccactaagaacagttttgtaagtgaaacttgggtctacacgtt

SEQ ID NO: 274431 - DNA, 322 bp, Homo sapiens
cttctgagcaaaaggcattgacagtttgattcacagatatttgcataacagacagtcttggaaagataaagatagtgactccctgcaaagagatttggagctgcctcttcctgagatattccagggtaacagagctagagaccgtgccctttattccctgaagatttgcttacattctccagggaggggccaggcacgatggcacacacatgtaatctcagcactttgggaggccaaggcgggaggatcgcttgaggccaggagtttgagaccaccctgggcaacatagtgagaccgcacctctacttttatttaaaaaaaa

SEQ ID NO: 274432 - DNA, 421 bp, Homo sapiens
gaaagagaggcagagtgacaggctgcacacgtggccaagcgcaactcaccaaaatgtttccccgggacaggctggcagcgtagatgtgagcagggggctcagctgagcccggcttccgagcagtgctgggactaggccactgttttattagcaggatcaggaggtgattgtgccagttaggccggttcttctcctgcagtccccacgatctgcgtgcctgggcagcttagcaccgtaaatccaccgctgctggctggcagagcagtgcccaggcggccccgggagagtcagcaaatgtatgctcatttttctcttattataaaatggccatatcattgcagagccatggggtggaaagttaaaagcatcaatctcccttagtgttcaactggataataaatgggtctagctatgctgttta

SEQ ID NO: 274433 - DNA, 422 bp, Homo sapiens
agcctccttggggtctgtaatgacaacaccttgtagcctgtaactagctctaagcccagaacagaagctaagacatttgcaccctcaaaacacatccttgagctcagagctcagagaccctactgggtctgggtagggatgtgtgaagcaccacagtggccatccacagggaaacagagagagtaacactggaggccgggagccacaagagcaagcgccttgctattggaggaaacaggagataaactgagttcacacttgaatctctaaactcctgatagtaaattttgttttgatttataccatgcagttcttagcatcagacttaactctcctacctgactcagaacattttgatttacaaattggaaaataaatgggtttgcacatcctgggcctgtcttgcaaaccactccaataaa

SEQ ID NO: 274434 - DNA, 321 bp, Homo sapiens
ggttacactttagcaagcatttatagcttgtttgtccaacagaatgttgaagatctttttgagttctaagatttaccatgggacgggcgcggtggctagctcctgtaatcccagcactttgggaggccaaggtaggcggatcacctgaggtcaggagttctagaccaatctggccaacatggtgaaaccctctctctactaaagatacaaaaattagctgggcatgatggcaggtgcctgtaatcccagctgttctggaggctgaggcaggagaatcgcctgaacccaggagacagaggttgcagtgagctgagattgcac

SEQ ID NO: 274435 - DNA, 512 bp, Homo sapiens
gaagaaaatatgattttcaaagttgccacattacatatttttaaatagctactttttaacaaaaagtcattagatatgcaaagaaacaagaaagtaagtctcactcacagagagaaacaatgcagtcaacagaaactgcatctcaggaggcccaaacagtagattcaaagtaaaaatattgttgttaatattttaaattttattaatattcctaataaaaagttatttagaacagttatttgaaatatgttcaaacaactacatataatcatgtctaaatataaaacataaaaatttagaaagaaacaatatcaacaaagagataaaatttgaaaacaaataaaaattgtggagtccaaaagtacaataactgaaataaaatattcgctagtaggggtctatagcagatgtgatctggcagacgaaataattagtaaactaaaaatgtgttgattatccacttaacggaagaacaggaaaaaaaagaaaaatgaacagtctcagatctcaga

SEQ ID NO: 274436 - DNA, 391 bp, Homo sapiens
ggttattatcgaaaagttttctgtcttgctgtttggctaaccttctcttttcctggtcctttggctagagacatcaggcttgttttggactttctttgtctgtatccattggcattctgtgcatctaccttctccagctccagcacagtttgggatataagaggcaataaagaaacccagggaattcactgctatgtcattctttgggtcctgagattcctagtagtctgcattcttctttccacctttatatataaggtccatgattttcagttgtactttgcagaaggaatagggaaatgtacttctccatttttctcaaagcagatgtccctaatgtatattcagcccatttatttggaagtctctttaattctgcccctccgctgca

SEQ ID NO: 274437 - DNA, 380 bp, Homo sapiens
cgtccaagtctgagctctgatcatcctgaagaatcaaagtatcatcatcccttggctggcaagatgaactccaacatcaaaacacttgaaacagtagtatttttacacaatttgcccactgcctctacatctcacttagtccttgcagtaacatttggatgatgaggtaacttatccagaagcacaaagcctaaagaatgacagagcttggactcctgagaagttcagctactgcccgccttatgataaccaaaagaaagcggccgggcgcagtggctcaactcctgtaatcccagcactttgggaggccgaggcgtgcgaatcacaaggtcaggagtccgagaccagcctggccaacacagggaaaccccgtctctact

SEQ ID NO: 274438 - DNA, 449 bp, Homo sapiens
aaataagctaacgggggggctatcacagttcagagaatcttgatagctcagattcatagactggggagaagaagacaaggtatgccaggtttgggggcaaagttgacaaaatactgaagtattagcatggtatttatgggtaggtgtgaaagactcaacttgaagaagctgagcctctctggttggagacaatgctggatggaaaggctggggcaaattatggagtctcttcctcattgaggcagggctttctttcattaaagtaaggttaaagtactaaacatattaactcattttaagtcccactgtttcagttcttttttttttctttatgtgtaaaatagaattcaactcaaaacaaaataatgtttcccgtgaagagagtttggtccaagatactgtcagttaaaatcgtaacatatcattaaatggcagctatcactaataac

SEQ ID NO: 274439 - DNA, 161 bp, Homo sapiens
tgaacccttactctgtattccactgcaaccctattattcattttatatgagtcaaacgttgcctagggtcactagtaagtgatagtggatttgagcctcagcacgtctcagatgtcaagaaacttgggtgtggaagtgattccccaaagtattctcctagt

SEQ ID NO: 274440 - DNA, 410 bp, Homo sapiens
caatcactacagtggccactgctgtatattatgaaacagttttaggaaatatggcatgcaatacaaggtggaaagaaaaaccaggtctgttacctggattcaacaaaatcctaagctagcaggctcaactgatattgcaaaaaccgacttgcaaacagtgctgtcttcctcgtcagtgtgtttccaggacagtttcttgataaaccaagttagtggttgaagaaaggaagaacaagctaaggagttatggaggcacaggtctcttgatttggagcaggagtcattggaagaggtcaattgtcaaacggcagcctgatctggtcgcaggctgtcctaggattcagcctgaatgtattgtcatccatcacagggaaagcccaataaatccttcctccttgagcatttgtaac

SEQ ID NO: 274441 - DNA, 222 bp, Homo sapiens
cctatctttctaacatttgggtccactaaggactaacttgcctttaactcgaggctgtagataagttggttataatgggagtagtcttcaatttttgagtccagaaaaagacagcatacaagtttctgctatcattagtgctcaatctgaatgaattacccacactggagggatattaatgctttaagtcatcatcctttcggcttaaaaaaaaaaaatact

SEQ ID NO: 274442 - DNA, 435 bp, Homo sapiens
aagtgaagtccacttaggtcgttttctatctacccatcaacagttaggatctgctgggcttctaccatggacacagcatgttgccaagtgtctgggaaagacaagaatttttttaaattgcattttagataaacaatcacttagcattccagtgacatctattgtcttaagggaagaaaggatctgactgggtctccagaaagcctggaacaaagaagcaagagattctgtgatttctgctttctgaaataaaaacagaaaacaggcgtttaactgggctgccagttaccatctcagaaaggagtcaagaattattccagggccataagtgtaatagcttttcaagaccctgcaacctttgtgacttttgtatgtttgtctttttgtttaaccctatttccacgtggtgattagaaataaaatccttaaaataaa

SEQ ID NO: 274443 - DNA, 420 bp, Homo sapiens
tcaccagatgcgcccccttgaccttggacctcctagcttcaaaaactgtcatacaagacactctgtcttgctctcttgaattgcctgctctggtggaagccagccagcttctgccatgtcatgagaacactcatgcagccctgggaagagtccacgtggtgaggaactgaggcctcctgccaacagccaagtgaaagcaccatcctggaagaggaccctccagccctcattaagtctgtcaagccttgagatgaatgaaccaacactatgaatgtaacttcacgagaggctctgagccagaaccactcagctaagccacagtaactgtgaaataatcatgtattactgttttaggccagcaagttttgagagaatttattatgtggtaatagataactaatacagttgtgcttgttatgt

SEQ ID NO: 274444 - DNA, 655 bp, Homo sapiens
tttgatctcagactgctgtgctagcaatcatcgagactccgtgagggtaggaccctcccagccaggtgccggatataatctcgtggtgcgccgtttttttaagccggtccgaaaagcgcaatattcgggtgggagtgacctgattttccagtgagatgaacccggtacctcagatggaaatgcagaaatcacccgtcttctgtgtcgctcacgctgggagctgtagaccggagctgttcctattcggacatcttggctcctccccaagagttctggagtctgagaagtcaaggatcggggtgctggcctattcagttcctggtaagggctgtcttcctggcttgcagttgaactacttcttgctgtgtcttcacaagcctgccctgccctccctcctgtgcctataaagactccagactcggtagagggaagagaagcagcttgactggacagaggtgacttgacttcagagggatggcaggactttggaggagagacaacttgactttggagagactgcttgacttcagggaagagctgacctgagacagctgaactttgggggaagattacctgcctgtcctgtcccctctccagctctcctctccactagagccatttccattgctaaataaaattctccacttccaccatc

SEQ ID NO: 274445 - DNA, 615 bp, Homo sapiens
tttgatctcagactgctgtgctagcaatcatcgagactccgtgagggtaggaccctcccagccaggtgccggatataatctcgtggtgcgccgtttttttaagccggtccgaaaagcgcaatattcgggtgggagtgacctgattttccagtgagatgaacccggtacctcagatggaaatgcagaaatcacccgtcttctgtgtcgctcacgctgggagctgtagaccggagctgttcctattcggacatcttggctcctccccaagagttctggagtctgagaagtcaaggatcggggtgctggcctattcagttcctggtaagggctgtcttcctggcttgcagttgaactacttcttgctgtgtcttcacaagcatgcccccatcctgtgccgataagaactccagaccccaaactcagctcatacacacacggaagagagaagcatctgaacatcaagaagagaagaagctgctggacatcagaaactgtgaaaggagaggagtttggctgagctccaggggaagactgcctgcacattctatccccttttcagttccccatcctgctgtcagccacatttaccactcaataaaatcttcacattcacca

SEQ ID NO: 274446 - DNA, 566 bp, Homo sapiens
gcttcggctcgcgcacggtgcgcgcacccactgacctgcgcccactgtctggcactccctagtgagatgaacccggtacctcagatggaaatgcagaaatcacccgtcttctgtgtcgctcacgctgggagctgtagaccggagctgttcctattcggacatcttggctcctccccaagagttctggagtctgagaagtcaaggatcggggtgctggcctattcagttcctggtaagggctgtcttcctggcttgcagttgaactacttcttgctgtgtcttcacaagcctgccctgccctccctcctgtgcctataaagactccagactcggtagagggaagagaagcagcttgactggacagaggtgacttgacttcagagggatggcaggactttggaggagagacaacttgactttggagagactgcttgacttcagggaagagctgacctgagacagctgaactttgggggaagattacctgcctgtcctgtcccctctccagctctcctctccactagagccatttccattgctaaataaaattctccacttccaccatc

SEQ ID NO: 274447 - DNA, 378 bp, Homo sapiens
tgagattccaggcagttgcaggccaatgaaagtcacagaaagcacccttccaattcatttgcttcaggaggctaaggaaataacctatttcctcttccctcttttctatctggtttttctgatgtgttcccagatcctcaaagaaagattcagagatccatgaaatcttaatatgcctgtttgaagccaggaaaaataaataacagtatgccagtatttcagactgggaagagagtgtatcaatacttgagggggaatttggttcagtcctgaaaattactaagtctttcttccctacttaacagggaagtaatgtcaaatggttgaaatttgcacggaattctactagcctggagggtgctcctgaagtaatcttac

SEQ ID NO: 274448 - DNA, 361 bp, Homo sapiens
ctctagttgaggcaaggaggggatgttacagaagtctgcatggctgagacaacattttgcttggaggatgaatgggagttactcaggtgaagaagagggagaagggaattctaagcagaaggagcagcatgagcaaaggcaaggaggtaggaagtacatgcttcaagcatgaaagaaaacatgcttttggaatctacattagtagcttttggcaaacagacaggtactagctgcagtatggcttctcagcctttagaacccaacacgtgattttgaatccagcatgcatgtttcctggggctttgaccttccttaagatacttaatctctctcagactcatttttactatctttactcatc

SEQ ID NO: 274449 - DNA, 460 bp, Homo sapiens
tgaatagtactacccgtgctggtcctcttgctatgacggcaattactgggtatttatcccaacaaaagtagatacagtagatgtcttgtaaaacaatagtgctgtgtctcaatctatgccactaggttttaaagaattgcaaaggtagaatgaacaactatttcataccaataagcagtcaaaaaataaacatacaccggatggtgtcatggaggtctccctggtcagcattctcccctcctgtctagcttgaagatataacagggctaagcttagagatgggggaggcattaataaaggtgatttcttataaagtagtaacttcccaccctgaagatatattgctggaaacagggaagtgtttataatgaacctatatctgaaagcagagaaacccatgcatcatgagtgttaagaaagaaatcaatacaactcttctatttcaaggatgaagaatcat

SEQ ID NO: 274450 - DNA, 387 bp, Homo sapiens
cttggtggaagagatcacccaggtgaaataaaaagagaaactcacacaactgctcagcagccttcacaccataatgctcaatttagtcccttaaagagtacacgactcagcacagtggctcccacttataatcacagcattttcagaggccaaggagggaggatcacttgaggccaggagttccagatcagcctgggtaacatagtgaggctctacctctgccacccagctaatatatatattagctggcatgcacctgtaatcccagctatttgagaagctgagatggaggatcacttgaacccaagagttcgaggctgcagtgagctatgattgcaccagcctgggcaacagagggagacgctgtccccactccatttaaaaaaa

SEQ ID NO: 274451 - DNA, 277 bp, Homo sapiens
attcatattacagttgaaaggggatgcattattatatacatgtataactaatggaatactagctactgtaacagataaactttaaaatctctgtaacttcgctaagaatttttttttttttttgagacaacttctcactctgtcacccaagctggagtgcagctgtgcaatcatagctcactgcagccttgatcttctggactcagatgatcctcccacctcagcctcctgagtagctgggactacaggcacgtgccaccatgcccagttaactttt

SEQ ID NO: 274452 - DNA, 380 bp, Homo sapiens
catcacgccttttcctcattcaccaagtattcactgagtgccgagagctctcctaagccgcagacacagcagtgagccactttttgcaggagttctgccatcgggagcttacattccagtgtcaggaaggctgacatctgacaaaattaaccggttctccacagctcagtgccctggacgtgtcaaggtacccattggaaagacagaaagatgaaggcaaagagaatgttctgctggttctttttctaggtttaataattggaaaatcatgagctacttcccatgaagtcttctcccaaactcacccccgaggacaggcctttgcagggagctacctgactcccattctcacccacgtatccagctcctgtagttggtga

SEQ ID NO: 274453 - DNA, 390 bp, Homo sapiens
gacaccccaactctcagcttctcctctgggagggagagagaagagtggggcatgtggacaatatcccagctttttggaaggctgcctgagagattgctatctgtcttgcctgacttggggctagcatactttggatgctgctgagaacaacaaaaacagggaggcttgctgccataaaactagagaacgtgcaatgtgtattagtctgttttcacactactataaagaactccctgagactgggtaatttataaagaaagaggtttaattgactcacagttctgcaggctgtacagtccttgagaaacttacaatcatggcagaagacaaaggggaagcaggtacattttacatggctggagaaggaggaggagagtgaaggaggagatg

SEQ ID NO: 274454 - DNA, 334 bp, Homo sapiens
agagaatggcactcagggagcccgagacacccacactgcaggtacagggggctcctgccaaaggcctgaggcccagagaagctttgctggagcaggagctccatgacagttctgaaaacagcagctgctggagctttgcacccaaggagttccagaggtggcacaggctgggagtcccaacccactgggcagaaaggcctcactgaacaccccagcctccagtgggccccccggaagccctgtcttaggagtgggtctactctgcacccacccaaggtcagttgactgactccttgacaggagaaaacaacccacgctttttgcaaagattgca

SEQ ID NO: 274455 - DNA, 473 bp, Homo sapiens
tctgaattagtgttcaagtatgtttgtagagtgagacttagaccctggccttgtgctggtcttgtccttgggtatatactggctgataactagtgagccggatttagtggacttcattcctaggcagcatatttgcatatgctcctaaagtctgcaaatgatataactcctgatggaaccttagatgcagttttgtcaggacctagtggtccaccctgtctggcatggctttaccttggctcccaccaatgctgcatttgtctcaagtctctgccatgcagtgtggatagctctgagccagccagctgcctcttgtgcccttttctatggattcccctttgctcctgaacatagaaagtcccatatcatgattgctgtaagaacagttaccttctcattctttcctcaggggtatgcggaaacctttgggtttactcaaggatgcttttcccccgctgtgggaaaataggaaa

SEQ ID NO: 274456 - DNA, 458 bp, Homo sapiens
gctccttatcagcaccatagatttttaactatggacctgaacagattgggataaaaggaaacacaactgtaccaccaaactctcattctttttaatcataaaagtacttaattcagaaactttaggggaaacaaattcttttctttcccagaatcagaattgcactgacattgtggcccaacatgtgacttgagctcaagtatacactaaagtgaaaagctattgtcaatatttagcggaacgctatgccatgtcggaggcagtatcagcttcctaataccaaaagaaaattcacgtatcacagggctactgagaagaagtaacgtgcagccccagagggcacagatttctgctttatgtaaatcagagcctgtcacggcatgcatgattcactgctcagggtgtactctcctgtgacgaatgagtcccgcttaatttggcagtgattatgcgggttg

SEQ ID NO: 274457 - DNA, 274 bp, Homo sapiens
caaactcctgggctaaatcgattgtctcacctcagcctctcaagtttgttatgaaggttatatgttaggaagggtcccaggaggtagacccacacagatgggatttgggcataggtttggtttcccagggggcagtgctgagctctttgccagtgggaaatgggatgctggtgatttccagtaggtgacctcacagtgactcaagctaccacttactgttgattgtgacgaaatgccagctgaggcacatgccttgggagctaagtggttgctg

SEQ ID NO: 274458 - DNA, 311 bp, Homo sapiens
gacaacacacagctacaaagccaatttttttcttccacaaaatctatacagacttcaccatagaaggatgtatggtcttgttaaggactcaagcctcccacctaagaaacaaggacagtctcatcatgttgcactggcaaaaatgtccgctgattgtgaacgttcagcaaaaacagagatgcatgtgggcttgagcaatacagtatgatatggaaaaaaccattttatctcacacaacctcattcatcattgttgactgtttacaaattattgtgaaatgctttacataaataaaattgttttgcctgtct

SEQ ID NO: 274459 - DNA, 452 bp, Homo sapiens
gttcatatgctgtgtggttggtgactatctgattctatggaggctaaccaaagcctagactgagtgtggatgagaccctcaactggggagtgatggggatatcaaaggacatgctgggtgagaggagctgactgtcatgtagggagtgaaccactgcccccagcagagatacagttcggttttaagaaaaaaggcaaggccaggcgcggtggctcacgcctgcaatcccaacacttttggaggtcaagaggtcgacaccatccttgacaacatggtgaacccggtctctactaaaaatacaaaaattagttgggcatcgtgcctgtagtcccagcttctcggaaggctgacgcaggagaatcacttgaacccggaaggtggaggttgcagtgagccgagatcacatcactgcactccagcctggtgacagtgagactccacctcaaaaaaaa

SEQ ID NO: 274460 - DNA, 490 bp, Homo sapiens
gtggagaggaagagatgttaaggatgctccccagttttctggcttacttcactcatttgatgtcattcactaagagctcctagtcacatggaggaggaggcttggatacattacatttccagtggatttgaagatgttaaatctacagtcagatctatgggtcttcagcacagaagaggtgtttggtctaggggtttccttaggaaagaatggggagagaagaatgggaggtgataaaaagatggattggacaccatctctccctttaggcaactcaaaatctatttgtatttgttgttagaggaagaaaagaaaaaagaaataacaaatagtagaaggaaaaatatttttaaaggaaatataaaagtgctgggattacaggcgtgaccaccacatccagccagtaattgtctttttatgatttgcttatttcacctagcatgatgtcctcaagagtcatccatgttgtagcatatggcaggctgtcctt

SEQ ID NO: 274461 - DNA, 551 bp, Homo sapiens
cagtgtctattaattagactttcatttctattgacaatggggcctacaggccttgcactgaggtggacacagaccttttgtggtgccctgttgatcctggttctgctcgtggaaaattaggcctgattgccctatgaaggccccttctctagtttccctctctcacctgctaagtctccattcttcctctaactgctttaaataggtcagctgagtttcattcttacagtcatcaggcctttggtgaaggcatctgtgctcttgctgaagtctgcaacatttcccaacatgcaggccaagggcccttctctttcggtctgaccacttgtctgttcatgcatgcatgctttcattcattcagaaaatgtgtcaagaaaagagcacatgatttggaggcagacgtaattcagtggtgtgccggagtgggatatttccagcttgcaaaagcggattgctaaatttgtaagtgttttgcagctggtttttaaacatatattaaaaatgaaattgtagaaaattgcaattaaataaattatatcaaaaacagaaaa

SEQ ID NO: 274462 - DNA, 425 bp, Homo sapiens
gcctattgcagagactgaaaaatcagatactggtttaaccttcatcctctgcagcaagtaatgctcatggacttagcctagccaatgagacacaagaggaattcttctgggaggcttctaaataaagaatgttagtccctgataaaaggagagaggcactaaagcagaatgctctctgtctcactaccctggcccaactttacctcttgcctttgctgtgtgatgacttgacatcgagttctgatagccatcttggatcactagcaacaagcccaagaacaaaaagccagcccactgaggatggtgaaaaggaaaaatgtagagcctgggtatttgaaaacatctttacggcattaaaccaatcctgggactttctacctttggacttcatgttaggtaatatgcgacatctttatgtattcagc

SEQ ID NO: 274463 - DNA, 414 bp, Homo sapiens
aactagagcccaaagagatagcaacagattgaaagaagaggagatacaagccccgtccttgcttctgaccctttgccacacagatatgccttggacactggaactctatgaatggactttaaaatctgtacttaaatcttttattttttaagtattcttttttgttactcaagttaagttggctggtgggtaacgttccatgctacccaacataatttcctaattgccaatagtttcttccatattagagacaaaattagacttaccactgaaattatcaccattctgacaagtatttttgaaaatatcacttatattcttatttttatagattaagccaaagcagaaagtgaaaaatgcaagctggttggatacctttattggcaataaaataaagtagagttctaattaagc

SEQ ID NO: 274464 - DNA, 437 bp, Homo sapiens
atttcatcatcatgtagataatcactgtcatcagtttggtaaaagcaacactttcaaccaattcagaattgatcatatgtatctgcatccaaatgatacctctcttcttatctaaagtgtctgagtcagctttgcttactgctgaacgcatgagattgagttcaatccctgaccatagtgaattttctacatatgctttgaggagacatggttagtgtccctaactggagaggttagctgccaaaagaagagaggacaactgtttatctgagacagaagttaagaaggcaaggataggtgtcatagagtcattctcacaatggggtccccagaccagcaacattggcatcacctgggaatttattagaaatgcaaattcttgttccacgccaaacctagtgaatcagaaactctgtggggcagggctcagccatctg

SEQ ID NO: 274465 - DNA, 155 bp, Homo sapiens
atttttcaaaagcactcttactcatctctacttatgaatacaattaattagttgcagaatgttagatagagtggcagtccttggacaggctgagtgacagctgctagaagacagtaggaggcaataagtagacaattcatgtgtatatacttgag

SEQ ID NO: 274466 - DNA, 456 bp, Homo sapiens
ggttggaccctacatctagttactcaggaggctgaggcaggaaggttgaagttgagcccaggaggttgaggctgcagtgagccatgattgtggcactgcactgaagcctgggtgatagagtgagaccttgtctcaaacagcaacaaacaaataccatctttgggtatattaatcagatggggggagtcacactgacatcagttggcacccactggttagtgtgtgccaggcagggagactgggctgttttcagtaaactgatcacagcagtgagctgtgatcgtgccactgtactccagcctgggtgacagagtgagaccttatttccaaaaaaaagagaaggcattggagttcagcttgtggttttgacagagaaataataggataaattaatgaaacaaaaaagttaacagtagaggattaataaaactaagttttttttttctaatttctttt

SEQ ID NO: 274467 - DNA, 377 bp, Homo sapiens
aggacagtgggatagcttcagcaaggataaatacttcaaaattcagtggcagctaaggccccaaaagcagaaagctggttaagacagactagtgtaatgccaaatgtataggtctaagatccaactttgtcactttgcggccctaagaaactaccccatcagggccgctatcttctcacttatgagagtaaggcctgaattagggatttggctctaaaattttacagttttatggtcacagtgacactaataatcaaaagtttcaataaagatatgcaggtcgggcccagtggctcatgcctgtaatcccaacactttgggaggccgaggcgggtggatcacctgactttaggagtttgagaccatcctggccaaca

SEQ ID NO: 274468 - DNA, 410 bp, Homo sapiens
tcaagaattactttcttaacatagttacatgttagtccccaaattttcagtcgttgagtctttaatcctccgtgtctctaaatcatgtacctaagaaagtaaatttaatttttgaaaaggggtaaaataaatattttataaacgtttgccaaatgattaccacatgtcttatctggggaaagtacctttagacatgagaaatgttttaattccttctcttcaaagtctttctgtttcttggtttttagtggtcagtctgacatgttgttctgtaggctgcatttaaagcttttgagccaggcacaggaaggaatcctgaagatagttcaggcaagcatatgttttcccatttttatccaaagcattgccattttttagagtttattccattaagtaaagtaatatacacc

SEQ ID NO: 274469 - DNA, 439 bp, Homo sapiens
agtaatcaatcaactaatcataattccaaagggtgagataatgttcccacagtgtatcattagtgtgatgagtttatctctttaaagcctcacaacctgctgatatgctgtggtttttcttggtcctatctctttatcttttaccacctctgatctctttaaacccaccctgtttccattttcctccccgcccattgtttcctcatttttccttaacacttcttccttagattaacctttaaatacaaatggaaataataatcggattattttttgtaaggaaaccacctttctgtttcattattcataactagaataatgaaataaagctgtttatagaaatgcatctagaacatgagacaaaattgatatagaccaaacattgttcttgaatagtggtatcaaatataaaattataaataaaatcttaaaagacaaa

SEQ ID NO: 274470 - DNA, 331 bp, Homo sapiens
aaaaagcaacattaagatgtatcatttcttagactgtagaattctttagccctaggagtttggaggtgaggtggagactgcctgtgatcagtgagttaccatctgtttttctccacactttatggcacagaacttgcattgctaccctgatttttttttttttcctccagaggatttctggaccagaagtataaattgccttatggatgggtaggccctatttgtcccagtacaattggggatggggaagaggatgggatgggaagtaagaacagaaccccaagagcctccccaccctctttgatcccctcctcctctacaggccttctgc

SEQ ID NO: 274471 - DNA, 306 bp, Homo sapiens
caaggacaaaaaaaagtcagaaatcgattctaagatgataaattatataaaaatttaaactcaaattggctgggaagaagataaactgtaaagtgataatcttcaaatattaaaaactcttcattgtacacttttctggatccagttgattttggcttacatgctgtttaatttatactctgccgttaattaaagatactgcagttttattcattaactagggaatagttactttatttattatatacaataaatgtaaattacactctgaggtaacaagataataaagataagtatgtaattcag

SEQ ID NO: 274472 - DNA, 423 bp, Homo sapiens
attcctgaaaagcctggagactgcagggtggtgtctcactatgttgcccagactgttttctaaccctggcctcaagcaaatttcccacctccttctcccaaaatgctgggattacaagtgtgagccactgtacccagcctacttaggaggacatttactattcacttactgatttgcatcaaattattgattggtggtgtttcagaaggtggaagctctgccagccccacatacagcctgagtgagacatgccattcatttgttaagcagctgagggtttgtaactgcttgtgactgcggcatgtccaagaatgttttgtctgatgcacgacaatgagtgaatatataatgattcaacaagagccatagagttttaaaatgtgttacattttataggaaatacagttacttagacttataaaa

SEQ ID NO: 274473 - DNA, 177 bp, Homo sapiens
gatcgcgctactgcactccagccacggcaacagagtgagacttaagggaaccctttccccacccccattcacctgactcctcaactgcaccctacactgtcacatcccacctctccgtgtctcctcgatctaacctctaatagctgggcaccccacctctccttttaataacccctc

SEQ ID NO: 274474 - DNA, 272 bp, Homo sapiens
tgcgccattgcactccagcctgggcgacagagcaagactccgtctccagaaaaaaaaaaaaaaaaggtaaattcatgactcagggttaactagttcataaaatattacaaatttatctggctaaaccaaagatttttaagtcaataaacattgattatatatctattgtgtgtaaaatagcatgttaggcaatgttgatatacttctgaaatattaaagattaattgaaaatgaaagattaaatttatttgctttctacacttgatatcgac

SEQ ID NO: 274475 - DNA, 520 bp, Homo sapiens
ttattgggaccagtatttcagatttcagatgttttcaagttctacaatatttgcatatacatgatgagatatcttggtatcttgagataccaagtccaaatatgaaatttattttcatatacaccttatacacattgcccaaaggtaattttatacaatatttttaataattttgtggatgaaacaaagtgtgtgtattgaaccatcagaaagcaaaagtgttactatcttagccacccatgtggataatctgtggtttggcatcagtgttactcctgactctgaatttacatactactgttaagcaatcattttctaacacttatttacacgtagatatatttagcaaaaaataagacatatcagtgaaaagataatgtattcagggtagtggagcagcacaatagcatcaccagaatacctgtatgttatcactattaaccaaaaaagtatctgcagtcctttttgacattttcaacaatatctttataccacacagcagagaataagcaaaaaaaaa

SEQ ID NO: 274476 - DNA, 406 bp, Homo sapiens
tgattaaaagctggggttaccaatgcgcgtggcacagttagaagctatctagcaaaaatgagcacatctgaaggacccgccccccctttttttggccccccttgggggggaaaaaaaaatttttttttttttttaaaaccccccaaattttgaaaaccctttaaaacccttgggtttttttaaagaagcgccaatcattttctaacacttatttacacgtagatatatttagcaaaaaataagacatatcagtgaaaagataatgtattcagggtagtggagcagcacaatagcatcaccagaatacctgtatgttatcactattaaccaaaaaagtatctgcagtcctttttgacattttcaacaatatctttataccacacagcagagaataagcaaaaaaaaa

SEQ ID NO: 274477 - DNA, 259 bp, Homo sapiens
gatcattacttgctggcagttataatcatgtcacagctaatatatctactgttttatttttaaaacagtacatatcacatgagctcagggcattaccatatcaattaatactctaagagttgtgtgtgtgtgtgtgtgtgtgtgtgtgtgtgttcaaaagaaaacacttagcagtcactacaactgggttaaaacacttttccttctagaataatttaaaacacaatctgtgactcagaagcagaaaagacagagattt

SEQ ID NO: 274478 - DNA, 291 bp, Homo sapiens
tcatccactcctgcatctggttggtctttattgagcacctactatatgcagaaggggaggccgaggtgggaggatcattggatctcaggagttcgagatcagcatgggccacgtagcgcgactccatctctacaaataaataaaaaattagctgggcattggcggctgtagccccagctactcaggaggctgaggcaggaggatagcttgaacccgggaggcggaggttgcagtgagctgagatcgcaccactgtactccgacctgggtgacagagcgagactctgtctca

SEQ ID NO: 274479 - DNA, 389 bp, Homo sapiens
tgcactccagcctgggtgatggagtgagtctgtctccaaaaaaaaaataaataaataaaagtcggagaggagagcgatgaaatcaagtcgaggaagaggaatgtttattgctttatgattttggaaaacatttattgtacaaaatatggcaaataacacaaaagtatagattagtgaatgagtttttacaaatccaatgcttatgtaaccaacaccaaaaaaatagaatatagttgaccctttaataatgtgggtttgaactgtgcgggtccactttagttatacccaaactttttggaataaatacattggaaaattttttggagatttgtgtgacactttgacaaaacttgcagatgaaccacatagcctagaaacatcaaaaaaat

SEQ ID NO: 274480 - DNA, 424 bp, Homo sapiens
ctggggtcctatgagaattgttttttcatcatccctatgccttttgcattgtatctctctgttcacatcaacatttgtcactgttctctgcctttcatatcggacacattcagcttaatgataaattaaaacttaatagagaagggtaaaaagtaatattagaccacaaggtatcctgtagaatctttgttctccaaaggctgtatagctatctgttcatatgcttatagaataaattgcacaatgtcagagtagacaatactactgttgcttcagtaacatgctcacagagtgcaagaatgtaagtcaaaagacaggtgaaactgaacttttgaaatatatcccaattgcttttaattgtacctctccaaaaatgtaaatatagttaaaagatttttttaaaaaaaccaaaaaagggcggccg

SEQ ID NO: 274481 - DNA, 228 bp, Homo sapiens
tgtgacagggagcattcctagtacacacaggcgttgactttaagaccaaaatctgtaggcctttaccctgcatatcacaccaactcagactcaacatctctaatccacgctctctaactccttacccaccccaccactccaatcaagccaataccttccctggtctgccctaggccactcactttccaattgctcctctcacttttctcctcttagagtcccccttta

SEQ ID NO: 274482 - DNA, 486 bp, Homo sapiens
agaaattggatccattcctcaaaaacattccagtgatccattcctttcatatccctgcgaaatgatttgtactcagaacagttgtgtgtgtgcacaagcatatgcagcacattaagaatgccaaatctgaatttttcagtggtctgaagtggaaacttctcatagagcagccatatgttttctaggattgcattaatcttaccttttaggcaaacaatatagtgcattttgtctatgttttaccacatacaacaaatactgaaccctttcttattcctgtatctatgaatgaatatggaaagacttatctgaaaggcatatcaaggattttttttttttattagcttacttggccaggcgtggtggctcacttctgtaatcccagcactttgggaggctaaggtgggtggatcacttgaggtcaggagtttgaaactagcctggccaacatggcaaaaccccgtctctactaaaaaaaaaaaaaaa

SEQ ID NO: 274483 - DNA, 391 bp, Homo sapiens
ggtcctccctgcgacagcggaacggaaacacgtcagggcctgaggaaaggccccagtttaataattctcatcagcacttacgagaatcagacacacttggccgggcgtggtggttcacgcctgtaataccagcactttgagaggccaaggcgggcagatcacctgaggtcagtagttcgagaccagcctggccaacatggtgaaaccccatctctattaaaaatacaaaaattagccaggcgtggtggcgcgtgcctgtgctcccagctactcaggaagctaaggtaggagagatcgcttgaacccgggaggaggaggttgctgtgagccgagattgcgccactgcactccagcctgggtgacagaacaagactctgtctcaaaaaaaaaa

SEQ ID NO: 274484 - DNA, 438 bp, Homo sapiens
tgaaagtctgtaagagaatagttaggtctccatacccccactccacaagctcagaaatcatccctctttcaccctgctgaagatagaaagttgatgtgctgggaggaaaaaactgaaacagaaaagcaccaacatcaggggcatcagacaaagacggtggtaaaggattgaaaataaaggaggcccaggtcaccaaaaaccaggcttactaactccagctcctagtctccactgtggattaaagaatctttttctagagaaatagaaatctcatctagctacatgatcatcttacagtgaagcccactaattgacaaacgctgtccacaaacacagagcttcccttcagctttttagagcttcacttttattttgaaatcaactttactgataatttacatacaataaaaaacatattaagtttgtaaaaaaaaaaaa

SEQ ID NO: 274485 - DNA, 537 bp, Homo sapiens
ggtttccctgtggcatggaaaaattagtgtgatattattccagaatttggtagcttagaacaacaacatagattatttgtggaatattcggggatttgggattggcttagtcacgtaagtctagctcaggctcccccttgaggttggagtcaagatgccagccagggttgtagtcggaagccttgaatgtggctgaactatctgcttccaaactcataatgatattgacaggcggcctcaattccttactgcatgtaactttccagggctgctgaagtgtcctgaggcatctgacttctcccaaaggcagcaatccaagagagaaagcaaggaggaagctgcagggccattaccacgtggcctctgaagtcagctttgtgccagttagaagtgagttcagctcacactcagagggcaatgagattccatctttggaagggagcgtcgtactgtaaaccattataccagctagtaaatagatacatatctcaaaaaataaatcctccccacaaatatatacacctactatgtacccac

SEQ ID NO: 274486 - DNA, 1903 bp, Homo sapiens
gggctggaacgtgggtctcctgattatctcacccattgtcacatccactatggacctgtgagcttcccgccacgggcaatatgtatgtatagagagaaaggcaggatatcaaggcagaatggagggaggttcagccatgagaacctggtgagtattgacagatgatgtcatcatctacgtggcagaaaagagaagcaatggaaaagctattattttattttattttgcttcagagatggtgtcactctgttgccccagctggaatgcagtgtagtcctgaactcctgggctcaagagatcctcccacctcagcctcctgagtagctgagactacagccatgtaccacgatgcccagctaatttatttctttattcatgtatttatgtatttatttatttatttattttttgagatggagcctcactctgtggccaggctggaatgcagtggcgtgatcactgcaagctctgcctccctggttcatgccattctcctgccttggcctcccaagtagctgggactgcaggcgcccaccaccacgcccggctaatttttgtatttttagtacagacagggtttcaccttgttagccaggatggtctcaatttcctgaccttgtgatccacctgcctcggcctcccaaagtgctgggattacaggcatgagccactgtgcctggcctaattttttatttttagtagacatgaggtctcactgtgctgcccagcctggtcttgaactcctggtctcaagtagtcctcccacctcagcctcccaaaacactgggattacaggtattagctaccacacctggcccaaaaagttattagacccaataagataattcaggaagtccaagaggtcaaaacaagatcaaaatacccaaaccccctaggtttcctacatgctagcaataaccaatcaaaaggatagttgaaaagatcccattcaaattcatcagaaaagtgatagagcatctgggaataaatataacaaatatgcagcaaaaacttgagaaatgattagaaaaaagtcaatattgtattatcaagttgtcagatcttccacccaaattattccagtctcagtaggattcaggaaacttgaaaaagaagttcccaatcttgaatctgagttgcatctagaagaataaatataaaattgctaataatttgttgtgaaaaggatataagtgaagatacgtgggagatacttatagggagatgaatgcagggttggttatgtacattattgtacatttcctaagatcaattaatgtagtatagaagaggtagaagaagggccagaaagatcagtggaacaaaatagaactttatggtacagatggcatttttaatctgtggagaaaggtagattattaagtagtgttgggagaacacatttggaaaataaagacaaacctctacttcacaacataaacaaaaatacagttagattaactatctacatgtagcaattaaaacctaacatgccaggatacaatatacagaacactttaatagtaacctttaattatgggaagagtgagttataaacccagaagtcacaggaaaattttgataaattagactctatgaaaatttaaatctgtatacagcaaaagagatagtaaagaaactaaaagaggctgggcacggtggctcacacttgtaatcccagcactttggagactgaggcaggcaggttgcttgagcccaggagttccacattagcctgggcaacatggtgagaccttatctctacaaataaaaacaaaaattagctgggtgtggtggtgcacacctgtagtcccagctacttgggaggctgaggcaggagaatcgcttgagctcaggaggttgaggctgcagtgagtcgtgatcatgccactgtattccagcc

SEQ ID NO: 274487 - DNA, 1517 bp, Homo sapiens
tgcatacacctataaccagcctggttaattattgtatttttatgtacagacaggggttacaccttgttacgccaggatggtctcaatttcctgaccttgttgatccagctgccttggcctcccaagtagctgggactgcaggcgcccaccaccacgcccggctaatttttgtatttttagtacagacagggtttcaccttgttagccaggatggtctcaatttcctgaccttgtgatccacctgcctcggcctcccaaagtgctgggattacaggcatgagccactgtgcctggcctaattttttatttttagtagacatgaggtctcactgtgctgcccagcctggtcttgaactcctggtctcaagtagtcctcccacctcagcctcccaaaacactgggattacaggtattagctaccacacctggcccaaaaagttattagacccaataagataattcaggaagtccaagaggtcaaaacaagatcaaaatacccaaaccccctaggtttcctacatgctagcaataaccaatcaaaaggatagttgaaaagatcccattcaaattcatcagaaaagtgatagagcatctgggaataaatataacaaatatgcagcaaaaacttgagaaatgattagaaaaaagtcaatattgtattatcaagttgtcagatcttccacccaaattattccagtctcagtaggattcaggaaacttgaaaaagaagttcccaatcttgaatctgagttgcatctagaagaataaatataaaattgctaataatttgttgtgaaaaggatataagtgaagatacgtgggagatacttatagggagatgaatgcagggttggttatgtacattattgtacatttcctaagatcaattaatgtagtatagaagaggtagaagaagggccagaaagatcagtggaacaaaatagaactttatggtacagatggcatttttaatctgtggagaaaggtagattattaagtagtgttgggagaacacatttggaaaataaagacaaacctctacttcacaacataaacaaaaatacagttagattaactatctacatgtagcaattaaaacctaacatgccaggatacaatatacagaacactttaatagtaacctttaattatgggaagagtgagttataaacccagaagtcacaggaaaattttgataaattagactctatgaaaatttaaatctgtatacagcaaaagagatagtaaagaaactaaaagaggctgggcacggtggctcacacttgtaatcccagcactttggagactgaggcaggcaggttgcttgagcccaggagttccacattagcctgggcaacatggtgagaccttatctctacaaataaaaacaaaaattagctgggtgtggtggtgcacacctgtagtcccagctacttgggaggctgaggcaggagaatcgcttgagctcaggaggttgaggctgcagtgagtcgtgatcatgccactgtattccagcc

SEQ ID NO: 274488 - DNA, 278 bp, Homo sapiens
atttacagggacatgtgactggaaacacagggccagatctggcttcaggttcaatttgattcaaccgctctaccaatggcatcaaggatccagtttctctctgtccttcagctctgccttctgcaggattagctttattataatgtcagtggccaaaacgcccaggtttcttacttccccctccaaatccagggggaacaggccatcatacccagagacctctcagtacatcaaagaaacatcttacctagaaactgcaaataaatttttttcccaaa

SEQ ID NO: 274489 - DNA, 417 bp, Homo sapiens
ttttttagacagtgttgctgtgttgcccaggctggagtgcagtggcacaatctcggctcactgcaacgtctgcctcctgggctccagcgattgtcgtgcctcagccccccaagtagctgggattacaggtgcacaccatcatgcctggctaactgtatttttagcagagatggggtttcaccatgttggccagcctgctctcaaactcctggcctcaagcaatccacctgcctcagcctcccacagtgctgggattacaggcctgagccactgcaccaagccccagctccagattgtgagtttcagagccaggctagataggattcagactcagaactgtgagatttctgctgctcaggctgttaaccagtgactcatggttttttttttgtcgacgcggccgcgaatttagtagaa

SEQ ID NO: 274490 - DNA, 413 bp, Homo sapiens
caaatacatatgcaaatacatgcacaagtgcatatacatgagcatgtatccacgcatatcatatacatgtacacatacacatacatacatatacacatatagacatatgcatatacatagacaaaagtatagctgttttggctgaagctccggtctcactcactcaactcacactcaccctctccctcgtctggccttcatagtgacacctaagcaccctcacaaaaagcctaggctctgcccaactccactttaaaaccactgagctttgattcagtcaaaagcttgtcctcaccaaccagcttgccagtgaatctgaaaatgtggacctttgcgtgagtcagtgctttctgacatcaaaatctcttgaaggaaagaggatcgttcccctattttaaagattgaatttggca

SEQ ID NO: 274491 - DNA, 315 bp, Homo sapiens
ttcttccaggaaggacaaaggctgatcatgaaagaagctttggcccttctcagccaggagaaggcactggaggaatctgcttaacaaattcccatgtatttgatatttgccttcccacagttgctgcacctagggactcgaagcctttttcctttgttttgttacttacctaaaaacttactgttctttgttgaagatgcaatataagctggatttctaaaccacccctttgagaaccatgcactccctgggtgtcccccctgcatacatgaaatgcacaccttaataaacttctgtttgattttctcctgttaa

SEQ ID NO: 274492 - DNA, 574 bp, Homo sapiens
ggtcttaaactcctgacctcaagttatctgcccgcctcagtctcccaaagttctgggattacaggcatgagccaccacacccagtctatatttaaatcacttattttatatcacttagctagccaacacataacactttcagtacttttgtcacatatagcattttgttacataatacggtttattatgaatgtatagagtgtttcagagagaagacatttgtgatttttagagttccgtaattgaggtgatactacataatatgccaatttacataactgagaaaattaacagtgtagctgtattggtgagattattgctataaatgatgaagttaggacctctgaccagattcatattatttaagctttttcatttcaccttctttgatattttttacctcctagacatagaattacgtggtcctctctaaaatatgtctgtctactcagtccatatcaggcaatgtgctgtgctctggggataccaaggaaaagatatgttctgccttcaagaaattcccagtctggtagaggtagcaagcaagtacaccaagttacaatccagtgtgata

SEQ ID NO: 274493 - DNA, 464 bp, Homo sapiens
tgcagcacaccaacatggcatatgtatacgtatgtaactaacctgcacgttgtgcacatgtaccctaaaacttaaagtataatttttaaaaagtgataaaaataaaaaaattttaaaaatcacatataaatacttaaaaaaaaaaaagaatagtggtgaaacaaaacaaatagagctttttagtattccctccagttaaactgtcattgccagtattttgttttctatatacatgtaatgattatgtaatgattatattggctattttaataactgaattataaatattttataacattcattactgcttgatcagaaaagtaggggggtgaaggagaggggcactagttgagaaacgacctgttgggtgctatgttcactattttggtgataggttcaatagaagcccaaaccccaggattgcacaatatacccatgtaacatacctgcatatgtaccatctg

SEQ ID NO: 274494 - DNA, 740 bp, Homo sapiens
tatagaaacttaaggagtcttcccattatatttgtgtagcagccccttctctctgtctacctgtcttctgatctttcttaatagaaagatttcagaattaaaatcaggacttatgcagccatcttatctgaatagtaataaatcatgcctatctttatttttagaaatacagtattttctttatgagattaaaattcttgaatgcttggagtagtttgttgaatttactatatttatcataaatgaggccaaagttctgggattacaggcatgagccaccacacccagtctatatttaaatcacttattttatatcacttagctagccaacacatgtaccctaaaacttaaagtataatttttaaaaagtgataaaaataaaaaaattttaaaaatcacatataaatacttaaaaaaaaaaaagaatagtggtgaaacaaaacaaatagagctttttagtattccctccagttaaactgtcattgccagtattttgttttctatatacatgtaatgattatgtaatgattatattggctattttaataactgaattataaatattttataacattcattactgcttgatcagaaaagtaggggggtgaaggagaggggcactagttgagaaacgacctgttgggtgctatgttcactattttggtgataggttcaatagaagcccaaaccccaggattgcacaatatacccatgtaacatacctgcatatgtaccatctg

SEQ ID NO: 274495 - DNA, 484 bp, Homo sapiens
actgtcactttttaatatatccttaatctgtctcagaagctcaagtgtgaaaccagtttttgcacattttgtttgtgaattctgcattttgtttgggccttagctttggcatctttgtgatgaagttcaggatgtggtaccccaacatatggcaccttggcattttgagtatttcaaactaaagagatttgagaaaatgacaaaataaggaaggtctctttgccccttgggggcagtttatgaaacctaccagggattttttgaccttcccctgaggcagacaaaacactcatgtgagaggtacgctccctctacccataggaaagaagcatcttgacctccaaatacagagttgctaaggagaatctgaacaggccttgctaaattagatcataatctttttgctctatcatattgttccagaactctccattcttcatcaaaccttctgtaaaaaaacactcacgtttaatagttactttgg

SEQ ID NO: 274496 - DNA, 458 bp, Homo sapiens
tctgcacttgtaaatgtggagaagtgaaacaccagacttgagaggatgctctgctatctgaacgaggtaatgggaaaatgctcggccagtgttgtaactcaatcttcttatccaacagtgagccccttgggcacccagacccagactcgcccttctagtctcacgtcttgcactctctggcacatctcatgtaggctctgttgcctgtcatgttttccagtccacaaatacccttggcatgctctcatgtctgtacttggtccacattattctaacgtgaatacatgaaacttctaatgacagtgcaatctttctagacaatctctgaaggagaaatgttactagtctgtggtgaatataaaaataggctcatagggaaaaaaaactgtgattgaaggtataattctgcattttcttgggatatacataaatagcaagtagtcattttttacttaaaa

SEQ ID NO: 274497 - DNA, 368 bp, Homo sapiens
gggcagagagggcagggccctggcagcccagggcatctcatgcgtctcactgcctggcccagacatcactgtctttgctcccattggccctagagtccctgccaaagaccgtcagctcttctcatctgttacattccttgagcaggagttggttttctatccctctttatttattctatttactttttatatttgagagttagagtctcaccctgtcacccaggctggagtgcagtggcacgatcatagctcactgcagcctcaaactcctgggctcaagtgatcctcccatctcagcttcccgagtagctgagaccacaggtgtgcaccaccatgcccagctattttttttttttcatttttgcgca

SEQ ID NO: 274498 - DNA, 468 bp, Homo sapiens
tacatggttcagaagaataaaacacactgtgtcataggcagggaagtcattcccactatctgactagccaattacctttcatctttcaagaccatactcaggggtcacatccttcaggaatactttcctgtaacttcctccccaatagagagttgaccttaccttcatggtgaaaaggtaagaaaagactgttaccacagcatttttacaccttatgatacttatttattcactggtttatttctttcactgcattggactatcacgtcttgttcacctttttaatttttaggagtttctaacacaaatatgtgtttaatgaatgcttcttaattttttaaaaaaattatctaaatggcatatgctgatgttctacactgtggttcccaaacagtggtccctatgtctacaagcactatttcagctatacaggtaccatctgaggatgaaaacatccagaaaaaaaaa

SEQ ID NO: 274499 - DNA, 541 bp, Homo sapiens
attttaagtgtgcagttcaccgatttttattatagtcacagaattatgcaaccatcaccaccatctaattttagaatatttcccttaatacaaaaagaaatgtgttgcccatttgcaattattttttcattttcattcagccataggaaaccactaatgtactttcttctatctatagatttgccttttcagtacattttatatcaatggactcatagtatgtggtcttttgtttctgtccttttttcacctaacacaatgtgttttgaggcttattcatccatattataattttattccattgtatggatataccacattttgtttatcacagattacctcttaatatacaataattaaaattttagttcttttaagtcatcctatacttgattctttttttaaaaaaagaaacctgaaaataagtaaatgaatctcttacgagttagacaaaaatgcaatagaataaacccaaagaaatggataattgaaaaaaattaaagcaaaatttaatgaaatcaatgatataatagagaagaac

SEQ ID NO: 274500 - DNA, 376 bp, Homo sapiens
gcaggagttctctatttaccaggactatggtttgaacgcgttttccccaaagtttatgtgttggaaacttgacccccaatgcagcagtgttggaaggtgcctactaggtggtgtctgggtcatgggggtatgaccctcatggatggataaatgccatgactgaggcggtgggctccttataaaagaatgagtttgggtgaaacctcgtctctactgaaaatacaaaaattagctgggtgtggtggcacatacctgtaatcccagctactcgggaggctgaggcagaatagcttgaaccagggagtcggaggttgcagtgagcagagatcgcaccactgcactccagcctgatgacagagcaagactccgtctcaaa

SEQ ID NO: 274501 - DNA, 350 bp, Homo sapiens
ctcagccaaaaccaaacactggctgccacacagcaatggttctcaaacttgagtgcacgtcagaatcatctggaggtcttgctaaaactaagaaagttctgcctgccccctctgcctctccacccccagtttatgatgcagtaggtctggggtggaggttttgcttatctcatacatttccaggggatactgatgctgctggtctagggaccacacttttgagaaccacacccagatggggacacagctccagagtagccagatggtctctaaaaagtcaagctagaaattcacgacttctggattagactataaactccttcagaaaaaaaagcagtcttttgcttctg

SEQ ID NO: 274502 - DNA, 265 bp, Homo sapiens
ctgcagggaaagagcacacgacggccacagcgcagggaaagagcgcacgacggccacagcgcagggaaagagcgcacgacggccacagcgcggggaaagagcgcacgacggccacagcgcggggaaagagcgcacgacggccacagcgcggggaaagagcgcacgacggtcatactgcagggaaagagcgcatgacggtcacagcgcagacaaagagcgcacgatggccacattgcagggaaagagcacacgacggccacagcgc

SEQ ID NO: 274503 - DNA, 277 bp, Homo sapiens
ggacattggaaatacacgataggtaactaactgaagtacaaaattgtgtttaaaacttgcgatttgggattacaggcgtgagccactgcgcccagccaggacggccacttctaatccatattcttttccacagctgcagccacagccatgcagcgtcctttagattctccttcttcttgagtatttttatgtcttgcttatcaccttgtttcattgcaaatggaatagtagcagtcagcatcagtgcacgctttacaattaatgagtgacgatggag

SEQ ID NO: 274504 - DNA, 376 bp, Homo sapiens
gaatgtttgaatatacggataaaaattcggcaaccatgactgaaatctaatagaagctttatttcatatcatttgatctttcttcttctccaattcttttattgtaaaatacacataatataaaatgtatcatcttgatcattttaaagtgtacagttgagtggtgttaagtatgttggtaatgttgtgcagccatcactgccatccatctccagaactcttttcatcttctgaagctgaaactctgtacccattaaacaatagccttcctctcctcctctcccactagcccctggcagttaccattctacttccactgtctatgattttgactattccaagtacctcatgtcgttggaatcatacagtatttgtc

SEQ ID NO: 274505 - DNA, 359 bp, Homo sapiens
gacccccaacagagacaccactcaccccgggcctctatctgtcctgccaacaagatgactctttgtgccctggctgtctctgaggacctgccctgcagacatatgttcccccttttccctgcaaccatgcaccagttctgtctcaggcagccaggagagctccaccattcaatggagctgagaatctcttttccctcactgtctgaatccgtcgtggggaaaaggacctccttcaaagtggttcctcccgattttcatcctcagccctaggatattgtttagagcattgttttcaccttcctagttaggcctacgttatagttaacaattatttataataaattttccctgttcaaatt

SEQ ID NO: 274506 - DNA, 324 bp, Homo sapiens
agaccagaatattgaagcatgtgggggctgcggctgggggcagagtgtcccttccaggacagggaggccgtgggaatttaaacatctaaggctgcctgctcactgggttttcagatgagcaaaggtaaggacaatggacagctccttgggtgtaaatgcagccaaccttgtgaagtcacagaagtgctcagaaatagggaatccagctttgggaggaaaagtaagaccaagacagctggggaaggaagaaaatggcctgaagtgtccagtcactgtggctcacgcctgtaatcccagcactttgggagactgaagcgggcagat

SEQ ID NO: 274507 - DNA, 290 bp, Homo sapiens
tccctgtaagatagtatctgggagacccaggacacactgagggaagtaacgtgtacgcacagagaaggctatgtgtatccaagaggcatgtaagtcttcatactcctatgtatgttcacatgcttacatgcacataggtatgcatgcttgtctgtaattgcctcgatgtgttttgaaagttggcaaggtatgaactgcgactaaaggagagttatggggcgggcgcggtggctcacgcctataatcccagcactttgggaggtcaaggcaggaggactgcccgagctcag

SEQ ID NO: 274508 - DNA, 801 bp, Homo sapiens
gtatttctgtaccttgcatttccactttcaaggtttttctgaagacataaagcaaaaatgtatgcaaaatatgcatgctcactatagcactttttataataacaaagatataattagatattagaagcaatataatatacattatataaattaaattaatattcacatagataacaatttaaataaggcatatgtcattcatatgtgcaatgtatcattcatgtatgtttgtaaatatttagaaaatgtcttgaaaaaagcacatcaatgtgaacagtggtttcctctaatttgtggaatttatggatgaagagaatgaaagttacatatatgcatatatgtaactacagttatacataattatagttgtatataattatatataacatgttaattatattccatatgattatatgataattatatgtatatatttctatattctgatgatctttaaaataatttttaaactttttaagataactatagattcacatgaagttttaagaaatcatacagagcaatccagcatattttctaccaagtttcctccaatggtagtatcttgcaaaactatgctgctacatcaaaaccagtatgctgacattgatacaggtaaaacacagaatatttctgtcctcataaggatctctcatacagctcttatataacacactcacttccttcctgcccccatcgtctccttaacccctggaaattacaaatttgttctttatttctataattttgtcattttgagaatgttacataaataaaagtatacaaaatttaacctttggg

SEQ ID NO: 274509 - DNA, 622 bp, Homo sapiens
ctttgaaaagggggctgggtgcagtggccgacatctgtaatcccagcactttgggaggccaagacaggcgaatcacctgttgtcaggggttggagaccagcctggccaacatggcataaccccatctctactaaaaatacaaaaattagctggacatggtggtgggtgcctgtaatcccagctacttgggaggctgaggcaggagaatcgcttgaacccgggaggcggaggctgcagcaagctgagatcgcaccatggcactccagcctgggcaacagagtgagactccatctaaaaaaagaaagaaaagaaaaaaaaaaaaagagtaagtgggatctgtgtgaggagctggtgtgcagtgttcttggagtaggactgtccccagatggagaaaagccggccaggctgtgccagcctctgcagcctgttttcatctctacagctgtttcgtctcgccagcagagcccagggatggtaccaagtacactgtgagagctgatactggagttggcagatgccctggggcaggcgccatgcagaacacacagaagtggggttagtgaaaaggtcccttcgaattccatttcgtttcccttaaaaaacaaaaacaaaaaagcccata

SEQ ID NO: 274510 - DNA, 2742 bp, Homo sapiens
tgagatggagtcttgctctgtcacctaggcacgatctcagctcactgcaacctccacctcccaggatcaagcagttctcctgcttcagtctcacaaatagctggggttacaggtgtgcactaccacgtatggctaaattttttccttttagtagagacatggttttgccatgttggccaggctggtcttgaattcctgacctcaagtgatctgcccgccttggccttccaaaatgctgcgattatataggcgtgagccaccacgcccagctgggaatgtttttaaattagtattttcacatgccattccactgtctcctagcttaaattgcttctaatgaaaacttggtcatcttcactgtgttatctttagtttttagcattcttgtttgtgatataccactgtgcattttctttatatttatcctgcttagaatttacagaacttctttgacctgaacttgtatctttaatcagttttggaaattttgggctactatattttcaaatactgttttcactctactctcttctctaggaattccaaatataaatatatatatacacatatatacatatatatacacacatatatacgtgtgtatatatacgtgtatatatatacacgtatatatgcacatatatgtgtgtatatgtatgtatatacgtgtatatatatacatacacacacacacacacacacctttcatcaagtcctatgtgtctaacactcttgtacatgtttcagtatgggtagtttttattgacttatcttctggtttcctaatcctatcttctgctgtgtcttatttgttatttttttatgttttttaatttttttttttgagacagagtctcgctctgtcgccaggctgaagtgcagtggcgcaatcttggctcactgcaacctctgtctcccaggttcaggtgattctcctgcctcagcctcccgagtagctgggactacaggcacctgccaccacgcccagctaatttttgtattttcagtagagacggggtttcactatgttggccaggatagtcttgatctcctgacctcatgatccacctgcctcggcctcccaaagtgctgggattataggcgtgtgccatggtgcctggcccttatttgttattaaatcaatttaacaaggtcttaggaaactataattctcagttctagaatctccatataattattttgtgaattccaattctcagctgaaattcaccatgttttcagcatattaatcacagttacttgaaagtttctctgataacttgaattatcaagatcacctatgggtctattcccataattggtattccttctgttttctgattatgtggcaccgtcttttggcagaatggcatttttgcctccgtcatggagccaaaagcttcagatattatcttatataaaggaaagttcaaccttcctactgctggagagataatgtggtggtttaacatttaatcagcatctatgctgagtcaaggctggtttacagtctttaagtaagatttagtctacctgtatgccttagccatccacttttcaaactaaaagacctacatattctgtggagccattacaccagttaccctaaaatccagtgtatgccttctaagactgctgaaaatgccactttttactacatttccagcctcttgtccagcagaagtccagtattcaaccaaagcccaaaggtgaaagcaggccatatgcttgaggcatcccaaatatctgccaaaaactctgctgactttttccatcctactcctagctgctctgaactagattttacactgcatccagaattagcagattccctaggggcaaaacacaactacaaagctacctgccttatgagattcttacctctccagagacatacccgcagttggttctctttgattctctggtgcattcaaagagatgactatttgatcgggctatttagttgttttagctaaaagcactaatctactgccagctgtcccaccctacctgcaaacaggtgctttccatgtactactttaagtgattcaataaatgtcacaaattcaaggccaaagccactttttcacttatgtaccatttttgttaaaggcttatcaagacactctttatgcacaaaactaaatgccattgatcataataaaaacatgcatataatcaattcattccccaagaaatatcctatttcactgaatctaataggccgatacttgtaaaaacaatttatgtactaataaaaaagaaactagactgaaatcaggcagtctaagaattcccaaataaagctgggacactaaatggtaatcagcaactataagacacattatgtaatttcaagtaaaaaaaaaagactgtgatgaggtgtctaaggaacaccttcaaataaagcttagacaccaacccattctcacagttaaaatgagaaataaaccacaccttgcagatagaaaaaattcttgtttcaatactgccactgggtataaggaaaaaaagcatcctccaagaattaaatgataagctaggattcagtccggttcagaggcctgaattcatgctacctatgtggtctaaaaaggctcaagcagagtatttaagttaaagttaaatggcactcccaagtgactagtaaacaagcaaattcaaatctttgaaagaattcaaattctgtcagcccaacagcaaatttaagatacatttttatttcagagatgttaaaatacc

SEQ ID NO: 274511 - DNA, 508 bp, Homo sapiens
atttgtttcatggtttataagaaggagtcacctgtgttcccatcagtcagtcatattcaatttcttctagggacacatgtctcttctcccaggccaggagagttgtgaggcaaggcagggcagaattactgttcagctagagagtatcaaaaatgaagaaatcctccactgccgcttttcttaccgctgctcctcctcagctgtcttccatgtggtattaactctgaaatgagctgggctcacctcagacccaggagaaggaagagggagctgcatgattttaagcaaagtgtcagaagaaaatatgttcttatttagatgtggaagtataatgtgcatatgaatagggaaagagcatttcacgtaaacatgaatttttttaagaatgtaacattttcttaaggttaatcaggaaactgacatataagctaatataattttgagagatagattttagagtagctttcaatgcaaccaacactcaagaaacacacacaggcacaaagag

SEQ ID NO: 274512 - DNA, 148 bp, Homo sapiens
tttttaacaacattagacaagtcctctcaaaggcctcatttcctaaccacgcaacgacaaacacactaaaataaaatgaggtactcacctaccttccacggatatttggaagaataaactttttgttactctaaaacacttcgggtca

SEQ ID NO: 274513 - DNA, 289 bp, Homo sapiens
aggcatttgaaagcaggtacttattcctagctaagctttccttctctaggcctgctttcaggtctttcagccatccctcctattgcttggtttcccagccctgcatccttctaattgccttcttctagacatgttctgatttgttgttctgtttgttctgagctctgaggtacccagaatgaggtgagagactgtcacagcccttgacagagacccatgccaccttttagtgaaattggctgtttcgatagccttaaaagggtcgttcatttatttcaagtttaatcga

SEQ ID NO: 274514 - DNA, 424 bp, Homo sapiens
atcgcttgaacccggaaggcagaggttgcagtgagccgagatcctgccactgtactccagcctggtcaacagagcgagattccatctcaaaaaataaaatagaataaaatcaaataaaattcagagtaagcacacactctgggatgtaagagcccacacaccaaatcccactgctaccatgaccaatggcttggtggctaaagagggtgtaagactgggcatggtggctcacacctgtaatcctagtactttgggaggccaaggtgggaggattgcttgagctcaggagttcgagaccaccctgagcaacatggtgaaactcaatctctacaaaatacacaaaaattagccaggcatggtggcctgggcctgtaatcccagctactcagggagctgagacacgagaatcacttgaacctggaag

SEQ ID NO: 274515 - DNA, 795 bp, Homo sapiens
gacaccccccaccaccccacccacccccccccccctccccccccccaccacccccaccgaccctatacccagcctcaacgccgctaccccgaccgccccctggcggcttggctgcaaactcccgcgcacgaggaataaaattcagagtaagcacacactctgggatgtaagagcccacacaccaaatcccactgctaccatgaccaatggcttggtggctaaagagggtgtaagactgggcatggtggctcacacctgtaatcctagtactttgggaggccaaggtgggaggattgcttgagctcaggagttcgagaccaccctgagcaacatggtgaaactcaatctctacaaaatacacaaaaattagccaggcatgtagctgggattgcaggcgcccaccatgacgccccgctaatttttttgtatttttagtagagatggggtttcgccacattggccaggctggtctcgaactcgtgacctcaggtgacccacccgcctcggcctcccaaagtgctgggattacaggcatgagccaccacacccagtcttagtcatcgtaaaggctggcagcactgtaggaacagacagacctcaataggaaacggggaaacccttcttgcagactttctgtattgctgggtagtgaggggtaaagtatttcccaccttaccccacttaatcctcatctctctggccagagtaggagcaaaacaggaacagagacaggctccagcctgggtgacgaagaaagactccatcaaataaataaataaataagactaatacatg

SEQ ID NO: 274516 - DNA, 322 bp, Homo sapiens
gtgaacctggccagaagacagtgtgttgtgacagatgattgctggtgagggggtaacagtctccaaggtgtagatgttgggggctccagatacggcaggaggggcctggcctctcggaatcccctcagccccatctcatagaaacatgtgctttctacccaggctccatactccggaagggaggcaggaccctgtcactttcttggcctactttggaagttctcagtcaggtatctccaggtgtggcagaggggctttggcctgtagggggtgtggtaatgtgggttttggaggcagaaagcttttcaggaaagccccctgg

SEQ ID NO: 274517 - DNA, 481 bp, Homo sapiens
tgcacagagaggatggtcactgattcagtgaccttaagctggaattttccatcacaagacacatgagataaaggcgagacatatgacaagggatggctggctggtctgcagaggaggcagacacacaggaagggctaagacaggtgagtgaacctaggtcatgccctgtgcctgggtcacactgcaggcctgtcatgccatggtcccagtggtcacaggaggcagacactgttcctccccaatgtattctatctaaattcctccatttaacatttgaaaactccacctaatatgctcagaagccatttctgggactacgagacaatctcctatattgtttgactaacaaacaatgtgcctgaccttcctgggcttgtaagtggtggaacaggactcgaaactaggtcggctccaagcccagtccgtaacaccacccaacgctggtgctctttccatggtgggtgagaaccctggagggacc

SEQ ID NO: 274518 - DNA, 355 bp, Homo sapiens
caaccaaacccaggttcaattgctcatggctccaaagccagactagaaagacaagaggtgatgagaggaaaagcaggtttattcaggagccagcaaactgaggagatggcaaactagtgtcacaaagactatctcaggttcttcaggctggccaaaggagttttaaaggaaaagggacttgggaaactatgtgcaggtcagcatgtcttgttccaatgattatcttaagcaataggcctcctggtggtctgactggcatcagctaaactgcagccagattatagattaactgattacagattaacatttacttccaggggtacgctggggaatgttttacaaccttggttttatc

SEQ ID NO: 274519 - DNA, 282 bp, Homo sapiens
tccttgatatgctgtgatgaaaatggtatttcacttctgtgattgcccccccccccgaaaaattcataaccccactccaattatgaagaaaccagcagagaaatactaatcgaggattattctacaaaatacctgaccagtactactggaaactgacatggtcatcaaaaacaaggaaagtcaaaaactgtcactgcaaagaagagcctaaagagatatgccaactaaatgtaatgtcatatgctggttgggatcctggaaccaaagaaaaagaacatgagg

SEQ ID NO: 274520 - DNA, 220 bp, Homo sapiens
agaggccttccagaacctgagcattgtgtttttctttttcaatactttagtaccttagaaaccagaaagtgataaatgaggagagtaggtatgaagtagaagaggattttgatggccagctcgtaaagtgtagcgttaagtgaaacattgtgatgtgaacaatttggtatttttgaaagtcctaatgctacttgtaccaggtgaaatgtttaaatctctc

SEQ ID NO: 274521 - DNA, 406 bp, Homo sapiens
aacctccagtcaacatgcggtaaaaagccagagcccttagtcacacagccacaaggaaataaattttgccagcaacctgaaggagcctgaaagtgaattcttcctcagtcaaatctcagatgagatcccagccaggctgacaccatgacagcaaacttgcagttttgccttgaattctgacctataactgtcagataatcaatatgtgttgttttaagttgctaaatgtgcagtgatttgttacacagcaatagaagatgaatagacctgctctaaaattcatattctgctacatacttgatgagactcagcacctatcagagagcttccccagaagtgagcagatgctgccatgcttcctgtacagcctgcagaactgtgagtcaaataaaccttttttcttttt

SEQ ID NO: 274522 - DNA, 416 bp, Homo sapiens
ctgcctgactgatctgtggctgtggcaagtggaaaactcccttgaggatgatgcacttcttgatgtttgaggcaggaatgttgatcatgagcaaccatgaagaccaggcccaaagtagggaggggacaacggggatggccagggaaccagccgccatgcttacaggccatgggctagggaaatggccgagtcacagaacacctgcctcctgagcccctgcttatagcaaagaatgaagcatagagccagcagctctggcaaggggcaatggtgagtggggctttaagcttggagaggtcagggatcatgcatgaccccttgttcactcatatggaccaaatgatggcacagagcaagtgctcaatgatgtgcgcccctgagtatctgtcactggaggatgtgatgatggcaccaca

SEQ ID NO: 274523 - DNA, 461 bp, Homo sapiens
tatattctcctactattgattcctttacaactatttcaatttaagaagaaaaatgtcagatagtgtgatatgaatcatgtttgagaaatatttccttgagagtttgactagtgcaacaaaaaatatctgtaagggacaatgaatgttaaaaatggttttattcctgtgctcgagcaaaacctactctttttatgtattctcaattttcagccctagaatgtgttattaacttgaaagaaaaactctcccaaagatctaaaagttatgctgattttttagaaataactaaaggttttcaagactaccaaaatttcaagctacatgggacaattaccaatgtatggtgtgtgaggggaagactgtagtaagtttagatgtcactgaatatttttcactaagggatttaaagcattttatactatacaaaacaataaaatgtctattttattttcaaaaattta

SEQ ID NO: 274524 - DNA, 280 bp, Homo sapiens
caacaattttcatttaaagacattttagactctactgcattaaactgatgcagaaaatttgtctacacagtctcaaagtcccttatggaattcattcagctaattcagagaccagatatggcatacaaattttatatactgatcaatcatacttattagtatatagattacagtggttagaaatattagtctagcagaaactaatatacacactacagtccaaataaaaagaatcctgtcaaataagcttgatgtaaatccacatgaaaatcaaggctgc

SEQ ID NO: 274525 - DNA, 126 bp, Homo sapiens
ctggcagtcaccttgctgaagactgggggttaggagttgcttccctggagctgccctggattgctctttcttggagagattttagtgaaactggttttccatgggttcattgtgcagcgcctttcg

SEQ ID NO: 274526 - DNA, 413 bp, Homo sapiens
acattcattgagctctcattgtctgggtagagtattacacgttgcatactacaaagcaggtgacaaatcaatgccaaataagtacagtcatcttctctagttctcataagactatctccccgccacctatagttagtaccctcaagtcctcctgagctgtgatcagagaataaacatttctcaacaattttaccaacaatttttaatgaaaaggaaaattatacttgtgattctcgtagtgacatttatattacatgttccatttgtgatattctataataagtattatattgagaaagtcaacaagcacctctttacaaaactgttatctgatgtcttcctgcatattaaggatgaatctacagaattagatcaataaggatcaacaaataaatatttttggtcattataat

SEQ ID NO: 274527 - DNA, 197 bp, Homo sapiens
gggtctcactctgtggctcagactggaacgcagtagcgtgatcatggctcaatgcaacctccacctcccagggtaaagccatcttcctacctcaacctccagagtagctgggaattcaggcttgcgacggcacacctgactacattttgcattttttatagagatgggatctcactatgtggtccaggctggtctcg

SEQ ID NO: 274528 - DNA, 1417 bp, Homo sapiens; identical to SEQ ID NO: 21

SEQ ID NO: 274529 - DNA, 227 bp, Homo sapiens
aatgcaggagtcaatgactggtatgtctcagccttgtgccatctgggagggacctggttccatcaggtttcacctcagctcccttatcgtgctgctaagctctgaccccaacgtgagtctccctgccgcagaccacatgggcaatgctgggtctcgagaaggcactttggtgtctgaacaaggtagatctgctggcttctattcccaggccccaccccttccccagg

SEQ ID NO: 274530 - DNA, 503 bp, Homo sapiens
gttcgtaaatttgtctttctaacacatcaggagcctggatttccggctgaaatacaacaccgtgcattctccaatgtatagcctagctttgggtcaaaaatctaggacctgctgcaagaattactacgcactcaagttctctgcacactgagcacgaaggttcattggaaaggagactcttgtgaggccttgaagcacatccattcacacctaataattgtacagatatgaaaagtaacatcagagaagtaaagatttttctaggaggccatttaggttttgctctgtgctttattctatcacattaggctgccttattctctgttacctgcatatctatggtagtattaaaagtaagccattttcagtttgcgttaacaagatggatgtctgaaaaccaaatacaactggaaaattcaatccaagttactgaggtttgactgagatatattgattcttaaaaaacaagataataaactctaaatatccattgaaaaaattta

SEQ ID NO: 274531 - DNA, 395 bp, Homo sapiens
tttttgacagtagcatgaattagtgaaaagtccttgaataatagaatggttttcaaataactcagacaaaatgaataaaatatttatattaaattattgaaggttcttaataaagacatgaattatctgttattagtaaaagaattagctatatgtaagatgatgcttagaaattaccttcaccctagctgcctaaaggaagaaaggcctgtagtccctgggaaataaataaattaatgggaaataatatcttcatctatttgtgtcttaactcctctaagcactatttgatagttttcagtgtagacttaacccatctttcattaaatttattcctagatactcatatcttttgaaagtattgtaaatgtcattaaaaatattttttcattttc

SEQ ID NO: 274532 - DNA, 264 bp, Homo sapiens
aaatctaagccctaagaaaccttgctcgttcactgttctagtgtcttcccattgcctagaacagtctcccatgcccagtagatgccaaggcatttgttgaatcaacgaaatgaagtagaatgaatggataaaaggagtagtgaccagaatgagggagacttcataggcaggaccagcagggcttgctgactaactggattttgagatgagggggctgagagaagtcaaggatgatcccaagtttctggcttggggctgaaggga

SEQ ID NO: 274533 - DNA, 327 bp, Homo sapiens
actctcctcctcgagcaggttaggctggtgcagagggtctccattctactaaggccttgtctggagccagaacacagagggccctggcactgcacactcctctttgcacagaggcagtgcttatacagcaagtggcagatgcacacggggcagaagcccaagtgagttcattctttcgcaaatatttttgtagttatttattaacatactcattaggtgatacattcaggtgtttcaaacattaagaaagcatgaaagtatatggctgggcacgggtcgtcacgcctgtaatcccagcactttgggcggctgaggtgggtggatcac

SEQ ID NO: 274534 - DNA, 720 bp, Homo sapiens
  misc_feature (27)..(27): n is a, c, g, or t
  misc_feature (81)..(81): n is a, c, g, or t
  misc_feature (83)..(83): n is a, c, g, or t
agacctagtcttgaacctctgaagacnacactttgtaatttgttgtttggctaaatgagaagaaatctgtgccaccctggnanggtgtcaaaagaaggaacaaacttgctggatctagtgtacggaaacctgattctgggttcctttgggaaggagcattacgggcctgctcctggaccacctcatatcaccagcaccctctacccaaggtcctggagccaacactggagtaaaagagcacaagagaactccttagaggtggaaggactggcgcatctcatgagagctaagcatgacagatatcaacaggcgggcttcctaggatgatttctcagccaacagtccaagaccttttgttgatttcagccccacttagccaagacctcaagtataaattctgataattatggagaaatcaactgctattttataccgattctgttaaaaaaaaaaagttttgtaactattaaaataattttctgaaaaaaaaagaaaaatataaaaattagctggatgtggaggcacatgcctgtggttccagctaccagggggctgaggcatgagaattcttgaacccaggaggcagaggttgcagtgagccgagatcatgccactgcactcccagtctgggtgacagaggaagattctgtctcttaaaaaaaattaatatatcaatcattttgaattgtaatctttctgtaatgcttccttttaacattt

SEQ ID NO: 274535 - DNA, 648 bp, Homo sapiens
tcgctcacgctgggagctgtagaccggagctgttcctattcggccatcttggctcctcccccctggtttggtcttttccaagtttattggcgtagtgctcctggaccacctcatatcaccagcaccctctacccaaggtcctggagccaacactggagtaaaagagcacaagagaactccttagaggtggaaggactggcgcatctcatgagagctaagcatgacagatatcaacaggcgggcttcctaggatgatttctcagccaacagtccaagaccttttgttgatttcagccccacttagccaagacctcaagtataaattctgataattatggagaaatcaactgctattttataccgattctgttaaaaaaaaaaagttttgtaactattaaaataattttctgaaaaaaaaagaaaaatataaaaattagctggatgtggaggcacatgcctgtggttccagctaccagggggctgaggcatgagaattcttgaacccaggaggcagaggttgcagtgagccgagatcatgccactgcactcccagtctgggtgacagaggaagattctgtctcttaaaaaaaattaatatatcaatcattttgaattgtaatctttctgtaatgcttccttttaacattt

SEQ ID NO: 274536 - DNA, 339 bp, Homo sapiens
tatacagctgtgagcccatcaccatgtgggaggtctgttagctcacttcagcatctttcaagtaccagttctggcctacctgcacattctggtgagtttctctaccaactgctggccactctacaaaccatctctggcctgtgtgctctggtgaattttttcactattggcaatctttagatttttgtggctgctgggccatttccaatgaggactatgtgtctggtggttattgggggctcttctacatttttagttccttcttgtccctatgtattttccttcagccctaaaagtggggcttcctgtatttgctagtttaaacatatcccttacagt

SEQ ID NO: 274537 - DNA, 327 bp, Homo sapiens
tggaaaaccaaatattgtatgttctcacttataagtgggggctaagctatgaagacacaaaggcataagaatgatataatgaactttggggactctgggggaagggtggaaaggggtaagagataaaagactacacattgggtacagtgtatgcagctcgtgtgacaggtgaaccaaagtctcagaaatcatcactaaagaactaatccatgtaaccaaaaaccacctgttccccaaaaacttgaatttttttaattttaatttaatgttaatacttttttcatgtctgtttttcttttaaaaaataataataaaggaagtaccatg

SEQ ID NO: 274538 - DNA, 267 bp, Homo sapiens
gaggcagtctccctctgttgcccagggtggagtgcagtggtgcaatctcagctcactgcaacctctgcatcccgggctcaagggagcagttagtatgattatttagcttctgaaagatactttatatccaaatcatatgaaggcttaatttacattgagcaattaaagattgatcttgaataattcataattcttccacagtagaaataaaatgattcctggctagttattttcttaaaaataaaaaaaatttgaaaacctcaacaa

SEQ ID NO: 274539 - DNA, 128 bp, Homo sapiens
ccagatcctccctccctctagacaccatcgtgtccatccagagcctccctccctctagacaccatcacatccatccagagcctccctccctctagacaccatcacgtccatccagatcctccctccct

SEQ ID NO: 274540 - DNA, 236 bp, Homo sapiens
tttttttttttaggtaagagaaaatctgaaaatgagacgtttcattcacctccatatctttactgctcagacacattggctgatatctgcttggctttacttccagtgctttctctaattgcagaggcatgtgaaggccgtaatctttagaagagccttcaaagccttgcatggtctggccctgcctgtctttccagcctcacccttgtgaccgtctccccttctgtcgtcttctc

SEQ ID NO: 274541 - DNA, 1484 bp, Homo sapiens
gaaaagacctgactttggggccaattttggttgttaaaaggtatggtagactactgtgtagtatttgtacctgaggagcaacaagaagctagaagttgatggagttgctaggcattaggtcaatttctatggaggatggatttggaggggggctgagggagtgtagcaaagaggtaatagccatagcacgtggctgagtattaaactattttaatatttctacaactatttatattgcatggttgagaatctgaaattactgttgatcagaaatttgtataggaggagatccttttctagtttcataagtctgtggtaggggaggagtggtttaagtagttaccactagaagatgattgaccagaagattgaacaggagtagtgtatgccagtagtacagttagggcagggtcaaggtagagactgtggttaaatctttgtggctgaaggtcactcagaggtgagaatttaagacggcaaaggtgttatcaatagttcttttaggaaaaaggaaaaggcttatccttgttttgtgttttgatttgcgaggactggtttaaactttgaagaggcaacctgagagtgtacttgtaccatcagtaatggactaaaaaggattatggtggtgctttattcatacttctcacttacttagggcttaattatgatttccatatgctttgtcaatttcatagtcctttgctcgtacatcctacctaatacatcataactgatttgtgagtatgctaatagtatgctaatgattgattagttcttggctactttgagggtgtatgtgtgtgtatttgcttttgattggactcagaatcttggagagtggagagattctacgatgttttaatccaatccattcacctttccaaagtaggaatacattttttagattatctaacagataaaattatttttcctctgaatacttcccaaaggagctcagttctctcggtgccattgcactgttggaaacactatgggctaggaattctttgttacatcaggtggaaatttaacttcccacaaaatgattccctttgatttggttcttttttctggtatggatggaatacaggtacttgaagtaggaaatctatgaacttgtaacctgttcacaatttaatgaaacacagaaagtgagagtgagcatttagaaattattataggaattttcaggctggaaatggtggctcacacctgtaatcccagcactttgggaggccaaggtgggtggatcatctgaggtcaggagtttgagaccagcctggccaacatggtgaaaccccgtctctactaaaaatgcaaaaattagccgggcatggtggcaggccccggtaatcccagctacttgtgggggactgaggcaggagaatcacttgaccctgggaggtggaggttgcagtgagccgagattgtgccattgcactccagcctggaggacaagagcgagacttcgtcctaaaaaaaaa

SEQ ID NO: 274542 - DNA, 133 bp, Homo sapiens
aaattataaaataaatacttattgaatgtgtcaggctcacagatgccattgtaccataacagaaagcattatgtaggaacgtgaagtttgtcaggtatgtagaaattgagatgcacatttttaaacttttggt

SEQ ID NO: 274543 - DNA, 501 bp, Homo sapiens
ccaaatagagaactagaatgctaatcaaaatgcctaggtaaaactgaaattgcaggaacaggccaatggacgggttcgagaggcattaaatctgacatccagagtaaaatcctagctctgcttctcactagctgtgtgattttgtgtgactttaataactctgagcctgggtttcctcatctatgaggctccttacctcatggaggtagcaagtattaaattaaaaagataatgtgtgagatacatttagcacagttccaaaccatggttggtactcaataaatagaagctatgtggtagctgagttttggtagatgacacgtgcctagggttcactctagttagaagctacaactttatacctggatcactgcccagccctggctggtggacctgagcctctaggctggctgtctgccttggtggagattaacttcactcttgggttgtgctgcagttcaaggtccatatctgagcaggctgagaaagccagggctgaga

SEQ ID NO: 274544 - DNA, 935 bp, Homo sapiens
tctgcctcaactgtggcaagctgggtcttccacgtcaccaagtgtcattttcaccgtgcctgtatggtccgctgttcatcctgttagcggaccccgaaatcaggcaggaaaataaagctcagtgggagggcctcggagcaagacaatcccaccaagatggactcgggttgattaacgtgagtgaacctctgaggaccagaatccagactagtaattctccatcccggctgctcgttagatgcccggaccgacccccccagaccaattcaatcagaacattcggaggggcttgtaaaatctcccggggagattccggtacgaaagccaaagactcagacgcccgttctccacccgcctgcagcggccagcgcgggtccctcttagggaattgaatgcaggccccaggcctcctcctcgagtatcccagtgtgaccgatggccagctcacaaacgcgcagtgggtgcggccgcgccagggcgcagcggagcagagggcccggccgctttcggcctgggaaagaggagccacggcccggagaggcgtcagtgctgggctgcgcctgcggaggtcctcgcaattgctggactcaaccgcgcgcgccccctaccggtcctgcgaaggagccgcagccgccgcgggaggccacaggtgaagcgaagggtgtgtcttacttcagcagccctattcaaaggaaaaaacatgaaaattaaaatcaagttacaattttgtattggcataaaacatatcagcaaataagatgtctgaaaaggagggtatgtcagaagtgctagaggatactattagtcaatttaggaaagaatctagatcacagtcaatgaaggagcctggctttattaaagaaacatcaaatttgataaacgaagcttctgattacctggaagggaaatcttctaaccagatttatgaaacacat

SEQ ID NO: 274545 - DNA, 334 bp, Homo sapiens
caggctcataaagagcacagtaagttctcactctggggctgctgattccactcagaactgacaggccaggccccaggcttcagactgttcctggcttgaatgtaggatttcatcagggactcacccctttccacccagaagcccatctgcctcctgccacaatcaatcatgttgtccagggtacccactctgcttgtgggaggggcacctgcaaggtcacacagagggacccatcggcctccctctcatgctcctcattccccaaagtccagagggggctgaggtgacagggggctggcaggtcagtgctgccccaagcatgggcacaccccac

SEQ ID NO: 274546 - DNA, 288 bp, Homo sapiens
ccagctaatttctgctatgccttttgagtagtacctgaacagtcctgatatggctgtctcagatgcacagcccacaccttgttcatggaagacactcaaataccctttgcttctgcaaactctgggagtgcaaccacctctcctagatccaccaacaaaacagccagcaagcctagatgctatcatgtctgatgtcagatgtggttcagacacaaatctatttgttccccaaactgcacagactgctgaggacagatgtgaagccctctgtctgcctttttaaagtcc

SEQ ID NO: 274547 - DNA, 240 bp, Homo sapiens
ccatctaatacaactgtggaaaggtctatgaaggagacttgatctagattgggaatctcaagtggtaaacctaaggaagcaacttttgagctgagctaggagttaactcggcaagagggaggagaggagagaggaagaagaatgccaggcggcaggaagagcagagtgacttcattggtaagacagcgggcatcctgggaaagagccagccaagtgaggcaggaaggagggccttcttca

SEQ ID NO: 274548 - DNA, 442 bp, Homo sapiens
actggagagaaactacaaagctggaagacatcacagtaattctgacaacacctcaaacttttctaaacataaaataaatcatactggtgaggaactttaaaaatgcgaaaaatgtgacaaaatctttaaatgattgtcacacttgattgtaggtaagataattcttactagaaaaactcttacaagtgtgaagaatgtggcaaaatttttaatgaatactcacaccttattgccaggaaagcatttatacttgagaaaaattgtaccaatataaagactgtgaaaaagccattaatgtctgctcacatcttactcaacatcagagagtacttaaaaaaagtattataaatttaattactgtcaaaaagtatttcagaaaatataagcttttaaagtatttattttgaagacaaacattacaaataaaagagggttgtaatac

SEQ ID NO: 274549 - DNA, 196 bp, Homo sapiens
cccaccccaaccttatcctccactgcttttcagaggagtctggccaacacaaatcctcttgtttgtttgtctgtctgtctgctgctcctagtctctgcctctcccagtctctcagcttccgtttctttcttaaactttctctcagtctctgaggtctcgaaatcacgaggcttcgacccctgtggaccagatgccc

SEQ ID NO: 274550 - DNA, 665 bp, Homo sapiens
tctagaggaacatctgaggctgcgcaatctctaaggaaaagaggtttatttggctcactgctctgtgggctgtacaagaagcatggcaccagcatctgctcctggtgagaggctcaggctgcttccactcatggcagaagcttgctctggctaacaaccactatcatcaaagttgtctgaggaagacctcctgttgctgtgactgacgggactcttggtggaagccctattcccatgtgcccatggctgcagctccccaaggaagcaggacattgttggattctctaagaagctcagaggaagttacttctcactgtggtgccatatgggatttgaagtcgttctactcatgctctgtttttcaataaagctgcttctgcctctgtaaaaaaaaaaaaaaaaaaaaaaaattggcggccgctggggctcctgggcatcctctctggggagctgctggccgcttagcgttgtttgatttttgaccttgacatagtagataggcttgtggtttttttaatttaaagatattaagacttaattcactaaaatttattctaaggggatatttatacttttatacttttttaggtatcgtattttatcagcttacagtttaatgcctaagtttcccctggaaatagcaaataaaattgtgtatttatgaa

SEQ ID NO: 274551 - DNA, 606 bp, Homo sapiens
tctagaggaacatctgaggctgcgcaatctctaaggaaaagaggtttatttggctcactgctctgtgggctgtacaagaagcttgctctggctaacaaccactatcatcaaagttgtctgaggaagacctcctgttgctgtgactgacgggactcttggtggaagccctattcccatgtgcccatggctgcagctccccaaggaagcaggacattgttggattctctaagaagctcagaggaagttacttctcactgtggtgccatatgggatttgaagtcgttctactcatgctctgtttttcaataaagctgcttctgcctctgtaaaaaaaaaaaaaaaaaaaaaaaattggcggccgctggggctcctgggcatcctctctggggagctgctggccgcttagcgttgtttgatttttgaccttgacatagtagataggcttgtggtttttttaatttaaagatattaagacttaattcactaaaatttattctaaggggatatttatacttttatacttttttaggtatcgtattttatcagcttacagtttaatgcctaagtttcccctggaaatagcaaataaaattgtgtatttatgaa

SEQ ID NO: 274552 - DNA, 589 bp, Homo sapiens
attgtggggtatctcatcaaacaaaggaaaatatagggttaacataagattttgctaaagagtggaatttaggtgtgatgtaaatgaaatgatattctatgggctctaagaaagtatggttgtgtataaaaggggtcaacctcagctctgtactgtgaaatggacctatggttcttgtcttagtccattttgtgttgctctagaggaacatctgaggctgcgcaatctctaaggaaaagaggtttatttggctcactgctctgtgggctgtacaagaagcatggcaccagcatctgctcctggtgagaggctcaggctgcttccactcatggcagaaggtgaggggaggtgtaatgtgctaagatcatacggtgagagagaaagcaaggagggaggagggaggcgccaggctctatttaacaaccagctctcttgagaatgaataaagcaagaactcactaactgttccctacccccagggagagcattaatctattcatgagggaccctccctgataacccaaacgtctcccattaggccccacctccgacaccttggtttgagggagacaaacattcaaaccatagc

SEQ ID NO: 274553 - DNA, 452 bp, Homo sapiens
cattgaaaataccaaattattttccacttatctattgttacccacaagccactccaaaacccagtggtttaaaacagctgtttattgttaccaccagtggttctttgggtggactgggctcagcagggtggtttttgctgagggctccggtggttgcagtcagatggcagctggaggtggagcaacctgatgtcgtggttttgcatccacgacagcttctctcagacaagtgatcctagccattactcaaagcacagcctcctggaagagcttgttcttctcacaccatggcttctggcttccaaaaggaattattcctagaccaatctttccaagagggaggggcttctagaaggttagtggcaaagttacttctaccatcttctaagtcaccaaatcagtgtaggactcccacaggctaaaggagattaaaaaaaatgaactctaaatct

SEQ ID NO: 274554 - DNA, 472 bp, Homo sapiens
tggtcagaaagatggttgaaaaatatcctaagtgccatctagtgagaggtgcctgtgcagcgagcagtaaacatggaagcactgagggtcttatgcagaaactaatagaagatacatggccaagagaaaattaaagcttatttacttggtatactagcccaaactctttgccaaagtttgagtaaaaagactattgttttaaaaaatcaaaataaacctaaggaaaataaagatttgctatattggcaatagtaaatcaacctccaaaccctaagaaaagaggcttctaagaaaaggttctcttatgggtataaagattgagatggggttagcagggcatggtggcacatgcttgtagtcctagctgaggccagaggattattcgagcccaagagctcagggttgtggtgagcttggttgcatcactgtgctccagcctgggcacagaatgagaccctatttttaaaaatta

SEQ ID NO: 274555 - DNA, 264 bp, Homo sapiens
ccccccaccaaaaaaagaaaaaagaatcaagcctattcatcccaccactatgggcccaaatgtcttttcctcctcccgctccccactctgctgtatcaacggaacagcatctctcgccagctgtcattcactaccctcaccgctaattactgctcctgctaatcctctgcctcaaagcctatcaaagctgtcccactctctgccatccccacacaccctgtcctagtctttgtccttggccagtgtggctcctgcagccctggc

SEQ ID NO: 274556 - DNA, 4749 bp, Homo sapiens
gcgggtgttcggctacgtcactggggcgctacggttcctggagctgggcagtcttctcgtcagagtggggactggtaagagcgacctccccgccaggtcctgtgtgttgccggctgaagaagggatgatgattattccccaccttctaagagacaaagaccaacgagccaccacagccaccagtcccagaacccgccaatgctggggaatggaaaatgagggagttcaactctggccctcacaatccagtggaggagacgaaactcatctgcctctgtccctctgggcacacctcatgccaggtgcatctgtggacaggggccatgctcctgggcttccaaagttggagaaagctgccaggctcagacccacctaagctgaagattcccttgagaacaagtactgtcctgtggtttcatggcctttcttccatttgtggttcttgcgaagtggaatttaaatgacatcttatcaagatggataaaccctggtttcccagtgctggaatatagaaaatggatggacaagtaaatcccactcagtacccataggccaggcatggggacctcaacacacctgagccccagacatcacctttcattctggacctaccatgaaagacttctgaatccaggaagagaaactgactgggcaacatgttattcagaaacaggaccttgccctgtcactcaggatggagttcagtggtcctatcatggctcattatagcctcaaactcccaggctcaagcaatcctaccatgtcagccttcccagtagctgggactacagctggatctaccatgaaagacttctgaatccaggaagagagactgactgggcaacatgttattcagggtctccctctgttgtccaaggctggagtgtagtagtgctatcacagctgactgcagcctcaaccttccaggctgaagtgattctcccatctcaacctcccacgtggctgagactacaggtgcttgccaccatgcccaactaatatttggaattttcatataagtggattccagaggggtgacagcaaaacgtgggaccatccagttgcaggaaaacaagcttaacacgcccactgattttacattatgctcctaccacccggcagcctctccaggcccagaactttctccagtcagcctctacagaccaagctcatgactcacaatggcctatttaggcccataccctacctcacggcagtctccgcagatgagcctactgcctcacaacagcctccacaggcacagctccatcattacaatggcctctttagacccagctcctgcctcccagccttctctccaggccctgaactttctgaagtcgacctcaccaggcccagctcatgcttctttgcagcctctccaggcccagctcctgcatcttggtggcccctccaggcccagcctctgcctcccgtcggcctctacagtcccaacatctgcctcatagcagattcttgaggcccagcatctgcctcactgtggaccccccaagccaagctcccaacctttcagcagcttctacacacccagctcctgccacccagtggcctctttaggccaagctcatgcttcacaagggcctttccaggcccaactttcgtctcatggcaaccttccctggccagattcctgcgtgtctcccagcagcctagacaggcccaggtcttgcctcacactggcctctctacatccagctcatgcctcacggtgacctctccaggcacagctcctgtcccagaacgtcatctccgggcccaaaacttactcgagtcagcctctctagtcccaactgctgcctcctggtggcctatgaaggcccaaaatctcctcaagttgacctctcccggcccagctcctgcctcctgtcagcatctacaggcccaacctctgcctcatgggggcttctccgggcccagctcttcctattggctgagtctacaggcacaactgctgcctcacaacagccttttttggcccagttcctgtccagttcatggcggccaatgtaggcccaaaacttcctcaggtcatactctccaggcccaccttctgcttcctggtggcatgaacaggcccagctttgacttgagaacagcctctgcaggccctgcacttgcctcccaggggcttttccaagcccagctcttgcctcatggcagctgccccaggccaaatttcttcctgcctgccagcagcctcaacaggcacagctcctccctcacagtggcccatttaggccccactcatgactgtcgggccatttccaggcctagtgcctgcctcctggctgactctttcttgaagcccaaaacttcctcaaatcagccttttgcctaacttctgtctactgtcggactctacaggccagcctctgcctcacagtggaccctccagacccagatggtgtctcactgtggcatcctcaggcgaagctcctgcctttcggcagcctctacaggcccagctcctgccttgcagtggcctctttaggccaagctcatgccgcatggcgacttttccaggcacagcttttgccttttgcagcctgtccaggcccagaatgtccttaactcggcatctccaggacgagcttatcctcccagtgcgtctacaggcccgtctcctgcctcacaacaacctcttttggcccaactcctgctgagctgctggcagcctctgtaggccacagacttcttaaagtaaagctttccagccaccttcggcctcccagcagcctcagcaatcaaactattccctcactgcggccaccgaaagccaagtttctccctgcctcatggcatcctccgaaaactgagcatttgcctcacggtggcctccccaggccacgaatctgcctgcctcccaggcaggtgctgcctcacaatggtctctttaggcccagctcatgctaaaagatggactctccaggtacagctcttgcctcctggcagcctctgcaggcccaaattctccaaaagttggcctctcctaactcagctcctgcctcatgtcggcctacacaggcccagactcttaccacacagtagaccctccaggcccaccacttgcctgatcatagcctcctaaggccaagctcctgcctttcagcagcctctacaggcccagctcctgcctcgcaattgcctttgtaggccaagatcatgccgcgaagtggcctttcctagcctaacttttgctttttgacgcatactccagtcccaaaacttcctccagtcagccggtccaggccaagctcttcctcccaaaggcttctgcaggccaaaatcatcctgaagtcaccctctgcaggcccagctcctgcctccaagtgctgtgtaggccaagctaatgcctcacagcacactttccaggctgagcgtttccttttgtgcatcctctccaagccctgaacttactccacttggcctctccagaccaagctctccctcccagtggcctctacaggccaaaattgtcctcaggtctgcctctccagggccacctcttagctaccagtggcttctgctggccaaaatcgacctcaagtcagcctcttcacacccagctcttgcctctgagtggcctctccaggagcaaaactttctcaagtcggcctctccaggcccagcctcctgcttcccgagggcatgtacaggcccagcctctgcctcacagcagactctccacacccagctcttccctgtctgcggcctctccagtccaaagctgctgctgccttttggcagcttgtacaggctcagctcctccctcacggtggcctctttcagcccaactcatgcctcttgcaacctgcccaagtgtcagctcctgtctcacactggcctgttgagggccagctcatgcctctcgtggcctcaacaggcccatcccctgcctgtcggcggcctctacaggcccggcctctacctcacagtgggctctccaggcccacctcttcctcaccgtggcctcctggggcaatgctcctccctctcgggagcctctgcgggcccagctcctgcctcccagtggcctctgtagaccaagcccgtgcctcagggcagcctttccaggcctagcgtttgctgctttgcatcctctccaggccctggacttcctccagtcggcctctccaggcccagctcttcctctcggcggcctctgcagggccagactgtcgtcaagtcggcctgtccagggccagctcctgcctcccggcggcctctgcaggcccaagtcgttctcaagtcggcttccccaggcccagctccggcctcttggcggcctctccgggtgcaaaagttcctcgagtcagcctctccaggcccagctcctcctgcctcccagtggcctctttcggcccagcccagctcttcctcccggctgcgtctccaggcccgactttggcctcccaacaacgtctttggactcagctcctgcctctcaaaggcctgcacgggcccggcctcggcctcggcctcacagcggactctccacgcccagctagctctcgcctcactgtggcctccccagtccaaagctcctgcctttcggccacttcagcaggtccagctcctgcctgccagtggcctctttaggcccagctcattcctcacaacggccttcccaggccccgtttttcccttccggcagcctcttggcctctaatttgtttatcttttgtgtataaatcccaaaatatggaattttggaatatttccaccatt

SEQ ID NO: 274557 - DNA, 2188 bp, Homo sapiens
ccggaccgtttgagctgtgaggcacaatgtcttcgtcggcattcggacgagcttatcctcccagtgcgtctacaggcccgtctcctgcctcacaacaacctcttttggcccaactcctgctgagctgctggcagcctctgtaggccacagacttcttaaagtaaagctttccagccaccttcggcctcccagcagcctcagcaatcaaactattccctcactgcggccaccgaaagccaagtttctccctgcctcatggcatcctccgaaaactgagcatttgcctcacggtggcctccccaggccacgaatctgcctgcctcccaggcaggtgctgcctcacaatggtctctttaggcccagctcatgctaaaagatggactctccaggtacagctcttgcctcctggcagcctctgcaggcccaaattctccaaaagttggcctctcctaactcagctcctgcctcatgtcggcctacacaggcccagactcttaccacacagtagaccctccaggcccaccacttgcctgatcatagcctcctaaggccaagctcctgcctttcagcagcctctacaggcccagctcctgcctcgcaattgcctttgtaggccaagatcatgccgcgaagtggcctttcctagcctaacttttgctttttgacgcatactccagtcccaaaacttcctccagtcagccggtccaggccaagctcttcctcccaaaggcttctgcaggccaaaatcatcctgaagtcaccctctgcaggcccagctcctgcctccaagtgctgtgtaggccaagctaatgcctcacagcacactttccaggctgagcgtttccttttgtgcatcctctccaagccctgaacttactccacttggcctctccagaccaagctctccctcccagtggcctctacaggccaaaattgtcctcaggtctgcctctccagggccacctcttagctaccagtggcttctgctggccaaaatcgacctcaagtcagcctcttcacacccagctcttgcctctgagtggcctctccaggagcaaaactttctcaagtcggcctctccaggcccagcctcctgcttcccgagggcatgtacaggcccagcctctgcctcacagcagactctccacacccagctcttccctgtctgcggcctctccagtccaaagctgctgctgccttttggcagcttgtacaggctcagctcctccctcacggtggcctctttcagcccaactcatgcctcttgcaacctgcccaagtgtcagctcctgtctcacactggcctgttgagggccagctcatgcctctcgtggcctcaacaggcccatcccctgcctgtcggcggcctctacaggcccggcctctacctcacagtgggctctccaggcccacctcttcctcaccgtggcctcctggggcaatgctcctccctctcgggagcctctgcgggcccagctcctgcctcccagtggcctctgtagaccaagcccgtgcctcagggcagcctttccaggcctagcgtttgctgctttgcatcctctccaggccctggacttcctccagtcggcctctccaggcccagctcttcctctcggcggcctctgcagggccagactgtcgtcaagtcggcctgtccagggccagctcctgcctcccggcggcctctgcaggcccaagtcgttctcaagtcggcttccccaggcccagctccggcctcttggcggcctctccgggtgcaaaagttcctcgagtcagcctctccaggcccagctcctcctgcctcccagtggcctctttcggcccagcccagctcttcctcccggctgcgtctccaggcccgactttggcctcccaacaacgtctttggactcagctcctgcctctcaaaggcctgcacgggcccggcctcggcctcggcctcacagcggactctccacgcccagctagctctcgcctcactgtggcctccccagtccaaagctcctgcctttcggccacttcagcaggtccagctcctgcctgccagtggcctctttaggcccagctcattcctcacaacggccttcccaggccccgtttttcccttccggcagcctcttggcctctaatttgtttatcttttgtgtataaatcccaaaatatggaattttggaatatttccaccatt

SEQ ID NO: 274558 - DNA, 435 bp, Homo sapiens
cagctcctcctgcctcccagtggcttctttcagcccagcccagctcatggctctcagcggccttcccaggtcccgcttttgacttttggcggcctcttcaggcccagaacttgacctccagtcggcctttgcaggcccggcctcctgcctctcaaaggcctgcacgggcccggcctcggcctcggcctcacagcggactctccacgcccagctagctctcgcctcactgtggcctccccagtccaaagctcctgcctttcggccacttcagcaggtccagctcctgcctgccagtggcctctttaggcccagctcattcctcacaacggccttcccaggccccgtttttcccttccggcagcctcttggcctctaatttgtttatcttttgtgtataaatcccaaaatatggaattttggaatatttccaccatt

SEQ ID NO: 274559 - DNA, 600 bp, Homo sapiens
ctacaggcccggcctctacctcacagtgggctctccaggcccacctcttcctcaccgtggcctcctggggcaatgctcctccctctcgggagcctctgcgggcccagctcctgcctcccagtggcctctgtagaccaagcccgtgcctcagggcagcctttccaggcctagcgtttgctgctttgcatcctctccaggccctggacttcctccagtcggcctctccaggcccagctcttcctctcggcggcctctgcagggccagactgtcgtcaagtcggcctgtccagggccagctcctgcctcccggcggcctctgcaggcccaagtcgttctcaagtcggcttccccaggcccagctccggcctcttggcggcctctccgggtgcaaaagttcctcgagtcagcctctccaggcccagctcctcctgcctcccagtggcctctttcggcccagcccagctcatgcctcccggcggccttcccaggccccgcttttgactttcggtggcctctgcaggcctcgacaaggcccggcctcctgcctccagaaggcctgcacaggcccagcctctgcctcacagcggactctccacgccc

SEQ ID NO: 274560 - DNA, 1270 bp, Homo sapiens
attaggttaaagtacacagagaataagcgagtgatccctccgccataggcctattctttccatttgttgcctcacagtatgcaaaaaaaaagtcccgcgaaatcggttatcaactttggggcccggaggaaaattgctgtggcgcatagataagactgaatggcgagaccctgagctataagtgcctactggattgttcttcaaccgcgtaggctgtcgaccgaagatgagccttccacttggcggaagaatctcacaggaaaggtgggattgagaaggtattcagatacttacaaagaaatttaaagtagttgaaggccataatgaatgatggaagagatgaaagagaaggtgactttgaaggacaaaggagtttagaggtgattgtgtgctctggacctgaagtattttgattgaatgaaaaagaaatggaatgaagaaattgaagatatgttcataaaggctagtgtttgacattacatcacatttaatccttaagaagaactcatgcctcccattttacaagcgtggaaacgtataatcagagaatgtttggaaacatataagggattatagatgcaaatcaactctggatgtcgattttcaatatacatattctgaatgtgattttaagtttttaaagttagtaacagaagaattacaattggatttataatctgtagaccatttaaaggaagggggctgctaaatgagaagaaaaaacctatccagctgaaagaaggcagaaatgggaacgagataagcaaaagaaaccagaacatatggtaaaaatgtttttcatgtgaaaagtccaaacatcagtatttacaataaatgtaaatgggttaatttcactcacaagttttaaaagacagttgggaataaaaggacaatccagctataaattgaccataagcaaatgcttacaaaacaggaagcttgaaaatactgggctaaaatatttaatcaaatggtagccaaatgaaagcagtatagcaatattaatacaattaaaagtatcaaaagagaaaggattttatattaaagataaagtccatgaagacagtatggtctcctgaactgttatgaatctaaaaacatggcctatcctaaggtgacgctatgaacgatgagaaattttacaaatttgacaatttgttttcagagtagaagacataaatatctcagaaatatgcaactcaaatgtaaaatataagggaagatatggagaacttagattatgtaattaaatattaatttgaaaaacaac

SEQ ID NO: 274561 - DNA, 1148 bp, Homo sapiens
actgatcgtggaacgtctaaagtccgccattttgaaggataaatgaagaaaggcgtggagttactggataatgacgttcattaaatttagagcaaaagagacctttaaatacaatgtataatgagatttttttttctccaaagtgggattgagaaggtattcagatacttacaaagaaatttaaagtagttgaaggccataatgaatgatggaagagatgaaagagaaggtgactttgaaggacaaaggagtttagaggtgattgtgtgctctggacctgaagtattttgattgaatgaaaaagaaatggaatgaagaaattgaagatatgttcataaaggctagtgtttgacattacatcacatttaatccttaagaagaactcatgcctcccattttacaagcgtggaaacgtataatcagagaatgtttggaaacatataagggattatagatgcaaatcaactctggatgtcgattttcaatatacatattctgaatgtgattttaagtttttaaagttagtaacagaagaattacaattggatttataatctgtagaccatttaaaggaagggggctgctaaatgagaagaaaaaacctatccagctgaaagaaggcagaaatgggaacgagataagcaaaagaaaccagaacatatggtaaaaatgtttttcatgtgaaaagtccaaacatcagtatttacaataaatgtaaatgggttaatttcactcacaagttttaaaagacagttgggaataaaaggacaatccagctataaattgaccataagcaaatgcttacaaaacaggaagcttgaaaatactgggctaaaatatttaatcaaatggtagccaaatgaaagcagtatagcaatattaatacaattaaaagtatcaaaagagaaaggattttatattaaagataaagtccatgaagacagtatggtctcctgaactgttatgaatctaaaaacatggcctatcctaaggtgacgctatgaacgatgagaaattttacaaatttgacaatttgttttcagagtagaagacataaatatctcagaaatatgcaactcaaatgtaaaatataagggaagatatggagaacttagattatgtaattaaatattaatttgaaaaacaac

SEQ ID NO: 274562 - DNA, 366 bp, Homo sapiens
tgggagctgtcagcagctgcttgcagctgctcagtgaaaagactgatggcagccatggccaggctgaggagatgggaggggaggagaagcatcccccgtcttcccacctaccacaggcacacacacagatgcgtgacatacactcagaacagtcttgcagcctcttgcattgatgtgcacctttccggatgacactgtcccaggaagtggagtgggggatatgccagccatggcctgaaaccagtgtccaagaggcagtggaggatgctggatagagcatgaggttcgacatcaggagaccaggatggaacctctcccttactgtcacctactgagtcagcttgaataaatgatgaacctctctgt

SEQ ID NO: 274563 - DNA, 796 bp, Homo sapiens
cagttttacacctaaacatatacacaatagtaattgatgcatacatacaactggggacatacacaagaatgtttattgtagcaccattcacaatagcaaaatcttgaaacaaccataatgcccaccaacaagatgaataaattatgatatatttacataatgaaatattcagcagtcaaaattaatgaactacatcaatatacagtactatgggtgactcccattaataaaagtgaaaaaagttacatcctaaaaggttacaaatagcataccatttttgtaatttgttttaaacataaaatttttcaggactataagtacaaaaagaggatgaacatgggatttcaaatgatggttatttggggtggatgaaaatgcataaatttcattgcagaaatattaatttatttgattactaatatatgtattatgtattaatgtatttttattagacacccactgagcatgtaatgtattatatgtattgcctactaaactccaaaatattactaatttcaaactacatctggatacagtggtttcagttaagagcttgtgaatctgtagaggcctggaatgaaaggcagaaatggagatatattttgaagataaaatggaggagacttgcagataaacttgatttgggggtgaagaagagggaaggatcgaggatgactgctaggttagctgggctaaaggtagtgtcctttcttgaaatggggaatgggaatgtggactacataggtttgggagggtaatcacattgatctggtattaataaatgcttaaatccgta

SEQ ID NO: 274564 - DNA, 571 bp, Homo sapiens
ataacctaggattgccaggccgtttgtagtgacttcaacctctagttctctctctcagtgtccccctccctcacctaaatcttggctgcaagagtgggaggaggggcagggggttggattgatctgggtattttagggatggtgtagcagaaggacaagacagtgatatgcctgcagaaagaatggagttgctgggtctccatgaactttgcagggaaggactaaagcctgaagggaacgtgctaagagagaaaggacagtattcaagagtaagtcttataggtaagagtggggactgggaggttacaagagtttgactttaaaagtgaatgattctgcataaggtcaagagtgtggtttggggtaagttgtcccaattgatgagttcaactaatgtttataattcatttttgagaatagccttgggataatggaagtggtagaggtctggacacagataaataaccccatttaaagtgagcatgacattgattccaggagaaattgtagaagcaaagatcagacctgaaagagatgatcatgtaggagtcaatatgggtgtgtttaagaa

SEQ ID NO: 274565 - DNA, 410 bp, Homo sapiens
ataacctaggattgccaggccgtttgtagtgacttcaacctctagttctctctctcagtgtccccctccctcacctaaatcttggctgcaagagtgggaggaggggcagggggttggattgatctgggtattttagggatggtgtagcagaaggacaagacagtgatatgcctgcagaaagaatggagttgctgggtctccatgaactttgcagggaaggactaaagcctgaagggaacgtgctaagagagaaaggacagtattcaagagtaagtcttataggtaagagtggggactgggaggttacaagagtttgactttaaaagtgaattataaacattagttgaactcatcaattgggacaacttaccccaaaccacactcttgaccttatgcagaatcattcactt

SEQ ID NO: 274566 - DNA, 503 bp, Homo sapiens
tgaaatcaaccctataaaaattatgctacaattattttaaaccctaacataatagtattatctttgatatgaatctgaaaatcaatttatttcttatcttttgatagatattcattagtatgttctatcctattttgttacttatattttggaaaagtttcttaacgttagaataatatttatacgtattaactcctctacttatccatttattcatcttatttattgtgtaatctattctaaaaatttcactggataatggtaatatcttagcaaagaagacaaatactgccattgcttccttggaattttcaatctggtagtaataagtataagagttttctgaatattataatctgatataatatactcagagaagatgttatagcagagcaacccagcactgaaaaactgttgtatgagctgaaatgtgattaataactaagatgttgagaaataataaagtctgtgaggtcaacttaacttggtcagacttaaaaaga

SEQ ID NO: 274567 - DNA, 486 bp, Homo sapiens
taggccctgtgggtgcagcccaaaccggcccacatgggctttgatgacagagccgaggatttgccttttgctcagaggaagggagggggcttcagggcggctctggggctgcagagtcagagcccaagcccctagcaggtcccccagcccgggaggcagagtgtgcagccagggcagcctctggacaccatcaaattgcacacaaaaacctggggcctccatgggaactgcagattatacagagtgagtggggaggagggcaggggattgaaattttattctttcttcctccttccttgaaaattccgatcactaaaagtaaaaacatacacacacatactcactcacacactcactcacccatgcacataccatcttcaacgcctgggctattccatctttgccaaaaagaaccaagatgttatctgtgaggtatgtctgcatgagcttagacaagaccaaacctacatcctctctccttgcaaa

SEQ ID NO: 274568 - DNA, 390 bp, Homo sapiens
accatcctggccaagatgatgaaaccccatctctactaaaaatacaaaaaattagccagacatggcggcacgtgcctgtaatcccagctactcaggaggctgaggcaggagaattgattgaacccgggaggtggaggttacagtgagccgagatcgcgcctctgcactccagcctgggtgacagagcaagactccacctcaaagaaaaaaaagattacagcatgcaattcactggagtttagatatccggttcattcttttctcaagatctgcctcctctatgctgtcagccaaggttttaggctgtttgttatctctgttttattctgcgtagtctccctggatgagctcaaagacatccatggtttcagttttcatctctctactttc

SEQ ID NO: 274569 - DNA, 441 bp, Homo sapiens
ggccctagtccaatataactgttgtccttataaaaaggggaaatttggatatagacacatacacagggggaatgtcatgtgaagattggagttatgctgccacaaaccgagaaactaccagaaggtagaagagaggcctagaacagatcgttccctagtgccctcaaaaggaaccaaccaaccctcccaacacattgatcttggacttatagcttccagaacagtgagacaataagtttttgttgtttaaaccacccagtttgtggaacttcattatggcagccctggcaaacttatatataatgtacaatcctttgtatatattactggatttgatttgctagtattttgctgagggtttttatagctgcatgcataacagatattggtctatacttctctgatatagtctggatatttgtccttgcccaaatctcatgt

SEQ ID NO: 274570 - DNA, 354 bp, Homo sapiens
gtggaagcacaataaattaatgaaagcacacttttatagctagagaattatttactcataagttaatgatgtggaaaaggttttattggtccgttgacttatagaaaatgagattaaatcttttatttctggtaccagacaatattttatttcagtatttatcacttgaaataggaaaaaatagcaataattggaagatacattataatacctttttgatttaatttctgaattctatgatctatcttccacgtttttccactgagtttttaactatattctagatgaaagaaaggggtattagtgtagctgccatcatctcatgcattttattctgagtttgagatctaatac

SEQ ID NO: 274571 - DNA, 419 bp, Homo sapiens
ttttatattccaaaccacaacacagctctccttgcagccaggagtggccatatgatggattctgactaatgagatgcaagctgaagttgctaactgggactcctaaaaacacttttaaaaagtgatggactcatgatctcttcacccttcttctgcctgtctcgaattgtccatcctcagacttcttgatacacaaaaaatttattttcggctaggccatgttaatttggttttccactacttgcagctgactgtactgattatctaaaactgctttataaagttttgtgactagggggtgggagcaatgatcactaatattcattaagtgaaaggataaatgattgaattgtgtatcttaattgtggtatattctgtacaacatttttacaataaattaatgttgaatgagtttattt

SEQ ID NO: 274572 - DNA, 216 bp, Homo sapiens
atatgttctactttttaactagggaattgataatctcactatgaagaactatgtagctagtcattctttccttctcagatgcatgcagtataacagcccctttttgttttcaaattactccattttgcctctctgtgcctttcctattcaggttattttcttcctatcagaagaaatgtaggatagcccagtttatttaaaatcgaatgggcactt

SEQ ID NO: 274573 - DNA, 245 bp, Homo sapiens
gtgtgatatatgtgggtgtgtgtgcatgtgggtgtcaatgtgtgtgcatgtgtgtatgcatttgagtgtgggtgtgcatgtgtgttcatgtgggtgtgcacgtatgtgtgtgtgtgtgtgttcatgtgggtgtgcgtgtgtgggtgtgcatgtatgtgtgggtgtgtgcgtttggggggtgtacatgtgtgggtgtgcatgtgtgtgggtgggtgtgggtgtgcatgtatgtgggtgtgcgtgtg

SEQ ID NO: 274574 - DNA, 332 bp, Homo sapiens
tgctcccactccctcacaggacccacacgggtggggggtggggggaattgtttaaaagcatttagttcctaactagctgcctcacccattatcttccgtttcttgtaatttaggaaacaaagaacaacatatagccagatcaatagcttatgttattttcatatgttaattattgctaaacaacttaggaactgccttttcttttatttcctttaaaaatccatttgtaactgttgctggtgggaccggactacatattcaggataactttaatctgtgctttgaagtttcaatcctcaagactggcccaaataaaccccctacttatatta

SEQ ID NO: 274575 - DNA, 452 bp, Homo sapiens
ttttttttcccacttttccttacgtgcctattttcttaactattttatcccctgcagcattcccataaagagaattacaacaaattgatgtatcttatttttaattgggaacttcaaaaaaaaggtttttgtagagaaagccttggcaatagttgctaaaatacagttgaattcttagaagacttaaaataaacatactatttctgtccccattattatgctaataggttgtcttttcatgcatggcattgaatttgtctcacttgtagcagtaccatacaattaatacagggtgactcacatttggtcttttcagagtaaaacaaaattttctgcactttaaaacaagtctcttcttgtagacagaaagattgaagggaaattataaaggttaatcatattataagttcaggttcaatcactagtaaaaatggacatataatatgatatgt

SEQ ID NO: 274576 - DNA, 652 bp, Homo sapiens
ccaccttggcctcccaaagcattggaattacaggtgtgagccacctcactgagccctccacctttcagctgaacgcagaaaaatacaatcttttaacccaaagcgttcctcacacttagggtcaggaagagcccttcatgccctggaggcaactactaaccctctgctaaacactctgactctgggtgtgagaaacacacctactgtgccccacatatttttccaaatacaacttaatttagccttcacgacaaccctggagtgaaggatcattaactttatttcatagatgtggaaactgagactcagaggcaggaaatgacctccttctggaggctgcaaattctttgatgctcctttgatcaacaggtgggagctggccagaggtggtggctcacacctataatcccagcactttgggaggccaaggtgggaggattgactgaggccaggagtttgaaactagcctgggcaacatagcaagacctcatctctacaaaaaatacacaaattagcagggtgtggtggtgcacacctgtagtcgcagccactcgggaggctgaagtggtagcattgcttgagcccaggaggttgaggctggagtgagccatgatcaagccactgcactccagccgaggagatggagatagac

SEQ ID NO: 274577 - DNA, 263 bp, Homo sapiens
ggtgcagcataggctctggtcaacaagacataagtggtccctgtccgtatggagattgcagtgtaatggaggaaaaaggccataaacgaacgaaaaagtaagcaagcaaagccccatacaaatatacatactttaaaaaaaattgggccgggtgtggtggcgcatgcccataatcccagcactttgggaggccaaggcgggcagatcacgaggtcaggagtttgagaccagcctggccaatatggtcaaaccctgtctctgct

SEQ ID NO: 274578 - DNA, 426 bp, Homo sapiens
tctgtgtgccctctgactgcccatgcctggctcctgcctgggcagggcctgagctggggttcctgctggggacagggcagctatgctcaccgtgtggctgggactgctcccaggaaggctggctggtggatcgctgggctccggggctgggctgggcagagctgctctgggtcctcgtccaggaggcatggcccctgggctctccctgctttatatggcccgcggtgcgcttgctgctctgccgactgcctgctgcgcattcctgaccctgggattccattggggacgctgttgttgaagaggggcagtgctgaccgcgttgataaaaacaacctcacacaggatgtagtctgatgagagggcaggcgggctgccctttggaggagagcagacagcatcattaactgcaaattgcgggcacagacc

SEQ ID NO: 274579 - DNA, 448 bp, Homo sapiens
cagaagaatgtcagctgctggatattatggtcactgtgctattatacatgatggaaagttgccttattaaaagtgagctacaaggtaactcagaattatattcactagttctattattatcagtattattattctagtattattagtgtacttcatatacttagtaatattactaataatgatacttagtattattaatcatattctagtattagtgaactttgtataactagtcttgaaaacaccttatgtttaaaaaaattataaaataatacatgtttgttacggacatctttgaaaatttccagtgaagtttaaagaaaaagttaaaagcacttgtagttttgttattcacaaatacctgttgttagcactttgctatatttcttttctttttgtgtaatgactatatttatagatacaataaatactttttaaaaagttgcca

SEQ ID NO: 274580 - DNA, 611 bp, Homo sapiens
ctcttgctttttgtcagaaaaagattccatccatgttctcccagaaggttgaacttgcattgtccagaggaaatgtgtagggacatggctgtgcagattgggggaaaataggtcgatattcctgttgcaggaccatttgaagtctgagagtttctaggtgagaggaaacgaacctggttactagatttagtgagcaaggctcacaaaagagagaaaggaagacaaaggctagggatccccaaaaagtgggatgtcatgagaattggaaccaagtggcaccccaagagaactagctttcagtggcatgtttctgatggtgacaggcctggtttgtaaaacctctaacatggtcctggactttccctaatctgttaacccagaaacagcatttttctcctagcataaggcagattctttcctgagctgcagcaagacctctacaatttcaaactacagccacgagataatcaacttgttggtgtcactctgtaagagtctgagcagtagtttttattttgtgagtcagttccagagacaggttttggtaagttgaggaggcaataattatgccagctattcctatagtggcacctgagatgccaaactcagga

SEQ ID NO: 274581 - DNA, 729 bp, Homo sapiens
ggatatttcatataaatggattcaaatatgggatattttgggactggctgctttcacctaggggaaaaaattcatcgctgttgcaggatgtactttgttccttttaatgctaactaatttaaagaaagataaaaataaacatgctgttcaagccaaacaacacatgtctgtgaaccataggtggtcctgtgcctgccagtttaagtgtagattacattatttttaatctatgttatttttgacatgaatccactggatttttttccacccagatcattttgataccatcttactattagctaaatgaaactttagtgatatcttgagtctacattttctctgacagcagtgttacttgtctgctaatgtgaattttttttttttttttttttggggaaacaaatgtagacatgagggctaaagtattttaaagcagtaataaggaaagagcttctaatagaataaacatggagtattaaaatattcaacataaagggccaaatctcagtttaaaaatactttcacttgattgccaatttttaatgtagttcagagtttttttcttgtaaaaatctttctaattttgtaattttattggaaaaataagattgatatgcataatttccctgaatgtttcataaatcagtatctgaaattgtgtaatttagtatatcacacactccagagcactctcttgaagtaatctctatttcaagtgatccccttcag

SEQ ID NO: 274582 - DNA, 343 bp, Homo sapiens
ttttacattcttttctccctgcccatctgaatgctgtcaccttccaagccccagcccatttctccagcccatattaattatgctttttctgaaggtctaaagcacttaactgacagtactatttatcttgtcacttagttaaattcagtaagtgctactactgctcattttttgttttgggagatttttttcaaggagcatttctacattcctggcattgtgtttggtgctcaaaatgttttctcacttaattcatgcaataactgtatgcaaattttaaaatcaagcatcaggatgtagttatttgcccaagttttaacagctaataaattctatctgtcca

SEQ ID NO: 274583 - DNA, 341 bp, Homo sapiens
ccctctgggaaactggaaggtggcttctcaaacacccaacactggaaaggctggagccaaaaaactgtgaacaccagggacaggtatagaacaagggcaccaactaaaaacaggggctgaatgactatgtccgtactgaatgctgatagagcccccacctccaacccagattctatccttctttcccatctcagcttccagaacattggtttccaggactcaccttcttggtaggcaattagaaaagattttttttaaggcttctgagcagttcaagaggaaaaaccattaagatactgataccagaagccagccagatcactgtatactgaagctcatag

SEQ ID NO: 274584 - DNA, 369 bp, Homo sapiens
aatgtaacgttaaagtcgaagttcttcacattagaggaggaacttgattttttaatgttgaaatgttataataaagccaaagccaaagtattataataatatcttcataattcaatcaaacacggtacattcaagcctcccaagaatgtaaaactagaaacagtagaggatgaagtagatcagttgatgaaagaaatgccgagatagagaggaattaacaacgaaaccttcattattaaagttttattttggctgggcaccatgactcagacctgaaatcccagcagttgcggaggccaaggtgggaagatcacttgagcccatgagtttgtgaccagcatgggctgtatagtgagactttatctttac

SEQ ID NO: 274585 - DNA, 435 bp, Homo sapiens
atgctcacacatacatgaataaaacctaaatagattatctagtttaattccttttttaaagatggctagatatctaagtttttcaggacaaataacattttcttccttaaaaaaaaaaaattattccctgcaggacatggtggctcacacctgtaatctcagtactttgggaagctgaggctggagaattggttgaggtcaagagtttgagaccagcctaggaaacatagggagaacctgtctgtacaaaaaatataaaaagtagccaggtgtggtggtgttctctcttagtcccagctactcaggagtctgaaatgggaggatggcttgagcctgggagttggaggctgcaatgagacacagtcgcaccactgcaccccagcctggataatagagtgaggctgtgtctcaaaaacagaagaaaacaaaacctaa

SEQ ID NO: 274586 - DNA, 430 bp, Homo sapiens
gagggaaaaacatacagggacccaaacaatgaaaaatgctggtgttgataaagagggtgatgttaatgacagggtaaaatggttgtacaagtcagtggttccaactctttgtcttacattaaaatgaaggggcctccagtgaaattgttgctgataaatcattaaaaatactttttgatgacaaatcactatgtgaaatatattgcctggagattcaaggaataagtgaaattactataactcccatttctatctatttgtttgtgtgaaaaattcctcagggcttatttaaaagaaagaaaattgatactgaaccttgtcttattctagcaatatgtgagattcattcagagttttatggatattttatggggttcattaagcatttgatttcaaataaaatttcactttttaagttcatgaattataa

SEQ ID NO: 274587 - DNA, 303 bp, Homo sapiens
  misc_feature (41)..(41): n is a, c, g, or t
gcacattgtgttctgcaaaaaacaaaaaggatagcctccgnattccagtctaaaaagaaaaaagttaataaaaaattttacaaagaacaaagctggaggcatcacgctacctgacttcaaactatactacaaggctacaataaccaaaatggcatggtaatgttaccaaaacagatatatagaccaatggaacagaacagaggcctcagaaataatgccacacatctacaaccatctgatctttgacaaacctgacaaaagcaagcaacggggaaaggattccctatttaataaatatgttgg

SEQ ID NO: 274588 - DNA, 246 bp, Homo sapiens
cacacacacaacttagtgtcaacacccacagataaaagaggggcgtcctgcaatccatacgggccgaccgccacaaacacgcaagctgctctgccgcaaggccttgcacctcctcgtgtccccgcaaaaaagcagcgccccgccaccgtccctacctattcccgagaaaacgcagagagaactagttggctgctcgctaactgcagcgtagccacccaggcaagattagaagaaaataaacaaaaa

SEQ ID NO: 274589 - DNA, 437 bp, Homo sapiens
tgttcgccgtccccgggctcagtgtctcgctccccgcctgcggagtggagtagttctgagatgtgtgcatgccatctccctttcaatggcgccatcctacaagtggcctcagccaaggttcagccagtaggaggcagacctggagagatttagagcctggatccggcaccacgatgggggcctgggagcgaggtccaggcaggcaggccgtgggaagggcaggctggacctggggcagagctgaagctaccgcccacagcggaatttcttctctggaaagcctttccagtgctgaatcgggcccacccggattgtctaacatagtcttcctcatttaaagtccactgtgatgggtcttttgcacaccaacagaacacctccacagccacatctggacccatgttgaatgaattaccggggactgtcacctggtcaag

SEQ ID NO: 274590 - DNA, 509 bp, Homo sapiens
aaaacatgattaaaccaaataacagtcgtataattttattattaaagatttactctgatgaggacattctgtgctaagtatgattatttctcaaataggaaaatatttactagttaagcaaagggatcaatatgaacccataaacaaacactgagcagtgggggcaacctttaagatgccatggacagtgacagacacctctctccctccctggtagctcccttggtagggattgcaattcagtatggtcagcaattatttttaaagtgtaattaattaaacaaagaaacaaaaagcatttccaccaaacaaggaattctgaaatgtcttcttttggtttcaatcagaaatacactttgtaaaaattttctcaaggtttacacatttattccaagcacatatacactgacccacagtagatttcaccacccatcataggagaaaaaaaagtgtaatatctgttggtttacatcatctatatttaataaattttgattcaatttaaaaaa

SEQ ID NO: 274591 - DNA, 445 bp, Homo sapiens
agctgctaaaccactaaaacctagatattcagctagtctgttaatgaaacctgaaaaaaatacatttacctttacaagaactttgatatgcattatcacattcaagatccatgcaggcacagacggtttggctaatttactgaaaatcagaggttaaacaagggttttaaaactgtgctgtaaggttccagattttattaacaagtggttttctacagttagtgaggggcttttcatgaagttaaggggaaaaagagtctaaaggcaatcacagaatcaaaattttcaaaaattatgaagatagaatatctcacaatcaacctgtggccctcagagttcaaggcctattgacagtcggtaaaaatccttgagagcagagacctgtctttctcctctgtattgccagaaaattttgtgcacataacagtgcccaatgagagctcat

SEQ ID NO: 274592 - DNA, 720 bp, Homo sapiens
aaaaaaaaaaaggcacagacatgagaattgtggaatgcaagcgttttccttggttagagtctattttaaatgcatataataaaaagtaataagattgtggcatgagctggagggatctaaagaagtttggattagaaattggaaataaggagttctactgaagatcattgaatagaattacatgaagaaatatgattagcagccagatacagcgtgattggagggagattgaagtgaggaaggccagttggtgattattatctttgtgagtgggaagggtatattaagagtaaggatgcatagttttaaataagtcaaatcaaatattgtggctcctcagtttgtagtgcagagctaaaataagaatgaaagaattttactatcttctggtattcaaaataaatggagatagagtttgcatatgacttactagcactaattgaggtatgcctttttcttaaaaaaactggcttggccttttttttctgttaagtttactttgaaaaccaataaagttatgctataatggtgttttcctaagtaaaaaatatttaaggtaactggtaagaagagcttgtacttgtatgctgaattttgagttaaaattctgtattttagccatggcttaagagacattataatttgtattggagctggcaggaaaacaggaaataataaaaattaacaatgtggactacaaaaaaacacacaaaacaaact

SEQ ID NO: 274593 - DNA, 373 bp, Homo sapiens
cccaccttaaatcatcccattaggagacaaactgatttgagaaactacagtaatttttaacttgggaatctacagagtactcagaaaaaaactggaaataaacattagtcttaaacgtaagccttagatggtacataatgttcattgctaatagttttcaattcctgacatatatatgtttagtcacattttctggaagtttagtcaggcccttcccatctgggaaacaagcaggtatttctggacagcttttgaattacaaaggtgctttctgtgttgttgtgctaagtttaccaaggctctcccaagtactttattattatcatgcaatttgatagtaatttatgaaattttttttttttttttttgagat

SEQ ID NO: 274594 - DNA, 1159 bp, Homo sapiens
  misc_feature (34)..(34): n is a, c, g, or t
  misc_feature (138)..(138): n is a, c, g, or t
tgaggttttagtattaggtcacaaacccatatanatagttaccacttctatttttgttttgaagtggagttttatgaatatttgagaatatagacagcttcccattgaggattgtattcctcgtccagaggtttcatntcagtggtaaatacggttaagtttgttacaaggtatttacatgagtatgtacagaagtgtattcatttatgcattaattcaacacatactatatgtaatgacgtcttaaagtgagaattaaaaatctctctgaatttctgagtttttaaacccagaatcaatttcattcacattgttctttcttgagcaaaatgtcattttaaagtgagaattaaaaatcccactgaatttctgagtttttaaacccagaatcaatttcattcatcttgttctttctttagcaaacttttcttctgtagagttccccatatgtagaccatgggaggaataggcactgtgggaacatagtggtttatgtgactggcttcctatccttaagagtaatttttttctgtttttttttttttctttcccttttctccctccctctctttcattctttcattcttatttcttaagaatcatgcagtggagatacgtgaatataattcaaggtaataaaagaattaatgtcctactactgatggtggcaaagtggtatgcggcttcagagaatagagtgattaattccaatttcggggactggagatagtttcactaggagatgaatggattttgataaacacccatgtgagggaaggctcttgcagcctgaagccgtaagacatgtaaagggtttttaatgaacctggcagttgagggaataaaatatagtagtataagaatttgagtcatcggctgggtggggtggctcatgcctgtaatcccagcactttgcgaggccaaggcaggcagattgcttgaggctagcagtttgagaccagcctgggcaacatggcaaaaccccgtctctactaaacatacaaaaaattagctgagtgtgatggcacatgcctgtaatcccaactatttgggaagctgaggcacaggaatcgcttgaacctggaaggcagaggttgcagtgagctgagatcatgccactgggcatcccagcctgggtgacagggtgagactccctctc

SEQ ID NO: 274595 - DNA, 381 bp, Homo sapiens
catgcctgtaatctcagctactctggaggctgaggcaggagaatcacttgaacccagaggtggaggttccaatgagggaaaatcccgccattgcactccagcctgggcaacaagagcaaaaactcccaggcgctagacaaacagaagacagtcacctgtcggctaacaaacgtttattgctgtattattcctttatctctggtgagaatgaacaccttacttgacatctttacccctgagtctctgcccagcagggcccatgttcctatccctgtgtatccaacccctttggtctctgtgagtgtttaatggggtggtggcagtattgggctttctgtggtggctccatctccacccaggtgttgctgattgaaatagctc

SEQ ID NO: 274596 - DNA, 447 bp, Homo sapiens
ttttttaagttttgagacagggtctcactgggtcacgcaggttggagtgcagtggtatgatcatggctcactgcagtctccatctcctgggctcaggtgatccttctacctcagcctcctgagtagctggaaccacatgtgtatgccactacacctggataggttattattttttattttgtacagatgaggttccctatgtttcccaggctggtctcgaactcctgggctcaagcgatccgatccttccactttggcctcctaaactgctggaattacaggtgtgagccactgggcctggccatgatggtcatttttatgtggcaacttgactgggccatggggtgcccagacatttggccaaaccctattctgggagtgtctatgagggtgttctggatgagatgaacattggggtttgtagactgagcaaggcagattattctc

SEQ ID NO: 274597 - DNA, 210 bp, Homo sapiens
ggtaaaaccgtacctttaccaggttttctttttccactgaggtacgtgttccaatggccacttcacctccttggatctccatgtatttcatatttggctaaaactaagaaggtaattttgaaagagccattggtctgaatatggaatctaaggcaagtgacttctgtaaacctctctcttcttgaatgtggttaaaaactcgaaacaggc

SEQ ID NO: 274598 - DNA, 476 bp, Homo sapiens
ttaaacatttatttatttatttttattgacatgtaacaattgtatatattttaaggctagcattccaaccgcatgggtgaaagtctttctccattgttgtcaagttacagtatttccggagggcttgggaaatccctggtgctgcgatgaggacgctgaggagcctggtgacgggctcatgccaaggtcatgtggtggcttccgggtggaatttaagtctcttgactcccagcctagtgctcctgctagcatgccacactcgggtgttgtttgtcagtgcgtatcctcttcggaggaaatacgttttgaggttggtaaaatgaattttgttgaaaaatagcatcttaacgtagtttttcatagttatctggagaacttcaaggccactgtgacttttccatgaattatttcacgtactgctattgccctcaggcctctcctctggtgtttattgtgtttggtttattcgagtgttc

SEQ ID NO: 274599 - DNA, 693 bp, Homo sapiens
ttaaacatttatttatttatttttattgacatgtaacaattgtatatattttaaggctagcattccaaccgcatgggtgaaagtctttctccattgttgtcaagttacagtatttccggagggcttgggaaatccctggtgctgcgatgaggacgctgaggagcctggtgacgggctcatgccaaggtcatgtggtggcttccgggtggaatttaagtctcttgactcccagcctagtgctcctgctagcatgccacactcgggtgttgtttgtcagtgcgtatcctcttcggaggaaatacgttttgaggttggtaaaatgaattttgttgaaaaatagcatcttaacgtagtttttcatagttatctggagaacttcaaggccactgtgacttttccatgaattatttcacgtacatcttcctgcacctatcaacaaaaagaccgtgagaaacccacggttccccatttgtaaaataagggaattaaactaggcgaatctagactttctgggtcagtattttggcttctccagaatccgcttgactttgaagtatcaaacctagatgtattggacataacataatagccttaagtgccctacgttatagtgaaaagtaaataggtgatttattagattttaaaacgtattttaattacatagataatgaagaatatattttccttagttaa

SEQ ID NO: 274600 - DNA, 620 bp, Homo sapiens
gtcgtggctggcacctgtgttccaacaacttgagagactgaggtggcaggaggattgcttgagcctaggagttaggggctgcagtgagctgtgatcgtgacactgcactccagcctaggtaacagagcaggaccccatctcagtcaatcaatcaatctcagtggttgaactacccttgatatggttcagctctgtatccccaaccaaatctcatgtcaaattgcaattcccagtgttgagggagggacctggtgggagatgattggctcatggcggctgacgtcccccttgctggtctcgtgatagtgagtgagcgctcatgggatctggttgtttagaagcatgcagcacctcctgcttcactctctctgtctctcctgctccaccatggccagaaacgtgcctgcttccccttcgccttctgccgtgattgtcagcttcttgagggctccccagccatgcttcctgtacagcctgcaaaactgtgagtcaattaaacctcttttcttcataaattccccagtttccagtagttctttatagcagtgtgaaaacagactaatggacccttctggttgaaggaatgtagccattctgcttgtttaagtatttcctttcta

SEQ ID NO: 274601 - DNA, 1012 bp, Homo sapiens
cagaaaaactatttgtctcctttccacatcacattcatatgaactgtatattgtttgttttaacgtccttgtgttctaattccattatttctatcatttgtagatttatttcaattaatttttcatctggatatgggtctttttcacttcttcgtatgcctggacattgtgaattttatattgctgaacactggatttgctgtattcctctaaagactgtcagattgtatttggtcacacagataagtaatgtttggatcagtttgatccttgtgaagcttacttttaaggtttttgtggctagtaatagcggcctttaatccttggactaacttggcccccctactaaggtgttgatccttctaaggccccgtgcttttttcatggtcagagtgaccagccctgtgggagctctgggaagtgttggccctattgctttccagtagattgttccctgaccttggggagacttcctctcaagcacttggagatccgagactgaaaggaacccttctgccagacctccggagccctctgcatgcagcccccgcttctccagtactgggtcctgcaaattctggctgcctcagcttcccccagctctgttggctcctcagtgcattgagacccttggatttggtttcagtgttctgtccctgaagtatgaagcctgggagttgtctccaggctttaagtttggttagtcataaaatttaccttcttttttcctttccctggagggggatcacagtcttgtgctactttttgcccagtgtctaaaacttgttatttcatgtgtattgtctggttttctagctgtttatagtgggaggacagttactgtagcagttacaacttcatgttccaaattgagagtcctcctgtttaaattttgttaatatagtcagccctctgtatctgtgggttctgcattattggattcaaccaccatggatcagaatttttggaaaagaaaataataacaatacaatgataaaacaacacacattct

SEQ ID NO: 274602 - DNA, 153 bp, Homo sapiens
atcattggggatccaccctatcccaaaggcccaatctttaaatgccatcgtgttgggggtaagaatgtcatatgaattttttgggggacatgatttagttcataacacatatgaatgctctttcaatgaaattaagtgctttcctacttaaaa

SEQ ID NO: 274603 - DNA, 366 bp, Homo sapiens
gaactcataaatattcccttatatggcaaaaaggacttggcagatgtgattaagaatattgaattggggagactatcctggattatgcaatcacaacagtccttataagagagccacaggagagtcagaggcagaggtagtagaagatgctaccatggaagccagagactgggagaatgtagccaggagctaacgcatgccagcaacctctagaagttggaagagataagaaatggattttctgctcaagtcttcagatgtaactggctgtagtgacaccttgattttagtcctgtaaaaatgcatttcagatttctgaccttcagaactgtaaaagaataaacttatgttgttttaagacctaaa

SEQ ID NO: 274604 - DNA, 293 bp, Homo sapiens
ctcccattcctatactctcttgcagccagagatgaccacaagacacagtctaaccagtgaggcattcccaaacaaaagagcagagtttccctggaagcaggcaatggggggctcaatcccttactccctatgccctgcctggtggctgacatccactttaggccaggatgaccaaagccctcagccagaggagagagagagagatggcgcaggcccctcagatgtgcctgagcagctgcctgcggctggaccacccacccatgcctcctgttacacgagacacccctctctcc

SEQ ID NO: 274605 - DNA, 1002 bp, Homo sapiens
  misc_feature (246)..(246): n is a, c, g, or t
  misc_feature (300)..(300): n is a, c, g, or t
aaaggggaatttacatgtgggttacaggggagactagatttttacatcaaaattaattttgttttatttgctcctaatttataggtgaaaatgttattttacatggaaacctattttgttccataaaactaaataaaccataacccagaagtgcaatgagacacacacagcatgaccacattatttctgaaagctgaagagttgccagtctgttgatctcaaacttcatgaaccacacagttcagntcaaattgtttccctgaaattgctttgagcctctgccaaacagccactgaaggnctccgaaaaatacaagaactgaaaggggcacatggcagatacaatcataaactttcatttcggagagcagtaaaaaaggagaagaagaacacactggtactccaacaagtcatagtttctgccagatgttgcaaaagtgagttagataactgacctttcttctggggcctgtgtcaactttgaatggagctttcaattgtacaataagcatctggacagttttgacatctttataacactctttgagttcttaaaaagctaccattttgtttaaagatgatttatgtgaagattaaaacaattacttaagtgctaagaataattaatcctgtaactccatatcaataccattatcttcccagaactgggtctctaactactaatcataatcaagacaccaactgtcaaatcaaatcaaaattaaaatttgattaattatttgatgatattaacattcaaatctagttccttcttaggcctaattttgtccttatgtttgctttgcactgaattattgtggtttaaatagcccattttacatgacaactttcaaacaagagcataaattctcataaaaacaggctaaggaattcataatgatagctcttggccgccacctaaaggtttatttcttgttttattttacatgagacctactatgcattccttttataataaaattgttgtcttgtcaaaaaaaaa

SEQ ID NO: 274606 - DNA, 203 bp, Homo sapiens
ccacccccactgctttgaaaatataaaactccccccttaccacccataaccatctagggaaaatgattcatggagaatgggagtggaatacttggagatgtccagacccagctaaaagaagcagcattcccagtgagtaggtctggcagggggatgaggtacagggcatctcatttagaaagggaagaggagacacaaagcca

SEQ ID NO: 274607 - DNA, 199 bp, Homo sapiens
cactctgtataatgaaaatgtgtgttgaaagtgtgtgggtatatgttgtgtgtatatgcattaaaattctcattagcatgggctggttgtaatagtgcatacctgttatcccaactacttgggatgctgaggcaggaggatcatttgaacccagagttcaaggccagcctgggtaacacagcaagaccgccatctattt

SEQ ID NO: 274608 - DNA, 392 bp, Homo sapiens
cagggtacttagccccttttctgggatctgcttttatcattgcaaagtcaaagctctgttcaatgtcatacaaacacaaattctcataccaaaactactgacatttacactgagaagaagcaatagtgggtaaaactgctaacaccttagcatgactcaatgaactagcaccaaactgtattaatagccatagtcattatattatttgctgccacatgtttgcacttaaaaaaagtttcaggccaagcccaatggctcatgcctgtaatcccagtgatatgggaggtcaaggcaggaggttcgcttggggcctggagttttgagtctgcattgagccaggactgccactgcactccagtttgggttacagagtgagatcttgtctcacatta

SEQ ID NO: 274609 - DNA, 429 bp, Homo sapiens
atttgaatttcccttattactagtttgagcattttttcatgtaacttgcattagggttctcctgagggacagaaccaataagattcacgcatctatttcatatatgtatatatacatgtgtgggttcaatgcaggctgacagagtggagatttggacacaggctgcatgaacgagcagactgccactaaggtggcctaaatttatgtccacttttgtcccatagcccaagtttgggcatcttgcccctgctttgccctctagtatctgaccttggtttgctcctcttttttactgtacagagctcaaaatgttgaaaatatagatctgaatctcaagcgagagataagagctaaagttgtggatctggtaatcattggtgctgcctcctccttcccttcctaatccccattgtaatctgtaaaatttac

SEQ ID NO: 274610 - DNA, 419 bp, Homo sapiens
gataaacattcaacaaataatcatgcaaataaactcatacttacaagttgtgttaaagtgctatgaacaaagaatagagagatgaaataaaacagatggacaattgctaagtttaatatttgtctacagcagtaatcgagtgataaacatagtcattaaaatgccctttcctcaattctcgcatctctgtagtgtttgactgtcgattattcccccacttcacctccccaccttctggaaaccttcccctcctctgttgttttgtgccttgacccatcacaggtacccacttagaattcacttagtggcgatggctatagagcacctcctttctgtgcatcctcagcttcatctgccccttgcctacaggcattcccccaggtctgatccttagccagcttcttttacctctccactca

SEQ ID NO: 274611 - DNA, 932 bp, Homo sapiens
cctctttcctcctgtcctagttctatccatcctctgttctttcttgctctctcttttgttttcttcctctggcacacaagacataagagcagcatagccacaagcaaggcttagttaggtctttttcaagagagctggcttaccagagcaccgatggacttggatacctgagatatctgcttgggatcccacactttcaaggtctctcctctggccttcttctggttctgcgactccttacagcgctgggagttggtgatgccaacaggacatacgctcccagagcctacctctcccagatcactttaaaaggcacccaggaccccagaattctcatcctcaaaggcatggagctcagctcttggccctcaacaaatctcttccccataaagatccttttgagagcttaggatgtcccccggatggttttggttgcagattgtggtggtggagggagctatacaatttaatctattgccattaattggatgcgctaatggcagattgggtagtgataatgccataagaggtagtgtgtgagccgtgtgctgcatctgtgctagctcaggtaagtcagcacacagcacctgcagcctcctctcacctctaatggcagattgggtagtgataatgccataagaggtagtgtgtgagccgtgtgctgcatctgtgctagctcaggtaagtcagcacacagcacctgcaggctcctctcacctcttccctgagcagcaccttttcacctgaacatgctgatcccctagtgcttcatcttgacagcaacttaacaagccctgggcagctttttaaaataaatgactatgatattgactatgaatctacataaaagccacttgttttttagtcataatctgtgtctaactgcagaagaaattcacacctttgaaaaacaaataaaaatgtaaaaagtg

SEQ ID NO: 274612 - DNA, 819 bp, Homo sapiens
cctctttcctcctgtcctagttctatccatcctctgttctttcttgctctctcttttgttttcttcctctggcacacaagacataagagcagcatagccacaagcaaggcttagttaggtctttttcaagagagctggcttaccagagcaccgatggacttggatacctgagatatctgcttgggatcccacactttcaaggtctctcctctggccttcttctggttctgcgactccttacagcgctgggagttggtgatgccaacaggacatacgctcccagagcctacctctcccagatcactttaaaaggcacccaggaccccagaattctcatcctcaaaggcatggagctcagctcttggccctcaacaaatctcttccccataaagatccttttgagagcttaggatgtcccccggatggttttggttgcagattgtggtggtggagggagctatacaatttaatctattgccattaattggatgcgctaatggcagattgggtagtgataatgccataagaggtagtgtgtgagccgtgtgctgcatctgtgctagctcaggtaagtcagcacacagcacctgcagcctcctctcacctcttccctgagcagcaccttttcacctgaacatgctgatcccctagtgcttcatcttgacagcaacttaacaagccctgggcagctttttaaaataaatgactatgatattgactatgaatctacataaaagccacttgttttttagtcataatctgtgtctaactgcagaagaaattcacacctttgaaaaacaaataaaaatgtaaaaagtg

SEQ ID NO: 274613 - DNA, 389 bp, Homo sapiens
gaggcagaatagatagtacagaaaatgaccatgatctcaggatacagaaaccatggtgactgtacagccaacacaataagccgtagcattcgcattgtaattgggcttattcaagcaaagttatcctcattaaggactttctgttctagaaagcatgtgcattttgatttcacctgtcctcaaacttaactttcgcttattttaatagcaaaaaatataggccctagccaggcaaggtggctcataactgtactcccagcactttgggaggctgaggaagatggatcacttcaaaccagaagcttgagactagactggccaacatagtgaaatctcgtctcaactaaaaatacaaaaattagcagggtatggtggtgcatgcctgtaat

SEQ ID NO: 274614 - DNA, 343 bp, Homo sapiens
agaagccttacaataacatagagagtcaactaacgcatattttgtatgttatgtatactatatactgtgttgttacaataaaataaggtagagaaaaaatgttattaagaaaatcctaaaaaaatgaaatatagttactgtttatcaagtagtagtggatcatcgtaaaggtcttcctcacgtcatcttcacactgaagaggctgaggaggagaatgaagaggaggggttggtcctgctgtctcaggacctccaatgcagttcaaactcatgttgttcaaaggtcaattgtaagttcttcttccaaagacaggtgtgtattacctttgcctgactgtcatagt

SEQ ID NO: 274615 - DNA, 454 bp, Homo sapiens
tccccaacttgaatcaatctctcgtaattaatgaaaaccattctcagttgccaatttgcaaattaccattgaaattgccaaagcataagaaattaatcaaccgtccacagagtaccaaaagagtttctaaggatcctgtagaagccctttgggataacttgctccattggctggctgaggagctctcagaagaaaatgctgagtctctttcctcaactctccctctgcgccgtagcaccattcagctcatcaaactcaagaaccctgatgatctcacagaacagatccacgagtttctttgcttctggaaaaaatcgcttccaactttcaccgacaaacttcgcctcctggctcgacatctccgcaagattggcaggagtgatcttgcagaagagctcaaattcaagtgggaaaataaagtgttcactgaaccacagcagtgttttgatgtagc

SEQ ID NO: 274616 - DNA, 410 bp, Homo sapiens
ggaaatgagacagaagggcagatgacacatttatcccccatgctcttttcttttcgtttctttatttgagaagattgaatcatgaatgatcaatcagaccttgttttactagaaaataaatgaacagttgggtacagtggctcactcctgtaatcccagcactttgggagaccgaggtgggaggattgcttgagcccaggaattcaggaccagccatagtgagactctcatctctacaaaaaaatatattttaaaaaattagctgggcatggtggtgcatgtctgtaatcccagctatttgggaggctgaggtaggaggattgccagagccaaggaggttgaggctgcagagacccatgatctcacataccctgcactccagcctgggtgacagagtaagatcctgtctc

SEQ ID NO: 274617 - DNA, 447 bp, Homo sapiens
gcagaattgagaagaatggaaaaatgtatctccaaacgttaggctaagatgcaattcaggaaactgaacagcaaagacaaactccttaaaaattgttggctgagaatctacagcccatcatagagaatagaataatagaaattggtttaaatttcagtaataggaaaaaactcaagaggcctccctcctcaatacacacacatacatacatacacataacactacatcacacagagacacacacatttacatgtatgcattaaattaagatcaatctgagaactgactaaacccttagaaatcctgtgttgtcacttgctcactttaaagataaagagactttggtcagagtgatgaacttttatatgcagagtccttccgctatttatggccaatggttcactcaatcctagatcttctgacttcaataaacaagtctccactcct

SEQ ID NO: 274618 - DNA, 448 bp, Homo sapiens
caagatgctttgagctcccaaatagaggggaatggaaaaagtttcatggcatttgagataatctttgataaaggagcagaatgttggcaggtggagatgtgggggaggaggatccaggcagtggtaaggaagggggctctgtgtcctggggagaaatagagaaagtcttggaaagtaagttcatgtcaccttacagggccttgaatgtcaggcgaaataacttattcaacttcgtaggtgatgagagctgtggaaggctttgagcaggagagcaacatggttatagctgagtggaaatcatttgagtccagaagttgctggattaccatatggagctggagactatagctgcagaaatcgtgtggctgttgaaataatctagtggagagggctgttggggacatgtacagttagttatcttattttcattttcctcctgttgatgtaa

SEQ ID NO: 274619 - DNA, 119 bp, Homo sapiens
gtgaacgctagcacaccttaactcactgtgctcatggcccaaatgatcagactggaggtagcagaaacaaacccccggatttccacacagcctagaggaggagaaacagcaatgaccac

SEQ ID NO: 274620 - DNA, 337 bp, Homo sapiens
tttttttcttgagacggagttttgctcttggcatccaagctggagggcaatggcgcaatctcggctcactgcaacctccacctcccaggttcaagtgactgtcctgcctcagcctcctaggtagctgggattacaggtgcccgccaccatgcctggctaatttttgtatttttagtagagatggggtgtcaccacgttggccaggctgattttgagctcctgacctcaggtgatcccgcccacctcggcctctcaagtgctgggattacaggcgtgagccactgcttccggccgattctctgattagattttaaacttttttgatgaaatattgagt

SEQ ID NO: 274621 - DNA, 421 bp, Homo sapiens
gaggtgggaggatcgcttgaactcaggagttgaaggctgcagtgggtgaggatcacaacactgaattccagctgaggtgacagaatgagaccctgtctctctaaaaaacaagcaagcaaacaaaccaaaaaccacagacaaaccagacccctcttagcagaatacttccatgaggtaataaaaggtttaatttatttcagaagtttctagattttattgtctctatttagccaaagccacaagaaaagtcaaattcatatctttaaatgctttcattatcaatcaagaaagaagaaagtgaaacgaacaaacaattttactcaagaaactagtgagaaatcaaagaaatgtccaagaagtaggagacaagaattaatcaaaacagattaacagtggaataaataaatgaatccaactggtt

SEQ ID NO: 274622 - DNA, 971 bp, Homo sapiens
ctgtcagagctgttagcctgcttaaacagaggaaaatggtacaggcagagctggtctggtatcaggaaaaaggctgcctacgataatccactgcaggaccctaaaagtctcgaccttagggccccctcggaccgtctccaaggtcgggtcccgctggagaaggaggcatttcgagagtaggttggaaacactcttttgtaaaatctacaaagaaacattttggagtccattgaggcctatagtgaaaaactgaatatttcgccttgaaaaccagaaacaagctatctgtgaaaatgctttgtgatggaagatttatctcacagagttaaacgtttgtattgattcagctggctggcaacactctttttgtaaaatctacaatgggacatttcagagaccattgaagtctacagaaaaagactgaatatcccatgattaaaactagaaacaagctatccatcaaaatgctttgtgatgtttggattcactttacagagtgaaacatttatttggattaagtaggttggaaacactctttttatagaatctacgaatggatattttagagcccagtgaagcctataatgagaaaccaagcattccatgataaaaactagaaacaagctatctgtgaacatgctttgagatctgtggattcatctcacagggctaaaccattattttggttcagcaggtaggatacactgttcttctagaacctaagaagggacacttcagagctgatttaggcctacagtaaaaaaccgcatatcccatgataaaaactagaaacatgctatctatgtaaatactttgtgatgtgtatattcatgtcacataattaaacttttgtttttattaaaaaggttgaaaacactgttttagtaaaatctactaagtgcgggttggaaacactttatttttagaaactacaaaggaacttttcggagccaaatgaggcctatagtgaa

SEQ ID NO: 274623 - DNA, 1052 bp, Homo sapiens
ctttcttgtaattcagcaggttggaaaccctctttttctacaatctactagggtactattcggaccaaattgaggcctatactgaaaaactgattatcccgtgataaaaactagaaaaaagctgtcagtaaaaatgctgtgcaatatgtggattcatgtcacaaatttaaacctctgcatttattcagcaagtttggaatacctttttgtagaatatacaaagggatgtttcacacctataaaagcctatagtaaaaaaaggttggaaacactcttttgtaaaatctacaaagaaacattttggagtccattgaggcctatagtgaaaaactgaatatttcgccttgaaaaccagaaacaagctatctgtgaaaatgctttgtgatggaagatttatctcacagagttaaacgtttgtattgattcagctggctggcaacactctttttgtaaaatctacaatgggacatttcagagaccattgaagtctacagaaaaagactgaatatcccatgattaaaactagaaacaagctatccatcaaaatgctttgtgatgtttggattcactttacagagtgaaacatttatttggattaagtaggttggaaacactctttttatagaatctacgaatggatattttagagcccagtgaagcctataatgagaaaccaagcattccatgataaaaactagaaacaagctatctgtgaacatgctttgagatctgtggattcatctcacagggctaaaccattattttggttcagcaggtaggatacactgttcttctagaacctaagaagggacacttcagagctgatttaggcctacagtaaaaaaccgcatatcccatgataaaaactagaaacatgctatctatgtaaatactttgtgatgtgtatattcatgtcacataattaaacttttgtttttattaaaaaggttgaaaacactgttttagtaaaatctactaagtgcgggttggaaacactttatttttagaaactacaaaggaacttttcggagccaaatgaggcctatagtgaa

SEQ ID NO: 274624 - DNA, 466 bp, Homo sapiens
ctctcactcttacagggcccaggagaaaagaagcttggatcagatagaccagactggctcccccatgtactttgctgccaagggccaggagttcacacaaggatttggaaccaaatacagaaatttccaacagttaaagagcacttatgtgccaagtattgttcacttgactctccaaacaaccctatgtggcaggaaggatgatggcccccaaagaggtccacatcctaatctccataatctgaatacagtttattccatggcaagagggaatttggtttgctaatcagctgaccttgagttgggaaggttatcctggatcgtccacaagagtcttaacaagcaaaagaggcaggctggagagtcacagtgattcaatgcgagaaggattcgatccacctgggctgactgtgaagacagacgaagaggaccccgagtcaaggaatgcgggaagcttatagaagct

SEQ ID NO: 274625 - DNA, 367 bp, Homo sapiens
aactcccagcctcaagctatctgcccgcctcagcctcccaaagtgctgggattatagccttgagccaccaaacctggcccaaaagtacaagtatgaaaagtcctgccatgaacatagcttcttacctctactcctttatcactcaaggatctgacgctacacaagctctggttggaagactcactattaagtggtccctgaaagaaaaaaaaaatcataaataaataaattttaatcctaagaggatagcaaaactgaagaagcagcctgatgattttttttttttttttttttttttttttagacagagtttcactgttgtcaccccggctggaatgcaatggcgtgatctcggctcactgcaacc

SEQ ID NO: 274626 - DNA, 425 bp, Homo sapiens
ctgtatttgagtgtttatcatgaatgttaaattttatcaaatgcttattttgtattaatttgggattatttcatcttttattgtgataatgtattatattattacagtttcttatatttaatggtcattacattcctgagataaagtctacttggtcactaacaaaaagacatactggctatatttgatttgctagtttttaaaaaaatttatgcacctatgtttatagattagataagtctataattttcttttgctttttgtccttgtcaggctttggtcttaagattatattacctattgggtactgtggtcactacctggctgacaggaatcaccctaaacctcagcatcatacaatatacccttgtgacaaacctgcacatgtactcctaaatctaaaataaaagttgaaattatttttt

SEQ ID NO: 274627 - DNA, 153 bp, Homo sapiens
aacagagtttgtggcaagagaaaccacttaataagctactgcaataatccagatgaaagaggatgatgaaggaggactagggtgttagtagtggatgaaataagaagtggttggatgctagatacactctgagggaaagccaaaaaaaaaaaa

SEQ ID NO: 274628 - DNA, 369 bp, Homo sapiens
ggccaagaacagcccagagtgtgcaagggcatctgtatctaaggatgagacctggggttggaaagataggtagaggccagatcaccaggggcctatgtgttctgcaaaaatgtagatattctcttgggagtcctgctaaagtgtaatcctctgaccagcagtatcagcatcacctgggagctggttagacgcatagagtctctgccttcccccacccccaagtctgtgttgcaacaggatcctccaggagattcgtgtgcacatccaactgtaagaagctctgatccagaccactgttccccaccatttggaagaatggggatgtcttcttaacatcaaaatatttctcagccagtatcccacatgaaa

SEQ ID NO: 274629 - DNA, 432 bp, Homo sapiens
ggactttaagttgtatgtatgcaaatgctacgtataggaaatagagaaaatgacttaggaaaactgataatcatgctaatatgtcaatctctggaattctgatctcttgtgaatcttaggaagacatacactttaaagatggggcagatgtgctggttggtggggagttagcaactgacactatttcacgtgtcttgggcttggatgaagataaatagcagtgcagaaataacttaaattagggttcccactgtgacctacttagtattccttcaagacctattttttcctttgtttacaaacagtaaaaaccctaatgtggtcctttctatgcccagatttgcctttcagtctagtcctgcatttcttgtctatgcagacttattcagatactttctagcccctttccctacagctatcgataggaaattc

SEQ ID NO: 274630 - DNA, 318 bp, Homo sapiens
agccaccagaagatgtgcttcaccaaaatgaaggaggagtaaatgaagaaagaggaagacatgggacgcaggaagcagataatccaatacaggaaagaagtgaaggaatcacttagatcagggctggcagacttttcctgtaaagggccagatagtcagtatccctgtcacagctactacactgtccttcaggtctgtcttaaagaagatgctaagtgccaggtgtggtggctcatgcctgttatcctagcactttggcaggccgaggcaggtcttgaactcctgacctcaagcgatctacctgcctcggcgtcgacg

SEQ ID NO: 274631 - DNA, 338 bp, Homo sapiens
ttttttgagacggagtctcgctctgtcgcccaggctggagtgcagtggtgcgatatcggctcactgcaagctccgcctcccgagttcacgctcttctcctgcctcagcctcccgagtagctgggactacagacgcccgccacaacgcccggctacttttttttgtatttttagtagagatggggtttcaccgtgttagccaggatggtctcgatctcctggcctcgtgatccgcgcgtctgggcctcccaaagtgctgggattacaggcgtgagccaccggcccggcgccccgaaagttttaaaagcttcccctacaaaagaacagaactgaaattcc

SEQ ID NO: 274632 - DNA, 480 bp, Homo sapiens
agaagatggcaaaataagagagatatggtaataattcccagtcacacaaacccatacattctctggattttgccatggactcttgttctccaatgattccagactattagaacacttatgacattttggttaataataatccttcctataggccaaacttgggtaatgatttaaggaggtattaaaatctgggaatgccagacagtgtgctgaaacagagactcgagtcttgaacaagaaaatatcatttgtttaaccttgaataagtcttcttactagtcttgtgcttattttcctcccttataaagtaattgagtcagcaaatcatgggggtataagaattctggatctcgcaccactctccatcaaaagtatttaacacataccccacatatatgtatattaataacatatatttgtgtgttaattatatacatgtactactgtattaacttaatgggcacattacaaaacaaacag

SEQ ID NO: 274633 - DNA, 399 bp, Homo sapiens
ccggtcttccctggtgcctgctctccctcccctgcatttcctccatcagcactgcttccccatgtgtgtggccacactgctcctaggtgctgtcttctttctcccctgttgctgcagtgacaggtcatcgctgcttataaccaaggtgtgcacctgtagctggagcgctggagccacacggagtggcagctgtgatttcagcagaggttctctggcgccctccgatggtgcttgggcaggctgatgggggcctcactgttgtctgtaaaagtttaaaaagaaaaacacttttaatagaaaaatttacagaataaggatataaagaaaaatatttttgtacaactgtgcaatgtgtttttgttttaacctaagtgttattacaaaaagactcaaaagttt

SEQ ID NO: 274634 - DNA, 194 bp, Homo sapiens
cgggggacccctgccctcctcccgtcatgcctgggggttcactccacccagagaggagccctggccgccccttcatatcccaacagctgagctctcagtgggctcttctgacctctgtggctccgtccgaggctattgctgtggattctgatgctcaaatggtgtcagatttgcccagtaaaaaccccagatct

SEQ ID NO: 274635 - DNA, 348 bp, Homo sapiens
gtgtggtccttcctgcctcctgccccggcctccctgggcttccccatcacaaagtgcctactgccctgacttcccttttaaatcctacctatttttcgagcacagatgggggccacctcctgggggtgtccttccccaatgatcccagcacacaacaatctcctcctttaagctgtcatggttcctctgcttcccaccttaccagatgtcgcctgcagttgttgggtgtgtccgcgtgtgcctaaaatgtgtgagtgcctcctgtgactgaggctcctacttaattcccctaagccccctttggtacggggttgctgtcctcacttctcaggtaaggaaaccggggtt

SEQ ID NO: 274636 - DNA, 183 bp, Homo sapiens
tagagattggagtgatgcagacacaagttaaggaatgctcacagccccaagaagatagaagaaacaagaaatggattcttctctggagcctgcagagggagcagagccctgccaacaccttgattttggacttctgaccttcagaactgtgagagaataaacttctgctgttttaaaccacaa

SEQ ID NO: 274637 - DNA, 306 bp, Homo sapiens
tgtggcagtctctgtgaccaagagcagaagacaatagcagcatagaaacctcaaatgaaaaacctaacatttcaagctactaatttagccaaccttggcatcagctatctctggtcttagtatatgaggtgataagcccccactgttcaagttggatggccatcaattgctgcagaatagaagttaatgaggcttcctcctcctggatcccctactagaccttgacatgcccattcagtcacaggcagaaagggaagcagagggtaaggagacctggctgactgtgtcagacgcagatcttacctg

SEQ ID NO: 274638 - DNA, 365 bp, Homo sapiens
gctccaagcccagtggctggcataagactagaaagccaatcaacgtttaagaaattctgaataaattcagatcctttaaaaatgttgtcggccgggcgcggtggctcacgcctgtaatcccagcactttgggaggtcgaggcgggcggatcaggggggcaggagatcgagcccatcctggataacacggtgaaaccccgtctctactaaaatacagaaaattagccgggcgtggtagcaggcgcctgtagtcccagctacttgggaggctgaggcaggagaatggcgtgaacccgggaggcggaacttgcagtgagccgagatcgcaccactgcactccagcctgggcgacagagcgagactccg

SEQ ID NO: 274639 - DNA, 391 bp, Homo sapiens
tactgaagatgactccttacattattttgcttgcatgtgaagaaatatactttgcactgtgttatagaggaacatagcttcttgatgaaaggggctagggaaagatttatttaaatactttatcaatataaatgaaacaatacatggtgtgttactacattataaaatgagatcagtaaaacaatgtaagaaaacgtaataataagatagtataatatacacataacgtattctgtgtatatatacattataaggcagtgagatcatgttttctattcccatggaccttttttagaaaagcatatcatattttcataattttttaatgtttggaatatactgtttttaagattttgattttatggtgtttcaagaatatagaagttatgaa

SEQ ID NO: 274640 - DNA, 411 bp, Homo sapiens
ctaaatctcagatagaaactgagtctttttttttttctgtttactaaagtttggagttattttttattataaatgtttgattccaaaatgcttgagagtagccttttctttttctcttgagcagaataatttagtcacaccaccctaacaatgataatatcctatttagtgattacctactatgtgccagacccagtgcttggaagagatacaaacattgataagacagcctctgagatcaaggcgttctcagtacagacagaaagaaggaagggttaggtgatatgatatggcaagggcaaccatgcaggcatatacaggatgtcatgggagaacatggtggggtggtcagtagtgtagaggttgagaaattctggcctagactaagaaatgacaatatgtacacataca

SEQ ID NO: 274641 - DNA, 394 bp, Homo sapiens
tgctatttaaagaagtttccaaatatattaggaaacttgatttggtgttacttttattactcgtttctcatttctaactttgtggcatagtattagtttcctattgctgctgtcagaaattactgcaaatttagtggcttaaaacaacacagatttattatcttacagttctagaggtcagatagccaaaattagtctctctgggataaaatcaagttgttggcagggctgtgattcttcttgaggatctagaggataatctgtttttttcccctgttctagcttctagagcctacctgcattccttggcttgtgatccctttgtccatcttcaaacagatctgtcgctgactctcagacctctgctcttccctcacattttctgtaactctga

SEQ ID NO: 274642 - DNA, 305 bp, Homo sapiens
cagatatggagggccaactgcatttattttttaaaatctgcgtataaggagatccatgaagttcaagctcgtgttgttcaagggtcaactgtatctgcaactcaaggttctgctaaagatcctaaggagcagacttccaaaggtcacgcctcctgttgaagaccagatatgacaagttggttgataatcaaacagtttttcctctgctctcactcgacaacaatcaatacagaagacttctgtgaccagatgtgtggggttttctctctaccaataaacaagcaatcaattctgcagccaacacc

SEQ ID NO: 274643 - DNA, 422 bp, Homo sapiens
taatcagcttcatattcctcaaggtacctgtgactatattggtggttaatagatgatcattaaaatgtttttgaaagaattaccaaatagcaccttgacatagacagacagtgaattattttagttatttatagactccttcaatttgaagtattcagatgctttctaagtatcaatctaatttatctccttagtatttggcaacatgcagacagataattctactatgaagggaaattaaactcatttagaggattaaattgaaaaattagtacactattttcaatttttatacagaaatacaaatcatttatatgtagttatctatgttgttttttaaatctaaaacactatttagaagcttctctaattaaaatcactgaacatcacgttgtctatggtaggtggtgctcgggcattgt

SEQ ID NO: 274644 - DNA, 408 bp, Homo sapiens
gttgcctctgacaatgaattcttattatattctttgaattacttaaataaaatgttaacatattagagggaaaattaagtaaaatataatctcatcgaaaatttatgaaagtgcaatttctctcaagttttttttttaaatgtcactctattttaattactatttttggctagcaaatatttgctaaaatttatttgtatcacaattccatttgagttttaaaaatatgatatactataaactatttgtattgcattataaataaaaatagctaatatcatctattaaaatgagcaaataaactatgaaagcaaattctaccaaaataagaagtaatttgtaactttggatatccaactatcagtgcctaaaaaatctgctaattttttaaaaggttgtaaagataac

SEQ ID NO: 274645 - DNA, 208 bp, Homo sapiens
cctgtgggcatcctcctaggacaggggagagcacagaaggcatggctgggcagtaaggggatccgactggctaccctgtggagaatcaactggaaggggagagacgagaacaggtaagagatggttggtggaggcctgcaccatttcccagagaaactgtcatgagactgggggaatgggaacagataaggttgatatttaagaggca

SEQ ID NO: 274646 - DNA, 131 bp, Homo sapiens
cccaccgcttttttggaggaagctttcgaaggaaaggcaggagaatggcagacagggaacataaaggatgctggcgaatggaagagtatgcgcctgtccagattcagcagctgccatccagccctgtcaac

SEQ ID NO: 274647 - DNA, 244 bp, Homo sapiens
tgacatgtgcccagcacttggcccatgactggagggacagtgttgtgattgaccatgccttggaccctctttcttgacctaggaagaaagaatgggtattcctcttgtcagggagcagctgtcagataaaagaaggagtctgttatcacagaaagagggtagaccactgatgtctccttcttacccctccctccaactccattcatgttcccactgccctctgtgcataggcaaagaaggggac

SEQ ID NO: 274648 - DNA, 518 bp, Homo sapiens
agaaattacctattttagcttccataacttaaccctttataaggtgccttcattgagtttcatttcattactgtgtctttttagtgacagtatatacaagcaccattatataaatagcattgttgccattttcccaagtctactgttaaaagattggctgctgcgtcattaaatatcccaggtgataaaatctttttaataattatgaagaaaaatttgtgtcttagaaaatgggaaaagatactattttctttcattaattctagcacaaatttaacagttctgtcaatcttgagcataggcagagactgcattaacagtttttgtaactgtctacaatggaaatcatattaccattttaacagaaatttaaaaaatattatttatgctcatcaacaactttgtaatcaggatattaatagttgttagacctacctttagatattagtatttaatgcattattttaaaagcatatttgtttttcctttccggtcagggaaccaaaaaggaaaaagaa

SEQ ID NO: 274649 - DNA, 171 bp, Homo sapiens
cctgccaataccaggagaccagcataaagaggtactgccagcccctcccatcccagaccttgggatgccccggtttattgtgaccagttacacctgccctggaaggagaaacacagcaaaaagagaatcagcgacaggaccagaatcagggaactcatgttctccaagtac

SEQ ID NO: 274650 - DNA, 249 bp, Homo sapiens
tgaaaacaaggcagaccactgacttttctttgcgtggtttctaggcactttttacagagctgcattcagattgatgaggagcttcttgatgtggccaactcctccctctttttggaaaaagaccaggtgcactaagccagcaaccacagccagcaccgggctgtggtaagagcagccacataggggtctctacagacagaaacccgagaagaccgggacagacccagtacccagactccagtatgaaaa

SEQ ID NO: 274651 - DNA, 403 bp, Homo sapiens
aagttgaagagtccttcaagctgaaaggacaactgagagtcatacaaagaaatgaaaaacattattaaaagaaataactgcatagattaaatataaaggcattatttttggtttgtaactttgtttcatgtaatttaaaagattgcataatacagtaactaaatcttgtgaacctctaaattaaaaactctacagtgtataaataaactggaaaactaacaaatatgtggaaaataaataatataaaacaaccagtggatcacagaagaagtcataatggaaattagaaaacacctgaagacaaatgaaaacaaaaattctacataccaacatttatgagatacacaaaaaggaatgttcagagggggatttgtagctggaaatgtctgtattaaaaaaaaga

SEQ ID NO: 274652 - DNA, 524 bp, Homo sapiens
aagtcgggacgttttgtgaaaattctccctgattatgagcacatggcgtacagagacgtttacacctgccgtatgtacctcctgcgagctttggcttctgcggcagccagcacggccaagaactgcatggggagggccctctgattcacacatgggacagctttggtcctggagcaagcggacctcgtggctttttgtcatcctttcacgttcacttgctgcagcgtggctctgcttcagctgtgacagagatcacacctgtgtgttggacccaggctgcatttggcttacctttctgcagtggtttctgggtactaccagtcgagatcactttaatgcacattttcacatgtatcgtttattgaggagctactgcagacacagagaggaacgaacagagtagaagctttaaaattttattctaaagtgaaatatgaatatttgacttctgacctttattagttttaatcacattttaatagcctatgtgaattaaaaatcacatatgcatataccctcaatag

SEQ ID NO: 274653 - DNA, 567 bp, Homo sapiens
tgatacggagtctctcactgtcacccaggctggagtgctgtggcgcgatcttggttcaccgcaagctccacctcccgggttcacaccattctcctgcctcagcctcccaagtagctgggactacaggcgcctgtcaccatgcccagctaatttttttgtgttttttgtagagacggggtttcaccgtgttaggcaggatggtcttgatctcctgacctcgtgatccacccgcctcggcctcccaaattgctgggattacagacatgagccacagtgcccggcctatgtctatgctcttaaaagatagctttgcataaccacatgcagtttcttccaactatatcccctatttcactcacatatcccttcttctaggaagtcttactcatttaagtcctggcccaacccttttcctgagtcagtcctgactttatttatgagagctctcctcttaaatttttaagtgacagtttataattgttgactataggtatggggttgtgcagcgaatctctggagcttatcgctcttgcttaactgaaactttatgcctgttgatttttaact

SEQ ID NO: 274654 - DNA, 987 bp, Homo sapiens
gaattttgaaggcgttcgtgtattttactgctatatgtacaagtcgatcagaagtgatacctgtgcaggctaccctgaaaagaatcagttccattacttcacttttgtagtttagacttgggaactgctgatataccctatggggcaacacaggcgcagttttgaaaaccagactcccctgctgtctaatacctgcatctgagggcagcacagtgaggggacatctttggtttcaatttttacagaaggctccagtagggactgcattttaataggcactggtgtcagggggaccttggtcaatcttatcagctctgaaggcggagcttcctgaaactggatccgggccccaggggaagcagtgtggagagtccagagggatcctgaggtcttgctggtgcggcccaaaggcaccggacgttggggccaagatgacctccgcgctgccacgagccgggccattggacgcgggctccgcgccgagcctgcagtcctcgaggagtctctcgggttcctccgttttgatcacaccttctcggatggccgccgagcttttgccttccccgccctgcatcgcgtccctcatgacctcttccgcctccagcttgcccttctcgttccctcggaagtagtcgagggccggcccgaggccttccaacttgaccgccctggaggctctacgaccggtctccacggccccccgaggcctcaccgatgcgtccaggcaagcccctagctcctacttcttggccttgacgtgcagcgcccggggctgcaccgggtgtaactcgggcctacagggggcgccctcggaagaggcgggcggcagcaggagccgcaggtcgggcctgaactgccgctgggagaggaagcggcgcccttgccaggaacgtggggctgtggtagcagcaacacctgctccagcttcacctccagcagctgctgcgccgcacacggcaccaaaccctccctacacgaggaggccac

SEQ ID NO: 274655 - DNA, 559 bp, Homo sapiens
tcttgaaattacataggtgcattgctttgggtgttttaaatcacagaatggtgtgtctggaaagggtgtaagaggcttcctgggctatatttcttcattcactgattgcctaaacctacccaacgaggaaaattctttttatttttatcttttgtttttactgtctaaccagatgaataaacagtggaaattctctaccacactcttaacaatcaagtcatttcataaccccttttggtaatgggtgtttgtgtccacagctagatcagaaagtaagtactttttctagggatttttttttttttttaagtttgggaaatagtttgatcaaaagtcatggggaaagtaatctctgattttaaaaattgaagaatactgaaggtgtcagtgagttagaaatttttaaggagtaattattttctgaaatgtgtaataaccgaataataaacaagacaaaactctaatatttcagactgtgatcttcagaggactaggatagtcctttccacaagaaaaagacaaaaaaaaataaagttttaccattaaatacaaaaaaaaa

SEQ ID NO: 274656 - DNA, 416 bp, Homo sapiens
gtcttttgtaggattcccttggttcttcaaaacatgtatatagatagatttgggtctgttcattaagttttcaacagtcattggcaaaagagaaaaaagtaaagaaaaccctcccactcaaaaacagaaactagaaaccttgtttcagggcctcaaaatttggagggtgatttaacttgtccttgaaatccaaaagtaggaacaattttatgatttttagcattaacagaatcgtatcatgtaatggatttattattataatattatacagcacagtgagtggcacattgtaggtgcttaattaatattgttgagtaaatccattattcctgatttaatactttatcatatatatatatactccttgaacttggctctaaacaactgtggaatcctaacggtatgtgaaatatttt

SEQ ID NO: 274657 - DNA, 661 bp, Homo sapiens
agaaatggaagagcggtgggagaaggcgcgcccagcactgaataactgggtagtgcaggcatgaaattgcccgttcattccaccaaagacttgaaaagaaacaagcaaaaactgttgtaacaaaggaaacacaggaaggttttaaattctctttgagagacattttcaagctaaatgtagtaaaatcctcaattataagtttcatagagcaaagcagtaaagcctttatagaacactagcactcattttttgataaactaactgctatctggagagactaaaagacttgtccaggctcactcaggtttaggatgcagaagctcacctttcctgagcaagtcctccttctctcatctactgcattttggggcgggcagagtaaggaaaatacttggatttaagtgacacttgtgcaccagctctggcctaccactttgctacttggtggtcataggcagctctcgtaacctcctagatctcaggttcattgctctaaaatgggctgcattgtatctaatgtatgggttattgtaaggattaaatatgtgactacaaggcagggttttcgagagctttagacattgttagtcttattttcaacatgtaaattcctcctttaagcgcccattcagcatttcctttttaatatctgttttttaaa

SEQ ID NO: 274658 - DNA, 247 bp, Homo sapiens
tgtgttcaggctctcccatttcaaaatactccatggaaaacttctttaactgaaatatagcagtcttgtcatattcttaacttactctaaaaatgtacagtagcaggagctcagggtcagaatatgaattcagtttttctgtgttcacatattgtagttaaggaatatctccttgtatgtgaagttataagaaatgttacctggatattttggacaaattgtatacctagttttaaaaaataaataa

SEQ ID NO: 274659 - DNA, 206 bp, Homo sapiens
cggaaactcggggcgggggttactaagcacactaatttggatagaccagagatggcctggtttgtggttagcgctacgtgactgtccaccatcacctgtgcgtatcctgctggtcccagctctgctgtaggctgctgagtgagctctggcttcttccttgcctcctctgacccttgtttaatcccctctgacataacaggaggtta

SEQ ID NO: 274660 - DNA, 401 bp, Homo sapiens
gtggtctgtatcttaccagttctttgatgcttgttaaggttagctccatggacaatggcaggtgttctctacaaataagtgttccacgtgtagctttaaaacgatgtgtattctctagctactggatgcagtttcatgtgtatctataagatgaaaattttaaatgtgctatttaaatctttatccttcttcatgtttttatctacttgatcatttaattactgagagattataattatggatttattattttcatctggttaattcaccttttactttatatgtttttgaggtttattattagatacatacaagtttagatttttaaatatttttgtgggaaattaacccttttgtcatatgtcataccttctgtatctctaatagtattgtttgaatta

SEQ ID NO: 274661 - DNA, 860 bp, Homo sapiens
tttatgatttttcagtaatagttaattagtatgatacaagagaacaggggtgtggctagcctaaaataatgaataacctatatgctacgatatttatattttgtctttgaaatatatgccccctaattaggccctgtccttcactagctgacagaccatggacaaattaggccttaggctgttatttcatctttatacaatggggttagattagatcagtggttcccagctctgactacattttataatttccagagaacttaaaaaaaattttcccctgggctccaggaaatctctggggagaagccaggtgattttaacctatagtcaaggttgaaaaccactggattacatgatgtctgagttcttttctgccgctacaattaactagacatatggggtttggggttcatttttgtttttgttttgggggttaaacacatcaactgagtttgagatgtcagcttaactcttgggctgttctgaatgactgacctgttaatcccttacctcaaataatgtacaataaataaaaatgaattgagcattcactgtacttttctttccctttaggaagcaaaatgaaatttctgcaaaagaaatgaaatctctgattgtctccatcctgaatatacaacagaaagtgccaaagaaaatatttttctaagggtcaggatcccatgaagtattctacaaaattcttgaaattttaaaaggttaaagagcgagtcaggctgttagaggaggattctcctgttgctgctgtagtaatcactggagaattgttgggaatggtctggcaccatgccatctttactctgtctccattttttttttatagcagccttttctatgtgatt

SEQ ID NO: 274662 - DNA, 763 bp, Homo sapiens
gcagcatacctatatcccagtcctgccagcatctatgattgacatcgtgtgctcacctacaccattccttattggaatcctgtcttgctccttaccacagctccaggacctacccattgaagaggtgctgatagttgatctctgtgcagacaagttcttacaggaggtatctgatgaggatgaaattctaccaccaaaacttcaagctgccctgatgcagattttggaagaacgaaatgaaatcttgactcaggagcagaatttttcacaagatgtgacactcaactctctggtgtccgaagcatttgtcaggttttttgtggagttggtaggacattattctttgaacatgactgtcactgagcgtggggagcgtgttttccaaagggaaccattccgtaagtcccacacctcccgaagtgtacgccacttcctggatctcttcatggaaactcagatgtttgcaggattcatccaggaccgagagcttcggaaaagtggagttaaaggtttgtttgagatccgggccatccagtatttggaaacaattcctgagtcggagcccagtgggatgaatagaattttgcggagtcttggttagttgctgtgttttcctgttagataaatgtggctgaagaccaggcgcggtggctcatgcctgtaattccagcactttgcgaggtcaagtaaggaggtttgcttgaggccaggagtttgagaccagcgtgggcaacatagcgagaccccatccctacgctaaatt

SEQ ID NO: 274663 - DNA, 883 bp, Homo sapiens
gcagcatacctatatcccagtcctgccagcatctatgattgacatcgtgtgctcacctacaccattccttattggaatcctgtcttgctccttaccacagctccaggacctacccattgaagaggtgctgatagttgatctctgtgcagacaagttcttacaggaggtatctgatgaggatgaaattctaccaccaaaacttcaagctgccctgatgcagattttggaagaacgaaatgaaatcttgactcaggagcagaatttttcacaagatgtgacactcaactctctggtgtccgaagcatttgtcaggttttttgtggagttggtaggacattattctttgaacatgactgtcactgagcgtggggagcgtgttttccaaagggaaccattccgtaagtcccacacctcccgaagtgtacgccacttcctggatctcttcatggaaactcagatgtttgcaggattcatccaggaccgagagcttcggaaaagtggagttaaaggtttgtttgagatccgggccatccagtatttggaaacaattcctgagtcggagcccagtgggatgaatagaattttgcggagtcttggaagcaaaatgaaatttctgcaaaagaaatgaaatctctgattgtctccatcctgaatatacaacagaaagtgccaaagaaaatatttttctaagggtcaggatcccatgaagtattctacaaaattcttgaaattttaaaaggttaaagagcgagtcaggctgttagaggaggattctcctgttgctgctgtagtaatcactggagaattgttgggaatggtctggcaccatgccatctttactctgtctccattttttttttatagcagccttttctatgtgatt

SEQ ID NO: 274664 - DNA, 438 bp, Homo sapiens
acatcaggagagcctgagaataaaattcactgaaggtggcagaacagaaagacagaagaaatctgggcccatgccgatgtcattaaactgcttaattaaccagccctggaactgccccacttctggacttattatttttaaggacaggatcccggtccagtctcctgactgcgtagagatccctcttcttcccgaaaggcagtggatgtacttgaaaggagacttcacggacattcccaaggagacctgcattttaagcccagctctgtctgcacttgctgtgtattggactagtcaagtcacccacttcatcacggtgagccagtatatggtatttctcggtggatgttccatgtgtacttgaaaagaatgtgtttcctcctgttgttgggtgaagtactctataactctataaatgtcatttagctccagttggtt

SEQ ID NO: 274665 - DNA, 377 bp, Homo sapiens
ctattcacaggtctgatcataacgcactgcagcatcaaactcacggcctcaagtgatcctctcgccttagcctcccaagtagctgggattataggcatgtgccactgctcttggcttacagatgtgaaggagtgaggcatcttgaaatagaaaatgttcctgcattacctgggtgggcctggtgtaattacaaggaggcaggagggccagaggagatgtgacagtggaagcagaggttggggtgttgtggccacaagccaaggaatgtggacagcctttagaactagagaaagcggaggaatcgatttctccctggagcctccaaaaggaagcctgcctctgacctcagaaccctaagagaataatacatttgtgtt

SEQ ID NO: 274666 - DNA, 1949 bp, Homo sapiens
gggttgtgctccttggcggcagatgggctctggaatcagaaaatcctatttgaggagcaggacctccggaagcacggcctagacggggaagacgtctctgccttcctcaacatgaacatcttccagaaggacatcaactgtgagaggtactacagcttcatccacttgagtttccaggaattctttgcagctatgtactatatcctggacgagggggagggcggggcaggcccagaccaggacgtgaccaggctgttgaccgagtacgcgttttctgaaaggagcttcctggcactcaccagccgcttcctgtttggactcctgaacgaggagaccaggagccacctggagaagagtctctgctggaaggtctcgccgcacatcaagatggacctgttgcagtggatccaaagcaaagctcagagcgacggctccaccctgcagcagggctccttggagttcttcagctgcttgtacgagatccaggaggaggagtttatccagcaggccctgagccacttccaggtgatcgtggtcagcaacattgcctccaagatggagcacatggtctcctcgttctgtctgaagcgctgcaggagcgcccaggtgctgcacttgtatggcgccacctacagcgcggacggggaagaccgcgcgaggtgctccgcaggagcgcacacgctgttggtgcagctaccagagaggaccgttctgctggacgcctacagtgaacatctggcagcggccctgtgcaccaatccaaacctgatagagctgtctctgtaccgaaatgccctgggcagccggggggtgaagctgctctgtcaaggactcagacaccccaactgcaaacttcagaacctgaggctgaagaggtgccgcatctccagctcagcctgcgaggacctctctgcagctctcatagccaataagaatttgacaaggatggatctcagtggcaacggcgttggattcccaggcatgatgctgctttgcgagggcctgcggcatccccagtgcaggctgcagatgattcagttgaggaagtgtcagctggagtccggggcttgtcaggagatggcttctgtgctcggcaccaacccacatctggttgagttggacctgacaggaaatgcactggaggatttgggcctgaggttactatgccagggactgaggcacccagtctgcagactacggactttgtggctgaagatctgccgcctcactgctgctgcctgtgacgagctggcctcaactctcagtgtgaaccagagcctgagagagctggacctgagcctgaatgagctgggggacctcggggtgctgctgctgtgtgagggcctcaggcatcccacgtgcaagctccagaccctgcggctggatagctgtggcctcacagccaaggcttgtgagaatctttacttcaccctggggatcaaccagaccttgaccgacctttacctgaccaacaacgccctaggggacacaggtgtccgactgctttgcaagcggctgagccatcctggctgcaaactccgagtcctctggttatttgggatggacctgaataaaatgacccacagtaggttggcagcgcttcgagtaacaaaaccttatttggacattggctgctgaatggtcctatctgctggctctcccctgagatctggacagaggaagatgggagggtgctcatcacccccccagcataatgatcagcctccttcctagagacagactcatgcagattgagatcaaaagtccctctgcttgggatcaaattaatgtttgacagagctggccaggcgtggtggctcatgtatgtaatcctagcacttcgagaggccgaggcaggtggatcacgaggtcaggagtttgagattagcctggccaagatggtgaaaccctgtctctactaaaaataaaaaaaaattagccaggcatgg

SEQ ID NO: 274667 - DNA, 242 bp, Homo sapiens
ctttgcaagcggctgagccatcctggctgcaaactccgagtcctctggtgagggatgatgaccagttctttctggaggaggctggacattgggctgggagcatgagggtagataagctggatggacaaatacgttatgcactggtgtatgcaattagggggcatacagatgaggccacatattagctatgtcatctactggctgtgtgaccttggataatttccttgtctgaggccgggcgc

SEQ ID NO: 274668 - DNA, 2483 bp, Homo sapiens
agtccctttttcttgagagagtgtggctctgtcaccaaggctggagtgcaggggcacaatctcagctcactgcaacctccaccttgcgtgtctcagcctcctgagcagctgggaccgcgggagtgtgccaccacacccagctaatttttgtatttttttagtggagatggggtgtcaccatgttggccaggctggtctcaaactctcggcctcagcctcccaaagtgctgggattataggtgtgagccaccacacccagcctctatatcccttttatcggtggacccaacaatcttctgtagacagaagactgtgtgaataagccaatggtcccaagagagcacgcatcctaatgagaacggagacagataataaagagggaaacaagtaaaccaactatcaatgattaggagcgtcagatagagccaggtgcagcctggacaacatgatgagatccccatctctaaaagtataaaataaattggctggtcatgatggtgcacacctgtggccccagcttctcagtaggctgaggtgggaggattgcttgagcctgggaggtcaagcctacagtgagccatgatctcaccatgcactccagcctagacaacagggcaaggccctctaaaaaaaaaaatgaaaagatagcatgctttggccggatgtggtggctcacgcctgtaatcccagcacttcggggggttgaggcgggcagatcactgaggtcaggagtacgagatcagcctggccagcacggtgaaaccccgtctctgctgaaggtgcaaaattgactgggcgtggtggctcatgcctgtagtcccagctactctggaggctgaggcgggagaatcgcttgaacccgggaggcggaggttgtggtgagctgagattgcgccattgcactccagcctgggcaacaagagcgaaactccgtctcaaaaaaggatagcatgcttcataaacggtgaaatgacatgcaaaggccatagttgtcaagcaccagtaacaccagagagtggcctgtctttccttcaagcagaccagagaggaccgttctgctggacgcctacagtgaacatctggcagcggccctgtgcaccaatccaaacctgatagagctgtctctgtaccgaaatgccctgggcagccggggggtgaagctgctctgtcaaggactcagacaccccaactgcaaacttcagaacctgagcactttgggaggcccagatggggaggatcacttgacccaggagttcaagaccagcctggccaacatggtgaaaccccatctctactaaaaataccaaaatgagccaggcatggtggcacacgtctgtaagcccagctactcaggaggccaaggcaggaggattgcttcaacccaggaggcagaggttgtggctgaagaggtgccgcatctccagctcagcctgcgaggacctctctgcagctctcatagccaataagaatttgacaaggatggatctcagtggcaacggcgttggattcccaggcatgatgctgctttgcgagggcctgcggcatccccagtgcaggctgcagatgattcagttgaggaagtgtcagctggagtccggggcttgtcaggagatggcttctgtgctcggcaccaacccacatctggttgagttggacctgacaggaaatgcactggaggatttgggcctgaggttactatgccagggactgaggcacccagtctgcagactacggactttgtggctgaagatctgccgcctcactgctgctgcctgtgacgagctggcctcaactctcagtgtgaaccagagcctgagagagctggacctgagcctgaatgagctgggggacctcggggtgctgctgctgtgtgagggcctcaggcatcccacgtgcaagctccagaccctgcggctggatagctgtggcctcacagccaaggcttgtgagaatctttacttcaccctggggatcaaccagaccttgaccgacctttacctgaccaacaacgccctaggggacacaggtgtccgactgctttgcaagcggctgagccatcctggctgcaaactccgagtcctctggttatttgggatggacctgaataaaatgacccacagtaggttggcagcgcttcgagtaacaaaaccttatttggacattggctgctgaatggtcctatctgctggctctcccctgagatctggacagaggaagatgggagggtgctcatcacccccccagcataatgatcagcctccttcctagagacagactcatgcagattgagatcaaaagtccctctgcttgggatcaaattaatgtttgacagagctggccaggcgtggtggctcatgtatgtaatcctagcacttcgagaggccgaggcaggtggatcacgaggtcaggagtttgagattagcctggccaagatggtgaaaccctgtctctactaaaaataaaaaaaaattagccaggcatgg

SEQ ID NO: 274669 - DNA, 1128 bp, Homo sapiens
cagcccagacatgagctctgtggtctgtgtgtgtttactgtgtggccagagcgtgtgaggagtgtgtggaaccgtctgtgtgatgtgggagtagggggataagtgtattggcatatggagtgggagtgtgtatgtgtgcacgcatgcacctttgtgcctgtgatctgcgtcatgcagtgtgtctgtgcctgtgtgggatgtggtccctgtgatgtggggcgtgtatgtcggtgtgtgtgtgtgttgtggggtagtgctaaccgggacactctccaggggaagatcctagctcggatggaggtggaggagttaaccaggagaatgggagagggaccagcacgtgcaaaggcctggaggcatgaagatggagcctggagcactggaggacttgaaagtggtccagtgaggctgggagtagggagggagaggcaggggctgggagggacagggcaggccttcctccaccagtttgaattccgttagcttgagggtgtgtacagccaggaggggtggaggggctgagaggaggccgagccaccactgaccaggtggaggggtagggggtgagcctggaccggggcaggtgctgggtggaggtgggggagtgagagccagagctctcaaccaagcctctgggaggccgcagggcctgggatcgcagacccgagcctaatccctgctcagcccaagagctgtagccagaaggttcttagtttcccctcagtaaactgaggttcaggacatttctggggcacttgctctgtgtgactgggcaagggctgggcaggcatttccagcatgaacacgctttcccaggcccactggttggagggcaccgaggggagaagggggacagaggaaaggagccggaagcaggatccagaatttgaacctaggtggtctgactccaagagggccctctctctcacttgacttcaatagtgacattagccaacttcaatagtgaccccaggcgcggtggctcacgcctgtaatcccagcactttgcataatctcagctgaggatttataagtttaccttggtgggattctccgctctcaaactataaagttctgtgacgacaggagatgggtatttttttctcctcactttatttatttattttg

SEQ ID NO: 274670 - DNA, 452 bp, Homo sapiens
ccgggagcccttaaccggtccgggagcccttaaccctccgggagcccttaaccctccgggagcccttaaccctccgggagcccttaaccctccgggagcccttaaccctccgggagccccccggagcccttaaccctccgggagcccttaaccctgtgtgactgggcaagggctgggcaggcatttccagcatgaacacgctttcccaggcccactggttggagggcaccgaggggagaagggggacagaggaaaggagccggaagcaggatccagaatttgaacctaggtggtctgactccaagagggccctctctctcacttgacttcaatagtgacattagccaacttcaatagtgaccccaggcgcggtggctcacgcctgtaatcccagcactttgggaggccgagacgggcggatcatgaggtcaggaagattctcctaaggacag

SEQ ID NO: 274671 - DNA, 426 bp, Homo sapiens
ccttacttcatctcataatttcacatcaacacaagaagggtgagtacagtgccacattcacattaactgacattatgctatactgttataattgttctatcttgttgttctcttattgtgcctaatttataatttaaactttatcatagggatgtatgtatgtataggaaaaaacaatgcatacagggttcagtactatctgcagttttagacatccactgggaatgctggaatgtattccctaaagataagggtagactacagtataaacatcccaagaggctcttctgatactagttataaggcatcagcagtggcagcaatgtgagtagtattagtgattatttgaaccatcaatttacatgcataccatatgttacagatttccaagaacaggttgagtatccctaattcaaaaatccaaaa

SEQ ID NO: 274672 - DNA, 396 bp, Homo sapiens
ccttgatcccagggtcacccagttaacagtgatgtggctcaaagccagtgtactttttccactcagcttctctgatagtttcagattccattagcactgttaatctactggccaagcgcagtggctcatacctgtaatcccaacactttgggaggccaaggcaggtggatcacttgaggccagccaggagttcgagaccagtctgaccaacatggtgaaaccccatctctaaccacaagtataaaaattagccaggcatggtggcatgcacctgtaattacagctactcgggagcctgaggcaccagaattacgtgaacccaggaggcagaagttgcagtgagccgagattgcaccactgtactccagcctgggtgacacagtgagactctgtctc

SEQ ID NO: 274673 - DNA, 360 bp, Homo sapiens
tcacagagctcagggaaacacttttactggtttattattagtattatgtttatttgtttgttttgagacaaagtcaagctctgtcacctaaactggagtgcagtggaacaatcacagttcactgcagtctccatctcgtggactcaggcagtcttcctgcctcagcctccccagtagctgggactataggcacatgctaccatgcctggctctaccagtttattctaaacaatattaccagccaggcacggtagagcacacctgtaatcctagcactttgagagactcaggtgggaggattgcttgaagccaggagttcaagagcagcctggacaacatagtgagatcctgtctctacaa

SEQ ID NO: 274674 - DNA, 482 bp, Homo sapiens
ttccagccagtggaaaccggacagagcagtagggtggacgtgtcaggttataaatgaccctgtctcttttgttttgtgtactctcgaagcaaaactgctggtgagtgtacccttgctgcagaaaataaaaatggtcttgctgagtaaattaaatttatgttcaagtgctatttgtttacggcactggggaagaagcatttaaacactcagctggcgtccgctactgggtctaggaaaaaaaatcccacacatctggtcctagaagtcttcttctgtgaggatgattcctgtggtgtgagagtagaggaaaagcaccatagagagagctctctgacatacagaagtaaaggaagttcttatcagcaacaagagagaggctgacagagctgcttagaaacagagttccctgattccagaggttcaaagccagagttgctgtcagtccattggaggagatgccgttgctgggcaagttttttctc

SEQ ID NO: 274675 - DNA, 264 bp, Homo sapiens
agccacttaagctacaatggcaatgtaccttggggtgattgcatgttttaaaactatggaaacagatttttggtcaggcagaattaaattggactcatttcaaatagatgagatgaggtttgttcagccatcctgcagggatagtaatagggaagaaatgtatttcagttttcacagactcagagaatatagtagtgttcatcaaaatatcctccataaagtcctgtttatattcctacttaaagtaaatatccttttaaaagt

SEQ ID NO: 274676 - DNA, 391 bp, Homo sapiens
ggcattgtgattttctccttactctttctcagtcactcactctgggggaagccaggtgctatgttgtgagaacactcaagcagctcaatggcgaggtccatgtggcaaggaactgaagccacctgccaatggccaacaggaaacaagtgccttatgtcaacagccatgtgagtgaaccatcttgaaaacagattctttagccccattcttcagatggcagcaaccctagctcactttttactgcaacatcataagacaccctgagcagtcatccaactaaaccactcttgaatgcctgacccacacaaactgtgagataacaaatagttgtgttacattgctaaattatgaggtaattggttacacagcaataaataattcaactaggtta

SEQ ID NO: 274677 - DNA, 577 bp, Homo sapiens
cattaaaaaaaaaaagaatgatctcattggtgatatatgcacttttcatgtcccgtaaccagttacttcctagtatgccatttgccttcagccttcagttctgtctgtgatgaactgggatacaattgctgtattaagaatgtccttcccttcctgtccaagttattccaattccaagtggtctctagacttctcttctgttagggggagacagatttgtacatacatgtatatgtgcactcacacaggaatgtagctaacctccatttctaaacgcattgctttaaagaagaagaaaaactgtcatacatcagcttttagaaaatttgtttatttccaaatatctatagagatgctacaagggcttgcactcttataagattttaaggcatgttcattctacccagaatacacctggcattttatatgacaaaagaatggtcattctaggtgcctcctgttttccagaaacctagtgttctggctaatcttagagcttcttcactcttcattcatcatagatgctccaaattactgggatttttaataaaagaatttaggataaagagtgaaagtg

SEQ ID NO: 274678 - DNA, 371 bp, Homo sapiens
ctgcaacggtaatgggatgatgaagccaagctgggagcaggggtgcactgagaacagacgccgcttctgcggtatccctgccagaaagcctcaacctgaacctaatcatgaggaaacatcaggccaacccaaactaagggacaacctacacattaaacgtcttggaatctccgaaagtgacaaggtcatgaaaatcaaggaaaggctgaggagctttccagactgaaggcagcaaaaagacttggcaaccgaaagtaacggcggcttctgaaccagattctgttgatgcccacaaggacatcactgggaccactggcgggacttccctgggtctagactgaatggtattaaagtatccatgtcaatttcct

SEQ ID NO: 274679 - DNA, 880 bp, Homo sapiens
ccatgtaagcccccaagctctttacaggggagaatggtgatgttttggctccattgccaggtgtattggggaggaccgtatgctatttattaattgttgttaaattcgaacttcctaagtaaccctaaaatctatgtagctctaaaattatgatagggaacattattggagcttctgatatggatgaaagacttgggcaaaaattgtttagttaggattgttggcaacagtactttaataatattgacatgtagtagtgatttgggacacagttttactatgactttgtacagtttagaaacatgggggaggagtattcccatcatcactcaccaatttagctgagatttcagatatagcctaagaaataactctgcttctcttttttccctttgatattaagaagaacagcctctgtggcttattgtcttacctgttttctttcatgaaagctctacttcctctactataaaacacttaatagcattattaaaaaacaaacacgtacagagaacgaattgtttggatctccccttcctttattttggaggttttgttgttgtttaaggtcttaacagcttaaattatagaatagcttattaattattgaataatagaactggaaggaaccctagggataacctagaccagtcctgggaggtgggttctagcagtctgttttaacaagcctttcaagtgattctgatgcatgctaaaatcaatgaaccactgaactccttcatgtgacggttaatgataggcctagagtatcagtatctatttcacccccaatgtaagagctagtttttaagttttatatcagacccatgcctactctccatcttgtgtgtgtcttaaaggtgcttagagaaacttcccc

SEQ ID NO: 274680 - DNA, 869 bp, Homo sapiens
tgccacgcagaaaaacgaggggttgcaactgccacgcagcaactgccacacagaagaaggagggactgcaactgccatgcagcaactgccacacagaaaaaggaggggttgcaactgccacgcagaaaaaggaggggttgcaactgccacgcagcaactgccacgcagaaaaaggaggggttgaaaagggagtagcttctgatattcagaagctattggaagagatgctcaaagaagaaaaaattaccataatccaataaagaagaagacctgagatccaggaagcagatgatctgaactgcagagaaagttcaggaaagttccctcattcatgatgatgggaaataacagtaaattctgtacagcagtcttggacaacaaccaatctaaactggcacagtgcagaggcaatcaacagagaacataatattgatagaatgcctgacgcttttgattgtattcacaggaaacataaacaattggaagacagtttatgaatgaattagtgataagcattttttttcaacttttattttagattcaagggtacatgtgcaggtttggtgcctgggtatactgggtgatgctgaggttgtgttacaaatgatcccatcatccaggtactgagcatggtatccagtagttagtttttaacccttctcctgtctctctcctggtggtccccagtttctactgttgccatctttatgtccatgagtatacaatgtttagctcccacttgtgagaacatgcgtatttgcctatttaattatttgtttatttgttgagacatagtttcactctctagcccgatcttggctcactgcaacctacgcttcctgtgttcaagcgattctcttgcctcggcc

SEQ ID NO: 274681 - DNA, 1177 bp, Homo sapiens
tgccacgcagaaaaacgaggggttgcaactgccacgcagcaactgccacacagaagaaggagggactgcaactgccatgcagcaactgccacacagaaaaaggaggggttgcaactgccacgcagaaaaaggaggggttgcaactgccacgcagcaactgccacgcagaaaaaggaggggttgaaaagggagtagcttctgatattcagtaagtacgaatcggccttaggttccctgcctcaagaccctattctcctgcctcacttttagctaagggttattacaaaacagtcagaaagttaagacaaaatatgaaagtttataaagtaaaaagagttacagtgagctaagtataacttattgaaaacatttttttaatttagtatagcctaactgtgtttatacagtctacagtagtatacagtaatatcctagacctccacattccctcgccactcactcactcactcaccgactcactcagagcaacatccagtcctggaagctccattcacagaagctattggaagagatgctcaaagaagaaaaaattaccataatccaataaagaagaagacctgagatccaggaagcagatgatctgaactgcagagaaagttcaggaaagttccctcattcatgatgatgggaaataacagtaaattctgtacagcagtcttggacaacaaccaatctaaactggcacagtgcagaggcaatcaacagagaacataatattgatagaatgcctgacgcttttgattgtattcacaggaaacataaacaattggaagacagtttatgaatgaattagtgataagcattttttttcaacttttattttagattcaagggtacatgtgcaggtttggtgcctgggtatactgggtgatgctgaggttgtgttacaaatgatcccatcatccaggtactgagcatggtatccagtagttagtttttaacccttctcctgtctctctcctggtggtccccagtttctactgttgccatctttatgtccatgagtatacaatgtttagctcccacttgtgagaacatgcgtatttgcctatttaattatttgtttatttgttgagacatagtttcactctctagcccgatcttggctcactgcaacctacgcttcctgtgttcaagcgattctcttgcctcggcc

SEQ ID NO: 274682 - DNA, 650 bp, Homo sapiens
gtaagtacgaatcggccttaggttccctgcctcaagaccctattctcctgcctcacttttagctaagggttattacaaaacagtcagaaagttaagacaaaatatgaaagtttataaagtaaaaagagttacagtgagctaagtataacttattgaaaacatttttttaatttagtatagcctaactgtgtttatacagtctacagtagtatacagtaatatcctagacctccacattccctcgccactcactcactcactcaccgactcactcagagcaacatccagtcctggaagctccattcacagtaagtaccttatacaggtataccatttttacatcttgtatagtgtatttctactgtgccttttctatatttaaatttatttaaatacacaaatattacgtgttaaaattgcctataggattcagcacggtaacgtgctgtacagacttgtagctaagtagcaataggcactgccatatagaaggtgcagtagggtataccatctaggtttgtgtaagtacactccttgatgttggtacaacaatgaaatcacctagctgtgcatttctcagaatgtatccccactgtcaagtgatacatgactgtatattaatatgaagatgaaacctagctatgtaaaga

SEQ ID NO: 274683 - DNA, 700 bp, Homo sapiens
gcggagcgcgtctcctgcttctccctgcacccaacgatttccgatatcatatcatataatcatctcaactccaaatatgacgttggcactgttatttccattttacaaatgaagagatgaggttgagaggtatcgtttattatcttggcctataagtacatggaagagttggaattcgaactgagagccaggatatgaacttacaagtgccttgctttagcactgcctgtcccagaaggattgtacctttctgcttctccagaaactaactaaagattttctcacctgctgagagttgaggatgttgcttcaggcatgttcagacttctggaggggagcattgacctgaaaccacagtgggaatgcatcaagtacagagtataaagaaaatctatcaagattggttcaacagcctttggctatgaaagtctcaaggaatgactaataatcagttttgattagtgagaagagagaagcaggaataaatcagctccacacatgtgactcaacctaggatcaagagttccagtttttcccatgtgaatgacttagtttttttttaaatgctattgtggaagaataaatagtgtatgaagactttaaatttttaaatccttgaaaactttataaaatgagaaaagtttgctcatataatgaggaattatattgaaactaaaaatatgtactgctgtaaagaatg

SEQ ID NO: 274684 - DNA, 576 bp, Homo sapiens
gcggagcgcgtctcctgcttctccctgcacccaacgatttccgatatcatatcatataatcatctcaactccaaatatgacgttggcactgttatttccattttacaaatgaagagatgaggttgagaggtatcgtttattatcttggcctataagtacatggaagagttggaattcgaactgagagccaggatatgaacttacaagtgccttgctttagcactgcctgtcccagaaggattgtacctttctgcttctccagaaactaactaaagattttctcacctgctgagagttgaggatgttgcttcaggcatgttcagacttctggaggggagcattgacctgaaaccacagtgggctataacagtaacttccaaaattgaagactgaaccacagcagtcaaacttatcaaccttttgatcaaaaccggtgactaaaaggaatatgaaacctgtgatacagtttcagaaaaccttatttcaaatcttattcatattaacatggccactgtcacatgtgctgaaaattggttgagagaccgtaaataaaatgaactgttattctgcaaaaag

SEQ ID NO: 274685 - DNA, 574 bp, Homo sapiens
aatcatctctccattcaggaactcagcacagctgctaccatgaggagactgcgaggctccacattttcattttgcgctgggcctcacaagtgatgtagccagtgctacagaggccattgggaatcaaaagatgaactttcaggctgtatttggcagatgcatgggcccagtggtgaactctaatgggtaccaaaagcagcattcactagaagatggcctccaggaacccttcagcaacaaaagatcaaagtgccttcaggcttcccaataactgcctacaacagtgaatggccttttctgccattcccaatgagtaagctttaaaaaaaaacagaagatctggcaacattgggccaccttatgttcacctggcaacaatcagctgaaccaagaaatcactgagccctttaaacctcccagctcactaccgtccagcatcttcagtccctatgacattgtatctgccctctttcactcatttggatatccagtggtccctgaaggcatctgaattggtgacctctgtaccaaagatgtgagaaacagtcattaaatatgcagcaacctggaatga

SEQ ID NO: 274686 - DNA, 427 bp, Homo sapiens
agaaacatcacataggctggatggtgaagtgctctaagaatatctattcaaaatgactatgaaaaggttctatctagcatacagttttcaggaagcggatatgagggcacaggggatgggtttggggtcaatgaatgcatgttctcaggcttactaatagatgagaccatggtagatattcccttgagcttccagaaagcacccagcaagttaatgcattcatgccactgtaaactagcatttgagtaaggggtggtccaaacaccctacttatggaggcaaagagcagcagctcatctgcagaccactaggggttgttcgcaatgcaacagaaaccacgtcttatccttgacagggcagccaataggtaatcatgttttacacatgtcattttccaacttcatcttctttcatccttctgtagtat

SEQ ID NO: 274687 - DNA, 498 bp, Homo sapiens
atggacctgaaacttccctcagtatgtcttttaatttttacttttgaaagatagaaatgcttacatatttaaaatatcaagttaaaccagaaaagaaaaaagaaacaagtcttaaaatcaaaaacaaatagaaacaagtgaagaatctaaaattggtataaagatattggcaacataaccacacagagaaaacatttatttgaagggcttttaaacatgatgtcctggctgtatattttagtgggatatattctaaagacaaaaagaacagcaaaaaatattttaaactttactccatagtctttgttgttagtgttggttttataatttcataacaagttaatgtgtattatgaaataaaacaaattagtaaatttgttaatgtttatagaaatcaagattttcagtataagaaaaatggatacaaatataaaagagctaagaaaaatactgtaatattcaatgttaaattcaacattaaatagacattttaaaaca

SEQ ID NO: 274688 - DNA, 401 bp, Homo sapiens
gaatatgtccatcatacttacttggttgagcatcccaaatcccaaaatccaaaatccagaagactccaatgaacacttccttacagcatcatgtcagcactcaaaaagcttcaaattttggagcattctagatttcagtttaggtatagtcaacctgtatactttaaaactagaggacaagggccttccatttagaaggtctgagttcaaactcacttcctctctgtgtagacttggacaactcatttattttttgggttttagtttcccatgtataactagggaacctcatagaaagtagttttggtaatgaactgaaaacatacagaattcaggacagtgctgggaatgaactgggaagggctgacctagcactcagaaggactcagtgattctgagct

SEQ ID NO: 274689 - DNA, 229 bp, Homo sapiens
tggtttattccaaaaaaaagaggtcaatataaaatgatttcaaagagaggaaaaggcagagaagcatctgatggaaagctttctattgtacctgcaagttgccctgtttcaaccaaagaggcttaatttttggcagtgagtgggttgcagtgtagacagcctactcacatcctttaagcctaggttggacatgtggagaattcacagatcctccaccacagagacatgt

SEQ ID NO: 274690 - DNA, 415 bp, Homo sapiens
cacttatgaaaggctcatttcctacattgtttgataaagacccaataaaaactcaacaattttttaaaaatgaagctttactcaactacataaaaattatttcgttttccattgctcatgtagtgcttatgcaattagtgtttattttatattggctctagcagtagaaataaacatggtgacatgaaaacaaaactttaaaaagtaaggatttaacatgtttatttgtaacatgatggactttaatatattcaaatattatataatatgcttcatagtactttttagttcaaaccaatttttagaaatggttataagcatctagagggtaaatttgcagttctcctatactctgtatagcactatatagtgcttttgtgctttttattaaaatctattttgactttataataaa

SEQ ID NO: 274691 - DNA, 477 bp, Homo sapiens
aagcttggaggatggccatcgtgtgctcctgagttctgcaaaggaagaagtgacaaattacatggccagcagcagcttacttgagtgtgacctttgctgacaattctggttcctgccctgtgtcccctggtgtcatttttacaaaccttcctaaattccattaccagatgaacttgcctaaaatctggctttttagacatcacctactgctcagaaacttccagtggctccaggtatccacatcataggatttccgctttcaaaccggatgggtgttcaagactctacactttggtgctatttacttctgcaagcttaagttctactattcccgccatggacctccggcagcatgccctgtacattccatccccctaccttgtccctttcctggccctctactttttaacgtgacacttcctgtcaagtccaaccccttcatgaaagcttcctggacctttccagccctttctaatc

SEQ ID NO: 274692 - DNA, 322 bp, Homo sapiens
aagaggtgggagtacgggcagaaatcagccaggtagaggggaggtggctttccagacaagaccatgggctgagcaaaggccccagatggaggaggaggaggagcggacaggccagtgtggggagggtctgcgtctgctgggagcagagagaagccccatcacaccggctccttccttgggaggccttctcaccttcctagagggagcagcgcccccatcctgctccccccacctccctgcagcctgcacctgcctatcaagaagccttaccccatctcaagcacacacttgggtatacgttggtctctgccaccagctgcag

SEQ ID NO: 274693 - DNA, 723 bp, Homo sapiens
aagcctggaactctgtggtcctgcacctccccctacaccccccaacaaaaattagcctccaatcagctcctggagacaatgttggtgggaaccacaagggttcctgggcatgcccaatctctggcactgaagaggagattcaatcaaaataaatgtatgctgtcgaggccaggctggccatatgttcctgccaggcagttgtcaggaggagatatttgttacattcaaatgtggacacaagctcctacgaaggcaaacacttgtcatttaaagggacatctgaatatggcagcatgtttccagtgataacccaatttcattttacagccttttccttccctttctcttgggctctgggcctccttaccaacacatcctgttggccagcctgctctatcacagcagtatagttgaaaacctaggcacagctttctacccataagtagctttgtaatattcctaggaggaacttcctttctcccttcctctcccacattgcctctttgtccagatgttaacgtggaagcatattgactgcctactttcaagcccttaactctctaatttcactgatttctgtaatagaaagagctattattattaagtttttatcacagagctaaagtttagtttttgcaagtgaatagaccactattctccttcctgtgttagtaactgctttttaaagctcttgtgttctattaaaataacaatataaaatta

SEQ ID NO: 274694 - DNA, 254 bp, Homo sapiens
gtgggactcacatagtgtggtatgattggtttacaaagaagacatttaggttcttgtcgatgttatcagaagaggacaaatggtttcgtatttattattccatgcttcaggggcattggtgggagtgtggaacggaaaatttaaacatcagaaactccattaggggacgttgatgcactgaatggaagtcacaccagcaaattcttctgcggtgagggcggaagtcacaccagcaaatcctgctgtgggggcgg

SEQ ID NO: 274695 - DNA, 404 bp, Homo sapiens
ccaacactaggacactgcagtgtgattttgagcatctgtcgccaaactacacagcctcttggtagtactcacccaataacccttagagagtcccttgttgccttcaagttttgaatagtgagttgcaattagaagaatggattggaatctgtgtatatcactctccacaaagctgagaatgaagcaatcgcctgactatgatctgagctagttttagaaagggaataaaatgaaaataggagttaaaatacttctgtcaaatggtactcactgcacaatccaaaatcaacttgctttttgtaggtaatctctcagatcttacaatttcgattcaccaagtgaaattacatgagaattaggtcttcatatgtttccatccaagaactaaccactttaagtgtttc

SEQ ID NO: 274696 - DNA, 588 bp, Homo sapiens
ggcaggccagttggcttcctggaagctcaggttcttcataaagatgagaatatcaacattaccttagctgaattatgtgaatcaaatgtgaaaatgttttataaaccctaaaattctatttttaaaaccatgaaggaaagactgacaggctatattagataaatattaaatatttctgcttggcgaaagagcaaggcaccaccactatcaaatgataaactagaagaaaatatgtgtaacacatctgaaaaagagttaatgtctttaaagaattccaacaacttgataagcaaaaagaatccaagaaggaaaaaaatgagcaatgaataggagaaatgtgaataaacttaaaatatgcgaaaaggtactcaaccttactggttggcagagatacacaaataaaagatcaattttgccgccaggcgcggtggctcacacctgtaatcccagcactttgggaggccaaggtgggcagatcacgaggtcaggagttcaagagcagcctggccaacatggtgaaacctcatctctattaaaaatacacaaaattagccaggtgtggtggagtgcacctctaatcccagctac

SEQ ID NO: 274697 - DNA, 212 bp, Homo sapiens
gcatcttatcttcatggcatgaaattgtcatttaaattactctttccgtttgaaaggggagggtatccttatttcccttctgaggtactctgagaaggctttgagtttcctttttcatgtattaatgtataacagcctaacagctcctagaagagggtattcttactagaatggctacatacgggtgacttcagttacatacaggtgacttc

SEQ ID NO: 274698 - DNA, 430 bp, Homo sapiens
tgcattttatagacagtcatgaggcatgcaaattggtgtaatgtatgcagaaaaagaaagggaaattttcagtgtgatactacagttagtccactgtatacctagaattgtctttttcagagaaagatggtggcctttggaaaaggtacagatttgggaggaagatcgttaattcaatttgggcatgttatgtccaaactacattaaatacttgagaactatttctttaataatggatgagtgaagtcagttcatttccaagcttcttatttgtcttatctgtgaaagaaaaattgtgatgtctagtacccagatatgtaaaaagtaaatgtaatctaccacattaaagctcaaaatgctcgatgtttttgcaaatataaaataatgtgacttactttaaagataataaattaaatattaaacatggctt

SEQ ID NO: 274699 - DNA, 510 bp, Homo sapiens
cctccataccttttaaaagtgcaatctacttttgctttctacatttaatcactatctgttcttgacttcaactttgcaaacatattttttaaccattctttttcacatttcccttcctactggccttccggatgaactgtcaagtttagcagtcttttctcagtgatcatactttcttcagtgtttgctgttattgtttatactgtctttatctaaatttcttaaaatgacacagacacaagttaggcccattcttcttactgtaaacagatgaaaatgttggataaaatataaaagttttctcttatgtatacagttgatcttgagagagaaagtgcccaggtactagaaacttagaaaaatcagtcaactttaagggaagtgtggccttgggggatttactagagataagattcagtagttggggctgaggttataatgccattcaatgaaaggagacagaactgtgggaactgtgtgcttaaaaaaattaaaaaatgaaaagtgttc

SEQ ID NO: 274700 - DNA, 400 bp, Homo sapiens
tgggcatgcttccacaatttctctaaaagtccctttcctcatctatataaagtggaatcataatccccataccatagaatcgttttgatgtttaaatcaaggatcaaactagctatttaaggacctgttctggggccaggcatggtggctcacacctgtaatccccgcattttgggaggccgaggcaggtggatcacttgaggtcaggagttcgagaccaaccttgccaacatggcaaaaccctgtctctactaaaaatacaaaaattagccaggtgtggtggtgcatgcctgtaatcccagctactcgggaggctgaggcaggagaatcgtttcaatctggaggcagaggttgcagtgaaccgtaatcagcctgagtgagagagcaagactctgtctca

SEQ ID NO: 274701 - DNA, 220 bp, Homo sapiens
cttttaagaagaaaggaagggggaaattgatttaacaggaaatgactgtactcttttttggtggcacctttatgtgccatgtcttatttcatcttcatattgaaccttaaagaaggcagaccatacttttttatatttgtggataaggaaattaaagtggatttggggattttacttggacctctctgactctaaactcaagttatttttactgcagagc

SEQ ID NO: 274702 - DNA, 469 bp, Homo sapiens
ttcaagtggatggccacctctgggcggggatctgcattctgcttattccaggtgttttccaggccacttccccgattatgtaactttgatcaaatccagatgcggcagaatgtttgatagaagaggtcaaatggcatttgagaagaaaagcatttctgtattcatgactttggtttaatttcctgtgtgggcctggtctgccaaagttgtatgctcatggccacgaggttgacgcaccagagggaggcactcaagtgccttttcaggacagcctgaaggaagcctccctccccagcatgctttttcatgttaaattatcaattatgtaagtttagggccaggcgcggtggctcctgcctgtaatcccagcactttgggaggctgaggtgagtagatcacttgagaccaggagttcaagaccagcctggccaacatggcaaaaccccgtctctactgaaaatgaaaaaaa

SEQ ID NO: 274703 - DNA, 535 bp, Homo sapiens
cccttacatacgtggaataaatcccacttggtcatggtgcatacttcttatatattttgaattttgttttcaaatattttgttgaggattttcacatgtaagttcatgacagatattggcctgtagttgtgtgtgtgtgcacacgtgtgcatgcagtcatgctgtcttcggtttgttatcagggtagtgtaatactggcctcataaaatgagttgagagatatattccccctcttctatttttctggaatatcatgtaaagctgatataaattattctttaaatgactggtacagttctccatctgggcctagagatttctgtttgggtagatcattagtagttcaatttctttactggatatagggcttttcgatactcaacttcatcatgggtgagttttggtagtttgtggtttttaagaaattaatccatttcttccaagctgttgaatttataagtgtgaagttgttagtagagatccttttttatttttgatgttggcaaggtctgtaataaagtatttcatttttaaa

SEQ ID NO: 274704 - DNA, 556 bp, Homo sapiens
tgaggaagccggccccctcctacagccctgggtcccacactaaccatgccttgggacttaaaggatgaggggtcgctttgatcagaagagctggagatctgaggctcaagggcaggcctcggttcaaagccagctgcacttaattgactgcaacatttgtccagtctctcaactttctgggcctccttgtttataaaatgggtattcatgaccatccatctcccaaagctgctgtgaggccccagtgagaagacttgctgagtgctaggtaaggggcccttagggagaggtggggtcttgaatcttggctcagggccctctcctggtctctgtcacaaggcctggctcctccctccccttccatcccaggactggccgccatggtccaaggtgagccttcccttccaggctgtgtttctagggaggcgctgactctgcctcaggactatgctcactgtgcaggacagtctctgcacccaagtgaaataacagattcaaagagcctgaggtagagtaggtgctgaataaatgatagttggaattaacatcaataata

SEQ ID NO: 274705 - DNA, 344 bp, Homo sapiens
cgtctcaaaaaaaaaaaaaaaaagaaaaagaaaaagaaaagaaaaaaatcttcttagtattttaaaggtgcaaaatccatttggcaggaaaatacttttacccagaatgtttgcacatagattggagctctcagttgtgccatttatttattagtacctgttcttttgttttgtcatgaaaaaaacatatgtatgagacaaagtataaggttttatgttattaataatataaactattttggctcatgccttaatcccagcagtttggaggccaaggcaggaggattgcttaagtccaggtgtttgagaccaggttggccaaaagaatgaaaccccatctttac

SEQ ID NO: 274706 - DNA, 485 bp, Homo sapiens
taaaggatactaatgagctaggcttatatcttaaaggatatctattgttctcccttcacatccagaggtttaaagaagaactccatgtctcagaacgttataggaggtccaagatttaatttgcatccactttcaccccctcccttaagtcgtcctcaccatatttgtgccttggtcttttgtcataactgttccttctgaaaaatatgctgatatttcttatgtgatctcctttcagaattaactgtgattgttatgttgaatcatatttctgcattctattgatagtatacctataactgattatgctgttatgcataactttagtaagatatttataatacctataacattcataaagactatccctgggtcagctattagaatattactcaatatgttgtggaaagtagatatgcatacgttaagttttgagtcaccaggtgataactttaaactcattgaataaaagctaatatataaca

SEQ ID NO: 274707 - DNA, 382 bp, Homo sapiens
acatactcatttcagctctacaactttttctggaatggagcagcttgtaagaggacatcattaattattctgcatgttctaagatatgtgctatggaatggaagtggatttattttgcagcctgaattaaggtgggatgccctactacctgtatccagaagcttgtacctctcaccttaggggaatggagaacagcttccttacccatgtcctgtcactaaaatagagcaactgagtacagtagtgcccccttgtccatggtggtttcattttccatggttacagttatgcacagccaactgcattcagaaaataacctctttatagactcatcattgagatgccaaattatcacccatgttctctgtacaactggatatta

SEQ ID NO: 274708 - DNA, 431 bp, Homo sapiens
aattaatcataaatgccaatgtttaagaaaatcctacttcagttagaatagtaagggaaatggataagacttcacttttgtggccatctgaaaggaaagttataaataggttcagttggtttaaggagtcaaagaccatcttgagtaattggacctgggaaagacggaagggcattgtaggggatatgtgtgtatcctgtccagggaaacacttgacataacgagaattacccgagcttcaagcagtgagaaaagcaagagatacacagaagaatatttctgagttaacaaaggggtaataagttaagtttggacattcctcctataatattaatgtttcaacaatctggctcatttatttaacactcatactggggacctactttgttccaagtgtgtaggttatagtaggcttttgatggaaaaaatta

SEQ ID NO: 274709 - DNA, 1109 bp, Homo sapiens
gccgggggccaccccgcaagttctcacagcctgagcccagcgctgtcctcaagagacacccgcagcctgagttcttcggtgatctccctcgaaagcctccactccccagctccgcttccgagagctcactgcctgcggccgtggccggcttcagctcccggcacccgctcagccctgggtttggagccgctgggacaccccgctggaggtcaggaggcctggttcacagtggaggggccaggccaggcctcagacccagccatccaccccggcggaggcctctgccccctgccagcagcctgggacaccctccagccaagcccccgctgcccccggggcccgtggatatgcagagctttcggagaccctctgcagcatccatagatctacggaggacccgctcggccgctgggctccacttccaggaccgacagcctgaagacatcccgcaggtcccagatgagatctacgagctgtatgacgatgtggaacccagagatgactccagccccagccccaagggcagaggtttgttggtggcctgcccgagtccctgcaaaacattcggggcaaggccattttctgccatgctcctggtgtaagagcaagtaacattttaggacctgctggctcctgctgggtggaactacataaggggagcccagaggcgaaggaccagtgagaaggctgttgtaggcagaggtgtggcccaggttggcagcaggagatgtgggagcagtgggtgaattcagtaatcaaaagcaggcatcaggccgggtgcagtggctcatgcctgtaatcccagagctttgggagcccgaggcaggaggatcgtttgagccaatcccagggctttgtgaggccaagacaggaggatcccgtaagcccaagattccagaccagtctgggccacagagcgagacctcatctctacaaaaaaacttaaaaatcagccaggtgtgacaagcatctgtagtcccagctatttgggatgctgagacaagaggattgcttgagtccaggaggtcgagactgcagactgcagtgaggctgtgactccaccactgtactccagcctgggcagcaaacaccctgtctcaaaaaaaaaa

SEQ ID NO: 274710 - DNA, 314 bp, Homo sapiens
gaaggagaaggatccccagccacagcagttgccacccatggacccaaagttgctgaagcagctgaggaaggcagagaaggccgagagggagttccggaagaagttcaaggtgaggcctctgagctaagcaggagtcctggcagggcggagaccagggtcccaccgatcccaggctcagaaagaagacaggggcccaagggcggcagcacaagcagaggccctaacatctcgcgccccagtttgaaggggagatcgtggttcacacgaagatgatgatcgaccccaacgctaagacacgtcgcgggggtggcaag

SEQ ID NO: 274711 - DNA, 1101 bp, Homo sapiens
gccgggggccaccccgcaagttctcacagcctgagcccagcgctgtcctcaagagacacccgcagcctgagttcttcggtgatctccctcgaaagcctccactccccagctccgcttccgagagctcactgcctgcggccgtggccggcttcagctcccggcacccgctcagccctgggtttggagccgctgggacaccccgctggaggtcaggaggcctggttcacagtggaggggccaggccaggcctcagacccagccatccaccccggcggaggcctctgccccctgccagcagcctgggacaccctccagccaagcccccgctgcccccggggcccgtggatatgcagagctttcggagaccctctgcagcatccatagatctacggaggacccgctcggccgctgggctccacttccaggaccgacagcctgaagacatcccgcaggtcccagatgagatctacgagctgtatgacgatgtggaacccagagatgactccagccccagccccaagggcagagatgaagcgccctcagttcagcaagccgccaggaggccaccacaagacccagcgctcaggaaggagaaggatccccagccacagcagttgccacccatggacccaaagttgctgaagcagctgaggaaggcagagaaggccgagagggagttccggaagaagttcaagtttgaaggggagatcgtggttcacacgaagatgatgatcgaccccaacgctaagacacgtcgcgggggtggcaagcacctcgggatccggcgcggggagatcctggaggtgatcgagttcaccagcaatgaggagatgctgtgccgggaccccaaaggcaaatatggctacgtgcccagaacagcgctcctgcccctggagacggaggtgtacgatgatgtcgacttctgcgatcccctggaaaaccaaccactccccctgggacggtaagaccggtaggcgtggggccaggacagccagccagcccagcgcccgctcacccaggagccctggatcccggcgcgggaaagtcacagagctgcctgggcttgtacctggccacataaagccccagtttaaagcaatc

SEQ ID NO: 274712 - DNA, 426 bp, Homo sapiens
catggaaggtggctctgtaggattactaaacattttgagaaaaatcacatttcaacttcacctttgtaagaggttgtgctgggcttcctttccaaatgaaatgcggtgtgacagaaaatagactcatgtagctctctttagtgggatagctttctttctcaacatcaactaacacatctcctaggtgtccttaaagtttcaacctataaatattctacctcattaagcataaggaccagccatggacatatgccgctagtgtccactttccttcagagatttagggtgatgagaagataaagggtctgcttaccagatggagcttgtcagattagcaattggagcagagtaaatatcgctgtcatattgttgttttgaagcacaaagaaccccttttgtataacgcatgtgcatatttaatagttt

SEQ ID NO: 274713 - DNA, 801 bp, Homo sapiens
ctacatgctcggagagttcacttagctatttagggatccagagtctttccaaggttgaccttggaagctctgatcactttcgtattttgagaaggggaaggcggagaaggaggaggatatgggtacagaaggaagggaagaaagaggaggaggaaaaaaaaataatgctgatgggtgctacaaagctttaaatattcacatgtaataaaataatgttagcatataaatataccatcccatctgtataattacaacatttacaagataactgcagagtttactgaaaatattcattgatggtgtgttgtagacactctggatgaagaatgggacatggatttcaagttgtgtgataaacatctactttcagtcctattagtgcctttacttcatttgcaggacatatttgaatttcaaacttaacatcttgtgtaaatatgagactggggccaaagacccagctttttccactcattctcctttctcctgtgacaggcgctggacacatccaccctctccccttattctgtctttaggttccattgtaggtaaatctgttcactacatgtgattcttgatcctcaacttgtgacaagctaaaagcttagattacttgcagctccacatttcagaaaactgcactttgcctccatcaggtattcccttcatttcccatggatggtcactgtggccagcagcattttaatgtcttgatgcctaggagatacaggggctagtgtgtggtctggcctctgtgtgactagggagtaactgaaatctacaagtttgcatatatacaaa

SEQ ID NO: 274714 - DNA, 333 bp, Homo sapiens
ccagtcaggtcaggcaccagtgcccacgctcggtttagttgctgctgcttgtccactcgggtgtgggccctccatggctgacatggccattgcactggcttgagccagactgcatgaagagggggactgggggcggggctccctgtctcctggcctctgcttgagccacagctctgccctacgagctgggtcgttcaccgtctttgagcttgagtccccattctctggctgggatctggtccttgctttccagggctgtggcaaggcctgaaagccctcagtgccatctgggcatctgtgtcccctgacacccatgctggagagcctcagtgg

SEQ ID NO: 274715 - DNA, 366 bp, Homo sapiens
gatacaaagaatgtgctcttaagactgttttaaaatccaatatgtatccatcagtggatgcatgggtaaacaaaatgtgatatgttcatacaatggaatagcatttgtccataaaaaggagtgaagtggccgggcacagtggttcatgcctataatcccagcactttgggaggccaaggcgggtggatcacgaggtcaggagttcaagaccagcctggccaagatggtgaaaccccatctctactaaaactacaaaaattagctgggcgtggtggcgggtgcctgtaatcccagctacttgggaggctgaggcaggagaattgcttgaacccggaaggcagaggttgcagtgagccgagattgcgc

SEQ ID NO: 274716 - DNA, 487 bp, Homo sapiens
cactttctacctcagatcagaggtcaatgagcaggcatttattaagatcctgcatgctcatctttcttacctcccttcttagaatctaagctctatgagtctacatctcacaaatcctagctaactgcagaccctgaaatattcacacattatcttgatagttttaaaaatgtatctattacattagaccaaaaaaaaaaacccaagcctggcgcagtggctcacgcctgtaatcccaacactttgggaagttgaggcggtcagatcacttgagcccaggagtttgagaccagcctgggcaacatggcaaaatcctgtgtctactaaaaacacaaaaattagctaggcatggtggcgcacatctgtagtcccagctactcaggaggctgaggtgggagaatcacctgagccagggaggtcatggctgcagtgagccatgattgtgctactgcatcccagcctgtgtgacagagtgaaaccctgtctc

SEQ ID NO: 274717 - DNA, 369 bp, Homo sapiens
aatttggaagatgattagggcatgaaggtggagccctcatgaatgggattagtgttcttataaaaaagatcccaggccaggcacggtgcctcatgcctgaaatcatagcactttgggaggctgaggcagccagatcataaggtcatgagttcgagaccagcctgaccaacatggtgaaacccagtctctactaaaaatacaaaaattagccaggcgtggtggtgtgcgcctgtaatcccagccactcaggaggctgaggcagaagaatcgtttgaacccaggaggcagaggttgcagtaagcagagattgtgcctctgaactccagcctgggcaacagagcgagactttgtctcaaaaaagaaaagaaa

SEQ ID NO: 274718 - DNA, 668 bp, Homo sapiens
gaatttaaagacagaaatagcaactactcaacatgaaatagaaaaaaaggaattttttaaaaatggaaaagagcatcagtgagctgtggggcaatttcaaacagtttaatatacatttgactggaatatctgaaggagaagagagggggtggaagagaaaaattagttagaaaataatggctgaaaaatatccaaatttgatgaaaagagtatagtcacagatccaaaaagctcaatgaacaccaaacataagaatcatgaagaaaaccacacaaaggctcatcataatgaaattgttgaaaccagtggtaaatagaaagccttaaaagcagccagagaaaaaaggcacattatatacacaggaataaagaaaaagataacagtggtttttttgtcagaaacagtgcaaatgggaagacagtgaagcaacatatttaaagtactgaaagaaaaaaagtccatttagaattctatacctagtacaaatatctttcaaaaacaaagacaaaaataaagactactttagacatataaaagctgaaatatttcatcaccagcagatctgtgctacaagaaacactaaagaaaatccttcagacgccgggtgcggtggctcacgcctgtaatcccagcactttgggaggctgaggcgggcggatcacgatgtc

SEQ ID NO: 274719 - DNA, 439 bp, Homo sapiens
tcagcccactttctctctgtcttgtctccaccagtgctctgtggatcctcatctccttggtcaaagccaggtcatgggcaccttatggctacacttcagaagcggaaaagagcatgaagtgtgtgctgcttatgtgtccatgcctggaagtgggccacaccgcttctgctcactcttagagcttttagagcagggtggctatttaagcacagttatgaattcaaagcatccagggaatatacaaatagaaaaaaataagaataggtaacttaaggataccatttaggactttagattaagccaacttaaggaatgcaggacaaactaagaggtcagtgcatttgaaagcatataaacagtaggtttattaataaatataaaaactatctatttgaaaaggcagattaaataggcaaatgtctgccaagtattttggcaa

SEQ ID NO: 274720 - DNA, 383 bp, Homo sapiens
aaatatctttcaagttattactggtatttgaaatttcaagtttagaaattcatttctttttaactcaaagtgcaaatttcatataatgattatgatggttttagtgtccatatttttgtgacttcacttatcatctctttcagcagtagctacccacagtcagctcctagtaaaatggctacaggaaaactgaaagaaaagtttaagcctgagtaggcatagagtaaaaaatgcataatgatgcattattaatataagagtaaggctttttttattttgagtatcctaactccaaacctagtgttcttttcactccattatcctgctgtttatagcaaatcaagacccataatgatacgtctttcatttatttcagttctgcc

SEQ ID NO: 274721 - DNA, 386 bp, Homo sapiens
tacattagaaaatttgaatttattttcttatgctttctcatggaggagacagggatcttgtccctaaacaaggaaagatagctccattcaatcctgcccactggtttgagggaattttaaaaaaatgtatatttgtattttaaattgtggagaaaatacatgtaatatgaaagctattagtgacattgagtacattcagaatgttgtacagccatcacgactaactagttctagaacattttcatcaccaccaaaggaaatcccattccagtaaccagtcactgcccattttcccccattcccttcccctggcaaccactaatctttctgtctcaatgggctttctgactctgaatatttcctataaatggaatcatataatatgt

SEQ ID NO: 274722 - DNA, 324 bp, Homo sapiens
ttctttttgagacagtctcgctctgtcgccgtccagtggcacgatctcggctcactacaacctccgggttcaagcgattctcgtgcctcagccacccggctagctgggattacaggcgcgcgccattactcccggctaatttatttcgtatttttagtggagacggggtttcgccaaggcggccaggctggtctcgaacttcggacttcaggtgatccgtccgactcggcgtcccagaattctgagattacaggcgtgagccaccgtgcccggccttgatttgaatataaaggttccaacactcccaaacacaaggtgacccca

SEQ ID NO: 274723 - DNA, 396 bp, Homo sapiens
aaattgggtgactggcccataggctatagtttgcctactcttggtctaggcatgtgaagaaactgtaatagaatattaagtcaggataaaatgatggcatgctcctgtcttggtgaattttctctattaatacgttcaagattacttcatatgagttttgtcagtttgcttagagttttgccggaattattaaatccatttttatttccttgaacttaattattaaatgcaattattgtcaccagttgtcagattatgttatggtacattttttaaaagttaatttttattgtttttaaaatcaccaattaatagtgtccttttaaatttttttatgagttgaatgtatgcctctcgccttagctttattttaataaatatatccttaaaatcaga

SEQ ID NO: 274724 - DNA, 455 bp, Homo sapiens
cgacacactgagcaaatgtttttgccagcagaaagatataggtgggttcaccgtggcgcaggtgagggagaggaagctgtgcacagtaagcgcactttctcttctccagacatcctggtgccacagtagttcccattctctctcctcttctgtaacttctaagacctttgccttaagtgaatggatcctcctaagacagccataactgcatttatttacgtccctgctctttgacttgaaaagttcaccctttcttggagagagagacttggaaaagagaggcatgaagggtctcaagccctggcaattctgcctcagtgaatccgacttctacctccacagtgaaatctccctagctagttgaggggcagcagtattaattgttccttcctaagagttgtcaagcaaatcaacctgagaactggaatccacccaagacacacctatgcctttta

SEQ ID NO: 274725 - DNA, 455 bp, Homo sapiens
gtacaatgctattaaccaaattacagctttcatttgaattttgcccatttttccaatattgttcttttcctgctacagcatccaatctaggacctcatgttgcatttatttcttatgcatctttagtcccctaggatttgtgacggttttctgtcttttttcttttgaagactgttcattgcctctgttagtttaatgatcctctgagatgttattcacagtaaaatagcatgtgaatttcacctaactaaaaagtttatttgatccaaagccctgattttaagaatttgaaagaaaaaaatgactctatttttcccagttctaaacattttactagaataataattgtattctttcaacatggaattaatgttgatgagaagcaaacatctaaatttaaaagaaaatatagtttgttgagggaggtaatagacaataaaatgtatttattatag

SEQ ID NO: 274726 - DNA, 324 bp, Homo sapiens
aaagtcccttttagcataacattcccaaattctgggaattaggacatagaaatctttggtggaccattattcagtttaccgcacccacctttattactttagttttgattatagccacaaacccaccacactaaaaagttataatgacacgagtttatatctgtatctatgctatacctcctacacacaataacacacacccctgccttcgcttggggtaaccatctttctgaatcctgtctttactatttattgctttccttctacaaggttttattccacatgtacatagtcctaaaaatcatatgtatatacatgtatatt

SEQ ID NO: 274727 - DNA, 502 bp, Homo sapiens
aaatggtacttgaatttaatcagatacaagaaaaatgtgtacagaattgtgactgtacaccatgttatagggaaatacagacaaggaaaatattacattgagcatggagtacatgacctttagtaacagcatgggaaatttcctggttacatgaaactatttagacatatcaagaaaagccacgaatatagaatcaagttatactggagaaaagcattccatttctaggcctttaagataaacatttcattatctgaccacaacaaaagttggaaccagagaaaaatagttacaggagctgatgaaaaggttgaagaagagagttagcaccccaaccaagcaaaaagatacatgatttcaagagaagaaaaagaagacaacaatgtataatttgcaaattacatgcagtaaagtagaacaaaagttgaatttctgagatacatgtgagaaatttcaaaaagaaacatttccaaattaaaaattaatacctcgtgcaatataa

SEQ ID NO: 274728 - DNA, 180 bp, Homo sapiens
cgacagagcaagactccatctcaaaacaacaacaacaacaacaaacaaaaaactaggcccagcaaggggagagacttgctggggtcctgcagcagtgcagtgggtgagactggccagcttgggctgggctggctttgaactcaggtccatgtaacgcattgatgattgtcctgaccagca

SEQ ID NO: 274729 - DNA, 319 bp, Homo sapiens
ttgaggctgcagtgagctatgattgcaccactgcactccagcctgagcagcagagtgaggccccctcccccaatctcttaaaaaaatacaataatcaacactggtgagctcaccattcaataactataactcagccgggtgtgctggctcatgcctgtaatcccaacactttgggaagctgaggcaggcagatcacttgaggccaggagtttgagaccagcctggccaacatggtgaaaccccatctctactaagaatacaacagttagctgggtgtggtggcaacatgcctgtaatcccaggtactcaagagcaagag

SEQ ID NO: 274730 - DNA, 375 bp, Homo sapiens
  misc_feature (331)..(331): n is a, c, g, or t
ctggaggtgcatactgggtgctgttgaagtatgcaagaggccacctcactcaaaggaagggcttagggagggattatggaagcagtcaattctgatcagagacttcgaggcagctcttacataaatgagccagaagtgggtgtgtcctcccttggtttcccaagctctgggaccttgctcccagctgtgctgtcgccccactaccttacatgctacttgcctctgacaactctttcattcatgatgtgaatatggggaatgacctgagagccacactcagctcctcaagggcagcccagcttggggctcacgcctgtaatcccagcacttngggagtccaaggcaggtgggtcagttgaggtcaggagttcaaga

SEQ ID NO: 274731 - DNA, 310 bp, Homo sapiens
ggtcttggataagtaaatttaattttttgagcttcaacttctgcatcagtaaaatagaaataagacattcttcacaagattattatgaagattaagaatccacttaaagcatatagcatagtgtttggtacacaataagtacatattaaatgtctgttgaatctgtgactaataacttgttgctgccttctctgtgatcttcacaacagccctttggagacgtctaccatgctacttttatctcccgaaaactaaaatttacttatccaagaccacgtttgtcgacgcggccgcgaatttagtagtagta

SEQ ID NO: 274732 - DNA, 497 bp, Homo sapiens
gagagcaagtgaaagagaaagaccaagaggcattatacaagcacagggtgaaatcgtgtgccttaggttatagctggctgaacagaataaaagagtagtaacaataaaagccaacatttgttggatactcatcatatgcgtggtggaatgttaagtgctgattatgtgattatgtaacatttcatttaatcctctttgaaaaaagaaaaaaatatgcagtttccctacaactactaaaatttgatacctagatgagattttttcagattttcttcctgcaactaaatgtctagagataacttttaatatacatggcattctttttcagtacctaccatggtgccaattcattgaccaaataaacatgctagacatttttaaaggagaagctgaaacattctaaaaaactagaatactatagaacaaaatggccaggtaactgcagattcttcaaacttcttttccctttaagtgagttatgcaatctaaaaattaaa

SEQ ID NO: 274733 - DNA, 504 bp, Homo sapiens
gtctagagtataccaggacttgcttcctgcacttcctgttttactgagaaaatggaagcaatgggaagaaaacttcgatgagttcttaccccctcttcacctcacctatatgaaggtgttatcccctctgtggccacatattctgcctgcctcctattaattgtgcatgacctgtccatgttcctatctaaggcacatccctctagtgcccaaggctcagggtcccctcccacccacagctccggattcagatggccagcattggagtgtgcgaacccaggggctctctggctctcattagcagggggctcctcgaatgtgttcctgagaacacctgttctgtaagaagctccttggggaagagaagggttccctgtcaaaagagtttgggaagtgctgggttaaaccacgttagaaatggaattctaggccgggcgtggtggctcacacctgtaatcccagcactttgggaggccgaggagggcagatcacgaggtcgggagt

SEQ ID NO: 274734 - DNA, 435 bp, Homo sapiens
ctgcatgaactcagttgggggagagtcgtgatcagttggcttgctcagagatgactaagcagaaaaggtggtgtggaactgtgccctagcggatgggaaagaagggcagacatggtaggggccagagtaagaaccaggtcaaaatccgcccagcaaattttaccccctctcttcttcacctctcctttataacactgtccaattggtcaacaactcttcctttataagtctcttgaaaggcaccaaaacccccttttgggtgcatctctgctaacaccctggtctaagaccacactgcctcctaaacagaaagctgaaaaatcaatcctagttgtttttctagctgcactatttagtatggtgcctaataatcttcctcaaaacaccttttctactatgtttatttctagaaggaaggaaggaaggagaaaaaaa

SEQ ID NO: 274735 - DNA, 396 bp, Homo sapiens
gccaggattggttcttctgggtataagtcatgaggggattcaacctgcacctggaaagaaggtatcaagctagggatggggagaaattacccagggcaatccagtgctggggattacacaatgaaaagtcccttagacagcagtgtggtggatacttccaccaacattcattcagtaaatatcttctggtgacctggtatggatcttttaattctgaggcaatcacagagatggcaggtcaccagtagtttctaactgaaggtggtagtaactggcaatgcattgctttaggactgtaggcattacagctatttttttcaatatgaactttataatgtagaactaagaccccagaaaaacctcatagatataaaattttcctctctagctattgat

SEQ ID NO: 274736 - DNA, 360 bp, Homo sapiens
tatgtagggcagaaactgtggcgtgtctgccactccctggctctgaagtttgtgagaaggaatcatgattgagtcaagctcgacctggcaggacctccaggatttcaaaaaataagtaattaaattcaccccaaaaggaaaaggataaagattgaactggaagaaaagttgtctctgggtgctaccataaaataccaggattctgtttagagagactttcaaatacttccttgggaaaagcctaacagggacaaaaattcacaatcttccctcactatcttcattttctaagggaggaaaattcttcatgttacagctcctaggtttcctttgttgtagagaacccacaaggagaaatta

SEQ ID NO: 274737 - DNA, 535 bp, Homo sapiens
agaaggccaaggggaagaaggtggctccggcccctgcggtcatgaagaagcaggaggccaagaaagtggtgaatcccctgtttgagaaaaggcctaagaattttggcattggacaggacatccaacccaaaagagacctcgcccaccttgtgaaacggccctgctatatcaggttgcagcggcagagagccatcctctgtaagcggctgaaagtgcctcctgcgattgaccagttcgcccaggccctggactgccaaacagctactcagctgcttaagctggcccacaagtacagactaaagacaaagcaagagaaggggcagaggctgttggccccagctgagaagaaagctgccggcaaaggggacgtccccactaagagaccacctgtccttccagccggagttaacaccgtcaccaccttggtggagaacatgaaagctcagctggtggtgattgcacacgacgtggatcccatcgagctggttacctttctgcctgccctgtgtcgtaaaatgggggtcccttactgcat

SEQ ID NO: 274738 - DNA, 367 bp, Homo sapiens
tgtggggtcttgcagagcaaacagagctgagctgaaggcctcacctaccccccagtccctgcacagcacacgtgtcacatggccttgtgcattccccaaagtaagcgatgcccatgccacggtcttccacacatctgaaatgcaccatccttctaggtgaattttagttttatttcctctacctcccgcccagcaatccccaagcaggtgtgaagcccttgatttagtgtgttatttttgttgttctgtgttagtaggccatttctcttgtgcatcaaatgtttattgagcacctactatgtgtttggcagttggatgctggggtggatactagaaaaacaatagcaaaaagagggtctagatgtga

SEQ ID NO: 274739 - DNA, 229 bp, Homo sapiens
attcatctctctatcggcaaacctgttctactgcatgagctttcctctgtgggggtcttagggaataacagtacctttccccattttgtgggttgaattgaaagctaagagagaggcctgaaacagatccttccttagtgccttcagaaggtgcatgactctgctgacaccttgattttaaacttctggcctccagaactgtgaaacaataaatgactgttgttctaag

SEQ ID NO: 274740 - DNA, 324 bp, Homo sapiens
atttttcaaaatcattaaaaaaaattctcattagaggataaaagaacaaatactgagagaatcctaaagaatctacgtcttcttgttgtgactgattctcaagcaaaggaaaaggaattttaaataaaggatttctgttggatttctagccttatagaagaaacattttccaaaatgctgatatgttttaatttaatgatgtgctatttggggtccattttttgtacattcatcatgattctaaaactgagtttggatgaaaagcatgtagtgcttgccttgttcttacatcagaagaattttttcttttgtccattttatgct

SEQ ID NO: 274741 - DNA, 233 bp, Homo sapiens
ttattgtgcaatatcattatcacatcccaaaagcaaacaaattattttttctgaactgcattagtgcttcttctccattcagtcgaataattgagttaatgttgcaatacctcaatatttattgagattgcctcaacttgcagggaggccatcgactgtttgaagccccagattgcattgagcatgttaataaggaacagagcaaaagagaaatattgacaaaacaaaaataa

SEQ ID NO: 274742 - DNA, 666 bp, Homo sapiens
ttacaaatgtatagttatactaacattaaaagagagaatgggctgggcatggtggctcatgcctgtaatcccagcactttgggaggctgaggtgggcggatcatgaggtaaggagttcgagagcagcctggccaacatggtgaaaccgtgtctctacaaaaaaatagaaaaaaaatccctgcatggtggtgagcacctgtagtcccagttactcaggaggctgaggcatgagaatcgcttaaacctccgaggcggaggctgcaatgagctgagatggtaccactgcactccagcctgggtgacagagctgggtggtggctcaagatatgttttgtaaacctgaagatttgagatcatataagccaaatagaaacttaattggcattcataacttttggttctagagactccatgatcaactaagagccaccaagcatttcccatgtagactattttgaccatgctgactctactgacactgtggttactgaattcattttatctctagaaattaattcttactaatggatgtctgtcactgtaagatccttctatcctctgaaataaggagaacattttaacttcagtagtttaaactagtgtcctaaactatagcattcaaaatgagataatatgctaaagtaatacacaaaccaaaaatcccag

SEQ ID NO: 274743 - DNA, 389 bp, Homo sapiens
aaaaaaactgcaattatttataaaaatactttatctatattttgtatgttgtataagaaagtattttcttcttttagaaagaagccatggccaggcaccgtggctcacacctatcacacctgtaatcccagcactttgggaggcctaggcgggcggatcatgaggtcaggagatcgagaccatcctggctaacacggtgaaaccctgtctctactaaaaatacaaaaaattagctgggcatagtggcgggcgcctgtagtcccagctacttgggaggctgaggcaggagaatggtgtgaacccaggaggtggagcttgcagtgagctgagatcacaccactgcactccagcctgggcgacagagcaagactccacaagactctgtctca

SEQ ID NO: 274744 - DNA, 464 bp, Homo sapiens
acacttggaagaagagaacgacactgggtgattttcctgtttcggccttttatccaatggcaggcccccgccagggatctaaaactctgttaggaaacctgcagtcttactggcctgaggaaccagaggccagagttcgggacaaacagcctctggaaagtgaggaagaaaatcctgaaaaggagagccccaagttcgtcgcatgaacttagaaatttctggctgacaactgaaccgtgtatacttaggccagactccaagcagcccagccaaggctaaaagcattgactgacaggactttacagatagtggtttgcagggcttagctgaccgaccctcttcctactgaaggaaattacttgtatataaaccacacaacacaaagtctctgaaaatttccccagaagcatacaacaaataaacattcattcaggaaaatccactactaagtcttagaaagaaca

SEQ ID NO: 274745 - DNA, 558 bp, Homo sapiens
tacggtagagcagaaaggctcatcatctatgtcctggggcagatgcagagagcgtcggcaaggtgaggagggcgtgaggtttgctcgcggcaccccaacacgaacaggctcagacggtgcatctccctcagaggacctcactttcatgcaaaaacatcagactacgcgacgagctcccagtatccctgagccacccactcggaaccctcagtccatctgcatgtgtgaccctgaggtgcagacagatgcaggcaggctgaggtgggtgctgaccctcgctggccagaccaaaccctcccggggtcagttttctcctccacagaggtctgtccagctcaaaggtgcccctgagctctctgcagcccaaggcttcaggctatttctaacatttaaacatgaagaaagatgaggaagtttgcccctggtggaaatctgagaccccacacagaccctagatccatgagtaagggtggaaagaaaattccatgtatgcattttctctttctagccttaagtcaatgcagatttttgaaaactgcccttgaaatgaaatggaaa

SEQ ID NO: 274746 - DNA, 339 bp, Homo sapiens
tagagatagtgtttcgccatattgcctaggctgatattgaactcctggattcaaacagtccacctgcctcagcctcccaaaatgctgggattgcatgggattacagatatgtgccaccacacccagcctccagtgcttcttactattttcctgttagcttttacaagatggcttacctcttacttcaccaagaaagtaggggcaatctggagggaactccctttgctcctgctaggcacccttatcgctcctcaatatttagaaatgttacccataactatccttcttttcctgtctcctgttaaagcttcgctttcatccccttctgtcgtcttctcg

SEQ ID NO: 274747 - DNA, 315 bp, Homo sapiens
atttatattgtattaggttttctatgtaatctacagatgatttaaagtatatgggaagatgcatgtaggttacatgcaaacacgacaccatttcatataaggcacttgcgcgtctgcggattttggtatctcagggaggtcctggaatctatcctccatggatactgagggactatactaacaaggtctttgttggaataagattcatggaaaagtttttatctcaaatggttttattcatttctcacaaccctttgagtagacttctcctcccagccaaaatggagtgaaagggactggtctgccctcccacct

SEQ ID NO: 274748 - DNA, 444 bp, Homo sapiens
gggcgatctagaggatcccagcgcgagcttccatcaatacaaggagtgttttatcacaaacttcatcagtggccgaaaactcattcacgtcaactgctcaaacctccctcagatggggataacaaactttgaggacatgaaggcaatttctcggcatacgcaggagctcctggaaattgaagagccattattcaaacgctccatcagccttccctatagggatattatcggcttatatttagagcaaaaaggtcatactgggataaaatctgattccttgactttatctgaatttgtcaaagcagcaggattacaggattatgctccagaaataactgcccctgaagagaatgaggaattaccttgcactgaaccataggggaaatccacttcacagagcttgaaagatcaaactaaattacttgatggaagaggtatggtctt

SEQ ID NO: 274749 - DNA, 755 bp, Homo sapiens
agcggtgtgttgctccttgtggcaggtatactgttccaatgccctgggatctctgtagtggtcggtactgtattgattataaatggtgaagtcctagtatcttgctagagtgagctggccaggatggtggagctctaccaccatttcacaggttatagacaggggccaccaggtttcaggaaagcagcaatgacccctcagtaatagttggaaagtgtgatatgacactgagcttcactgtgttggtgaagaagaggtgaggaaaataaaagctgcagtttgcctccacctctgaagaagcacaatacacctttctgggttaccaatgggatacttcccaacagctttgtcatcacatacaatattctcaaacaagatcttaatggcatctactttctccaggaacacagcccctgacctgtgcgtgtttgcgtagagaaggcatgctatgtaccccctaggatatgaaagagaggatccatttgcttcaaagagcccatcagcaagctgtccttcctgttttatcacaagattcctgtagcagattgagctctggcagttgatctcagtggcttgatagagtgtcattataaaaacgcacctggaagattctgtggaaaagacaacctcagaagaccaagaggctgactttgcaagagagagtccgtttaccacttagaaccgtgaacaccacccccgccctcatttatctccagacttgaactagtggttaaatcccaacatgtcccagagaa

SEQ ID NO: 274750 - DNA, 590 bp, Homo sapiens
agcggtgtgttgctccttgtggcaggtatactgttccaatgccctgggatctctgtagtggtcggtactgtattgattataaatggtgaagtcctagtatcttgctagagtgagctggccaggatggtggagctctaccaccatttcacaggttatagacaggggccaccaggtttcaggaaagcagcaatgacccctcagtaatagttggaaagtgtgatatgacactgagcttcactgtgttggtgaagaagaggtgaggaaaataaaagctgcagtttgcctccacctctgaagaagcacaatacacctttctgggttaccaatgggatacttcccaacagctttgtcatcacatacaatattctcaaacaagatcttaatggcatctactttctccaggaacacagcccctgacctgtgcgtgtttgcgtagagaaggcatgctatgtaccccctaggatatagctttagcctgcatctcacacgctccagtttgaagcacgtgtcctgtcctctctcggtgtgcctggcttcattaaggaatcctcatttttgtagcactcattaaaactgacaacttatttgga

SEQ ID NO: 274751 - DNA, 315 bp, Homo sapiens
caggtttcaccatgttggccagaatggtctcgatctcttgaccttgtgatccacccgccttggcctcccaaagtgctaggatttcaggtgtgagccactgtacccggccaattttttgcatttttagtagagacggggtttcaccattttggccgggctggtcttgaacttgggacctcaggtaatccaccccccttggcctcccaaagtgctgggactgcaggcgtgagccattatgcccggtcagccctgatctatagttatgtttttgctgttttagttggaagtacttccaggccaggcttagtggttcac

SEQ ID NO: 274752 - DNA, 834 bp, Homo sapiens
tcacagttctggaggctgggaaggtcaagagcatgatgctgacatctggcatgtgtcatcccatgatagaaggtggaagggcaagaaagcatgcaagacagaaaaggagaccagactcctgtaacccactcctgcaataacagcattaatccattcatgagggcagagccctcatgacctaattacctcttaaaggtcctgcctcttaataccatcacaatggtaattcagtttcaacatgagttttggaggagagattcaaaaccatagcacttttgatatgcaagctaactaatccagagccatatctcccctgtctggcctttatatctcaggaggcaatggtcctctgctttgatcgtcccagggtcaggtactaggcaaccagggacctacctctcctgtgtcttagagcctgccaaaattattcaaactagccaattctagactattcaccctgccctgtcttgcctttcctatggaaactccaataataggctctggcctaaaccttcccctcattcccatcttctgccttctgaccatcctagtgtcttttctgtgtggctctgcatggcctgctgtacctcttgtctctaggacctgcaagtataataaactttatttttttcctgagtctctaccttcttttaatggctacacccaactgactatctcataaaaagaatatgaaacaggatggagatccaaatatgtcctccactgacattgttgggcggggatgtgctctttaacactgggctgtcccaagccttttctgatggtactgctgatttggaagagagttgtcttattatagcctggtgagtgtgg

SEQ ID NO: 274753 - DNA, 398 bp, Homo sapiens
tttcacttccggaggtatgctaggcttgtacctctctgcccatgtgttagtcagctcaggcttccagaatagaataccacagactgtgtgtgccttaaacaacagaaatttatttcctcacagttctggaggctggaagcccaagatcaacaaggtgcaggtagtgtcatttctggtgagggctcttttcctggcttatagacggctgccttctcaccatgtcctcacatccctttcctctgtccacacactcctgggggcccttattctaagtcataataacttaacctgtcccgagtaatgcagcctccataataaatatcattatcttgcttgagtttcttcatgtttataatttttaaaaatcatataacatttcaaagagttaaggtttcact

SEQ ID NO: 274754 - DNA, 528 bp, Homo sapiens
ccttccgacgaaaatgacccgagaaattgtcccacatgcagccacgtaccttccaatgagaacaacccgagaaatcatcccacacacggccacataccttccaacgagaacaaccagtaccttccgatgagaacaaccaggtaccttccgatgagaacaacccgagaaatcattccacacatgcaaccaggtaccttctgacaacaacgacccaagaaatcgtcccacacgcagccaggtaccttccaacgaggacaaccaggtgtcttccgacaagaacaaccaggcaccttccaacgagaacaaccaggtaccttccgacgagaatgacccaagaaattgtcccacacgtggcctggtaccttccgacaaaggctctgagaccattcaatgggaagaggacagccttttcagcaaatggtactgggaaagctttatctccacatgcaaaataatgaatgaagctggccccttacctaacagcatatacaaaaattaacccaaaaaacataggatgaaacacctaaa

SEQ ID NO: 274755 - DNA, 238 bp, Homo sapiens
gctgagtgtggtggtaggagcctgtaatcccagctagtcaggaggctgaggcaggagaattgcttgaacccaggaggcggaggttgcagtgagctgagatcgtaccactgcactctagcctgggcaacagagcgagactccatctcaaaaacaaaaaaaaccctcgtcctacataaaacaggaagtctcccctggtgccaggcctgctaatgatcgatgccagaagcaacttctatgt

SEQ ID NO: 274756 - DNA, 297 bp, Homo sapiens
ttttttttttggggggggctaagatctataattaaaatcattctcacttcactttctctcaaatctattgtaactaatttttctcccactgaaagaacaatacatggtattgtcttttgtgtcggggttaaaaatggttcctttgtcattttattcctttgtgtaattggaatataaaaacttttctttatgcaatgcaacctgacacttaaacttgtttaggaaaatatataatgggttatgcttattttaaattgccttgtgtttattactgttcgggaatgttttacttcatga

SEQ ID NO: 274757 - DNA, 712 bp, Homo sapiens
tgcaacattcaaggaaaactgaaaaagccagagtagttagcacagagcaaggcagcagagagtggcgagagagaaggacagggacatattggggcccactatgggctgagaagttctcagatgggtaagggtggagggaacgggggctaagcattgacggtgttggtggggagaagtggtggtccccctttgggaataattttaaggtagaaatgatagtatttgctgtgcagtatgagaaagagggaaaccaggggtgacttcaaggtttggggccagaagaattcaaagaatggacctgcctaactaactacaatgggtgaaagaccatgggatgggcaggtgtagtgggggagataaggattttgttttggaaacgctctagacttacctatgacacatccaaatggagatgtcgaaatgtgatgctggacatgagtcctgagttcaagaagctatgtgggctcaggatgtaaatacataaaatatgtcatactgattcccacttacccagtccctctgtaactagatctcatgagttggaatgctgcaaccctccatgggctcctttatcttaaaaaaagagatgtagcagccgggtgcggtggctcacgcctgtaatcccagcactttgggaggccgaggcgggcagatcacgaggtcaggagatggagaccatcctggccaacatggtgaaaccccgtctgtacta

SEQ ID NO: 274758 - DNA, 497 bp, Homo sapiens
ctactggagagagttaatcaggcatcatagctcacagttctccataatgcatatttcagggaacaccaaggctagtcacccttgactgctgcggtttttaaaaatgtgtatttccttagggtgctgcgtccttttctccatggagccctctttggtccctttccctctcggggctcatgctctccagtcctcatgccgatcctgtgtattttaatcaaaggcaaggagtaggtagctcgtgggttgtcatgaggatgataggatgtgaaatgaccactgtattgttttcatctctccaagacagcagcctggtgttgggcattgccagctcattagaggatgtcactgagaaatgcaaaatagccaactccacattatcaactccttccaattccctcagcacagaacatcagagctggagcatgctaatctgatttcatcacttgggcagtggaggtttttattgagctcactcagaggtggctgcagggcttaaa

SEQ ID NO: 274759 - DNA, 378 bp, Homo sapiens
aaaactgacagaaaaagatagggaaaatctgaatagttccatgtctattaacatattgaatctgtaagttaatattttggtacctaaatggtttcattgatgaattctttattttttatttatttatttatttttgagatggagttttgctcttgttgcccaggctggagtgcaatggcacaatctcagctcaccgcaacctctgcctcccaggttcaagctattctcctgcctcagcctcccgagtagctgggattacaggcacgtgccaccatgccctgctaattttgtatttttagtagagacagggtttctccatgttggtcaggctggtcttgaactcccaacctcaggtgatgctcctggcttggcctccca

SEQ ID NO: 274760 - DNA, 216 bp, Homo sapiens
aaataccttcctagaattcatcaaatcatattgttggcagactgttcaaactaactctcatctcttttgctgacaataaatctgtgggatgtgagtatgcaaggattttggtatactgggggagggaggttgtggagccaatctcctgcatataccaaggaccaactgtaatttctacatttcttgtttaggttaagaatctacctgggagcaaaa

SEQ ID NO: 274761 - DNA, 609 bp, Homo sapiens
tttttttttttttaagagacagagtcccaatcagtcacccaggctagagtgcagtggtataagcatggcacattgtaacctccaactcctggcctcaactgatcctcttgcctcaggctcctgagtagctgggactataggcacatacgatcatgcctggctaatttttaatttttttagagatgggatctcgctatgttgcccaggctggtctcaaactcctggcccggagcagtcatcctgcctcagcctcccaaagtgctaggattacaggcccaagccactgtgcctggtcaggtgtctttgagagtggtgctatcccactgaactggtgagaaagttgagtagaaccaaagaaagaaaacttgatagaagcaagaattatgattgcgaatcactagcccttctgattttctccagtctaaattatgttttgctcattttacttgaccagtaaggtaaaaccccacgtgggaggaaggggagttgctgtttcataatgggtcagaatcaaaaccccattgtcccaagccaagctttcagacaggctgactccctgcatttttctaagtcaaaataaaaacaattcctttatgccgtcacgttgca

SEQ ID NO: 274762 - DNA, 280 bp, Homo sapiens
tccccagtagcaagtaaacaaacaagaacagcagattatgtgtgaacaaagagatctggtgcttattatatatttcttcaattcatttttcttttcccttgttgtgtgagacatgcataattttcttggctctgtatataattacatacctgctttgagatgaacattcttaagtgtagtgattaatggtctgggattggacgtagtcgccctgcagtctaagttattcaatatctttcaccaaaaatgctaataattaaactgccagtggcaacaaaca

SEQ ID NO: 274763 - DNA, 524 bp, Homo sapiens
tcccttgacttggcaaacacgaaaaaccaaaggaagctaagcattcaaaacccctgccaaggtcatgccacaggaagagcctgcttaggaaactgctccagctagtaatgccaccaccaacagccactggaatgaactccaaacggtccttgcatctttgcatctctcacttctggtgcaagtccccaaagtaaagggcatctgactggcacagtttgggtaacatgacccagctctagctgccaggggtccagcacagaaagtttatctatatggtatgtgtatgtgtgcacccaacctttccagcatcctctcccaataagattcacaaaaaagcaatactggaagggggctaaaatggtaaacagacaaaagaaacaacaaagaaccattttaaagcccaattagtaaaatgtccaacacaggaatcctgccagtctagccatttggaatcaacttgaattactgtgccttcttctacttcattgttccaaaaaaatttcctaaaaagtaattttaggcaa

SEQ ID NO: 274764 - DNA, 557 bp, Homo sapiens
  misc_feature (432)..(432): n is a, c, g, or t
  misc_feature (471)..(471): n is a, c, g, or t
  misc_feature (529)..(529): n is a, c, g, or t
gattacttgaggtcaggaatttgaggtgcagtgagccgtgatcgtgccactgcactccaatctgggcaacagtctctctctctctcttaaaaaaagagagactaatttgggcaattgagatcttttcagcatcaaacattcatgtctaggaatgtggtacttctctccatttattcaggtcatctgttatattcatatccttttttagaactctcagttttttccatataagttctatatatgtcttgttaaattcatttctcaatgtattatatcttaggtagctgttgtgagtggaatctctttttctctgatagtattttctaattgttactgacataaaagacaaaaatattgatttttatgtttattctgtattcaaccaatgtggcaattttttttttttttttttttttttttttttttcctttngaaaaagtcatggaggccatggggttggcttgaaaccanctttggggggttcgattccttccttttttgtctaaattttatgtatacgggttcttcnaatgtgtggtagggtggggggcatccat

SEQ ID NO: 274765 - DNA, 349 bp, Homo sapiens
agtcccttccctccttgggcctctgtttctcatctctgcatatggggtaaaatgccccatccttagtccgggctcaggtgagccgctgggttcctactgggccatgggaagggccctaatacctgaagggcagggaggatgagggcaggcagctcagctgccctccctccatcctggggcctgccacctcccctctgtcttctcctgattccggttccccaccaggaagggctcactgtcctgctcagcaagttctctcaacaagctgggcagccaggggggggtgctctgctggactggaggagccgatgtgagcccaggccacccatggaggctccctctgaagaga

SEQ ID NO: 274766 - DNA, 255 bp, Homo sapiens
ttttttttctttaagctatctatttccatgaatatttctccctttacttcttgtatcattttttggatttccttgcattgggcttcatctttctctggtccctccctgattagcttaataactaatgtcctgaattctttttcaggtaaatcaagggtttcttcttggtttggatccattgctggtgaactagtatgattttgggggggtgttgaagatccttgttttgtcatattaccagggttggttttctgg

SEQ ID NO: 274767 - DNA, 763 bp, Homo sapiens
gagttcagagaacggaagagtgtatgggtcaatagtttactttttattatctccgaccagctgataaaagacaataattaaatacatacatatatacataaaatagataatttactttcaaggctgctattctgcctataattttatgtcttgataatcttgcttcccaaaacataattttatcagatttctttaaacttagtctttaacttgattcttttatgcatacttattaccattttagttaggaagatgctacttttaggcatgtgtcacaactcataataattgccaaatattctacagtttaatggtttttttgaggaccctcatattttataagtttataataaagtgtcttaagtttcttaaaagtatcaactgttttcgtttgtttgagtggtctctgaatgaattggcatgcttagagactttttttttttaatcagaatctcttatctctgtttccatactgtctcccagtcttctcactgaaggtttactatgtaatttagcataactgttctgagtataccagagtttagagttgcaaggtatgttctaaaagactaccttttctccctcaacccactgttgggtgcttccctccaagtcttcaccaccagccgaatagtggaatgaaattacatatagtaggcttaactgtaagggttctgcagacatggaattaagtcgagattttgttcatggcttaaaaatctgttttaagtttgaggtcaattatatacaatgaaatacataa

SEQ ID NO: 274768 - DNA, 315 bp, Homo sapiens
agattgcagagtacccacctctatcctgggcaccagcttggcccccatcatcactgcagcacctgggggtggcagcacaggtggcagtggattctgtactgggaagtccaaaggtctgtatcctagtcccaccagcaagcatgctttctacaactgtgtggatgagcacacatacgaggaggcttgtcaggaaggcctggtctttgataccagctgctcttgctgtaactgggcataagctattcacctgctgggtcccttggagattgtaagactaaaggatgattaaagggaagttttgcatgtgaatgccaa

SEQ ID NO: 274769 - DNA, 130 bp, Homo sapiens
catatggatcaaagtacctacatcatttatttccaagtgaactatacagaagaggcattagtatacacactagaagtgtgctaggagctgtaataaaatacctacacccaaaagccttacctacacctgg

SEQ ID NO: 274770 - DNA, 485 bp, Homo sapiens
tgccctataacttcatgcttggcacagagaagccactcaacaaatatttgttgactaccaactgtaatttccactattatagtattcttctttgattttttaaaataaaataaaaatatcctttagaaaaggtaatctgcttataaagaaagcccatttattcacactctagtattaatctcattgaaagatttgatggagtatagagtacagaacagttttttgaacatggattattacaggaaaagtctgggtgtggcaaaaggtgtcctgaggagtgatgggatgttagggcatgaagaagaatgaagaagagtgtccaagacaactggttcatgttgcaattttactgaaggtcagcaaagtggagaatgctgttctgggagaactggatgccttcagattgtgccaggtaaaggcaaggggtcaccaggacctccttgggtcaaccaaaccactgtctcagtatctaggagaaattagat

SEQ ID NO: 274771 - DNA, 531 bp, Homo sapiens
cctccaattcaccacaggactattcctagccatgcactactcaccttttcctcaaccgccttttcttcaatctacccaccttggcctcccaaagtgctgggattacaggtgtgagccactgctcctggttcctaatgttttttaactatataaatgcatttcacaataatatcttagattcttacatcacatttttgccaaaaatccagccttatgcttttgggtacaactcctaaaaggagataaatagtataaagatagagaaggttatcacacactagagtgcatgattacagcaccaggccatgctgccagcaggctcctgggaccttatttctgcccagaattatggtctgtcatatgcattcttaacaggtgattcgtggtctttgccattaccagaattggccatttggataatcttttttcctaaacttgtgaccttttattgcctttttaatcttcctactgactttagaaatgccactcacatccatttgtagctttttctcattgggtttccatcaaacc

SEQ ID NO: 274772 - DNA, 392 bp, Homo sapiens
ctgacaagcccctccagccctgggcagacaaaggcttgaaaggagaggaattgcacacggtccagacgctgctgtttctaatacgttattttgacacacaattaactgcaaaatttgctctaagctaagagctcgggccctcacaggattcgtacagcacaattcaagcaggatttggttctgtgaaacctcatttttcctgaagggctagggattgccggctccccacggtgatgccacccctctcagggctggctgtgggcaccgatcagagaggaagcatcagcccgcccacagcccagcatggggccaggggaaccatggcacgagtcatgggagggggtggataaagcttgcacaaaaccgtccaacagagctccctgaacaacaac

SEQ ID NO: 274773 - DNA, 571 bp, Homo sapiens
attttgtgttttataaaactcaaagtgggaggagctttcctttttcttcaaaaattctagaaatttggagtttttttgatatctcccaatttttttcatattagaaagcaaattatcatattaaaaatgcctatgactgccaaataaaatctgtctttggatgatatcctgtgagctgcatgcttctgacttctgctctaggaacttagatcaactcttgttttaacatctgtgacgcacctactatatgccagttccttatatttcgtcatttaagcctcacaacccctcaatagggcagaaattattattagttttagtcccatcttatcactgaggcacagagagaggaagtggttttcccaaagctataccaccaggaagtaccagagctaagatttgaaccccgccactcagcctcaaaaatcctatttgtaattactgtgctaaactgcctcttccctcccacctggtggttgatttttgctgaagatgtgtatgtggtaaattcacagacgacactattctcaaggttttcagtttccctggaaatagagcactgacttaaaaa

SEQ ID NO: 274774 - DNA, 353 bp, Homo sapiens
taatctttttgttcctgatcttaatctttgtcttgttcctgatcttaaagaaaagtattttgtctttcatcattgagtatattattcactgtgggatttttcagatacagcttttattattttgagatagtagccttctgttcctagtttattgagtgtttttgtcatgaaaatgtgttgaattttgtgatatgctttttgtgcatcaattaagatgtggtgtttatccttcattctgttgtgctgtattagactgatttttttttttttgtatgttcaaccatctttggattccaggaataaatgccaccttagtcatggtgtataatttctttaatatgctgctgaatttg

SEQ ID NO: 274775 - DNA, 379 bp, Homo sapiens
cctcttcatactccttaaaatgaaataaatgttcataactaaacataatagtccacatgtggtctgtcccataaaatattttaattgaagtacaacatacatacaaaaaatgcacatgtgtgtgcacattggtgaatcttcacaaacctaacataaccagctttgagatcaagaaacagaacattaccagcaccccagaatgtatgtgaacacatgtttatacatataaataaatatacatcacagatttcatataaacacagcagactacagtagctctcgaaggcagcttcatcacactattgacccaagtcaactaaaaatctctaacttccgtcttccctagcagctgtgtctgtttaataaagctttaccattt

SEQ ID NO: 274776 - DNA, 187 bp, Homo sapiens
gtgagctgcctcccagaggcctggaaggaccaggccttgccaatcaccgacaagggacgtagaagagcacccccaaaggacagtaggtccaaaacacccaaagtagcaaaatgcatcccagctgcaaccaaatgacagaatccactgggacagcaggggccatgagggcagctgtggacaggaaaac

SEQ ID NO: 274777 - DNA, 417 bp, Homo sapiens
ctgctatatgtaaagtcatacgtcattaaaaataataaaaattgactatttactagtagtgcttttggtactattagaattataagagaaactgtaatgatgattgttaatcataatatactactaaagatatatggtatgtaggtggagagatagatggatagataattggtaggcaggtagagagagtgagtaagacagagagagagagagagagctcaatctatctgtctacaaattctgatagaacctgagttctgtgctgtcaccacttttttgaaatgttcacctagatgcctcaaattccatgtagcctgttgaacatattatggagcacccaggattgcacttcatcctgttttacccctgctggctaatggcttcaccatctactcaaccatacaagctggaaccaag

SEQ ID NO: 274778 - DNA, 357 bp, Homo sapiens
taagaaactaggtcttcctaagtaagttgtctggtttggtctcgaactcctaggctcaaagtgatactcccacctcagccgcctgtgtagctgggagtccaggtgtgtgccactgcacttggcaatatgtaactctttgtgatatttgtcatgagtattttttccaagttttttctttttttattttagtgccattgtgcctggcaatatgtaaccctttgtaatatttgtcgtaccttttccaagtttgttcttttttattttagtttttcattacaaagcagtttatgaagttttttatattttcttctgttgccttaagatgaacaaacttgtcatcccttctgtcgtcttctc

SEQ ID NO: 274779 - DNA, 501 bp, Homo sapiens
ctgtcttcaagcccacaagaagcatagagcagaagaagacagaggagggcccatctggcccactacctgttcttgtaaataaagctttattgaagccaggtgctcaccttctagcacattcttcaagagttactctgaggcaagccagccgccatgtcatgaggacactcaagcagcaccatggagaggtccgatggcgaggaacagaggatccccctgccgacagccaatgaggaacaggcctcctgccaacagccgtgacaaaccggagaaagccaaatatgctcccctaaccaattacttaggatgcccctcttctaatgagcccaactgtagctttcctgcaccaccaacaggacgtacctgaagccttctcctttttccgctataaagccttcccctcggcctgcctttgagtctccatgaaaagcaagtgacagtggctgcctcccttactgtaacaagctctgaataaacagcctttgcttgctctcaaaagag

SEQ ID NO: 274780 - DNA, 467 bp, Homo sapiens
taggtccaggccagatggggtcctgctcctgacgtggatggttctgggagaccaaatatgcaaatagacaatggccagaccacatattaaaatagaactctgcccccaaacctacagcaccagcccaggaagccaacgaacaacccctgcagcaatcagccccaaatggccaggacttgatggtaactgacagcttccctaattttgttcccactttcaatgcaggacaaaccggagaaagccaaatatgctcccctaaccaattacttaggatgcccctcttctaatgagcccaactgtagctttcctgcaccaccaacaggacgtacctgaagccttctcctttttccgctataaagccttcccctcggcctgcctttgagtctccatgaaaagcaagtgacagtggctgcctcccttactgtaacaagctctgaataaacagcctttgcttgctctcaaaagag

SEQ ID NO: 274781 - DNA, 483 bp, Homo sapiens
ctgtcttcaagcccacaagaagcatagagcagaagaagacagaggagggcccatctggcccactacctgttcttgtaaataaagctttattgaagccaggtgctcaccttctagcacattcttcaagagttactctgaggcaagccagccgccatgtcatgaggacactcaagcagcaccatggagaggtccgatggcgaggaacagaggatccccctgccgacagccaatgaggaacaggcctcctgccaacagccgtgtaaggggtcaccttggaagccaatggcccctccctggtcaggcttttacatgactgcagtcctggccaacatcctgacggcaacctcatgagagaccttgagccagagccacccacctaagctgcttataggttcctggccctcagaaatcacatgagatcataaatgtttgctcaatttgagatatttgtgatgtagcaataaataacaaacacacttacct

SEQ ID NO: 274782 - DNA, 283 bp, Homo sapiens
acaaaacccacaagcagaggatggggatcctggataaatgggagaccagggaaaagccctagtttcagagcggcacctttttcctgctggtcctcaaagggcctttcagactagggaaggattctctggtattgcttccctggagatacactagccagaatcagcctcctgcttgggcctccactctccacgctgtcctactccggcaggctgagcttttccccgaccccaggcctgtggagtgcagcagtcaaagctttattgcccacacactggagccgct

SEQ ID NO: 274783 - DNA, 140 bp, Homo sapiens
tgactgacgagatcaacttcctcatgcagctatatgaagaggagatccgggagctgcagtcccagatctcagacacgtctgtggtgctgtccatggacaacagctgctccctggacatggacagcatcattgctgaggtc

SEQ ID NO: 274784 - DNA, 201 bp, Homo sapiens
cagggtttcaccatgttgattaggctggtctcgaacccctgacctcgtgatccgcctgccctggcctcccaaggtgctgggattacaggtgtgagccactgtgcctggccatttttatagattttcaataggcatcctttgctaacacagtcagcattctgtattcatagattcaacgaaccatggatcaaaaatactcag

SEQ ID NO: 274785 - DNA, 497 bp, Homo sapiens
aaggattaatacatggaatctataagatttaataagaaagtagacaagtgatgtaaatacttctcaaaggaagacataaaagctgccaataaacatgcagaaaattgcacaagatctctaatcagagagacggaaaattttggagagaagaaaatctttataaactgttggtgaaaatgcaaattcagcccctgtgaaagtttctacatttttcaaataactaaagatagaattgccatttgacccattaaccccttttttgggtatctacccgaaggaaaatattttactaaaatgacacctgtacttacatgttgattgcagcactatttacagtggcaaaaaccttgaaaaactatagggtatgatgtacactatgtgggcaatggaattattaaatgtgcaagcctcaacatcctgatgtatacaggttacaaatctgcacatgtaccacttgaatctaagataaaaataataaaatgttttgtggtataatg

SEQ ID NO: 274786 - DNA, 244 bp, Homo sapiens
gatatgtgaaccagagggcttggggacacagagtatctgggcaggtattacagaggcagtgacatttaagagataaataggggctgggcgcagtggctcatgcctgtaatcccagcatttgggaggccgaggcaggcagatcacctaaggtcaggagttcaagaccagcctggccaacatggtgaaaccccatctctacaaaaaatacaaaaattagcaaggcacagtgttgcgagcctgtaat

SEQ ID NO: 274787 - DNA, 256 bp, Homo sapiens
ccatctctaaaagatggggaaaaatgtgcaaaagtttcaaaatccaacagaaaagtcttagcagcaacttttaatgttgggcaagcacaagggcatgatcactggggattgacaggaaacacgtctggcagtggacagctggactctcaagataagctgcaacagaggcatgttctgcattttagggcttgcccaggactggggacaagccagagttcaggaacctgtgggaggagagaggcctgatggaagtgtg

SEQ ID NO: 274788 - DNA, 554 bp, Homo sapiens
gctattgaggagtatcctgaggcatgggggtcaggtgttgaggtcttggtgagtgtcttcctgggcttagttccctcagcccccatcgctctaaactaggggtatcattatgggtttagtggattctcatttgcttattttctggttgtgcagttgcagtttcacatgaagaggatatcgtgttttagtccttttgtcaacctcccatgttgattctttcaagtatatatttctgaacgtttaagatctatttatagtttccagggctgattcaggatattcctctgttataatcaactggtcatttctttggtaatctggcacaaagaaataagcttatagctttcttatttggaaattgtattttatatatgtgatttgaatcataggggggatattgaggtaatttagacccagtgattgtaaaggaatggatgaatgatccaataaataaatagatgacaaagctcatcttttgcaggtgagaggcattagaagtaattttacggttttgagaagagaaatatagatgagaagagatgcctaggagaata

SEQ ID NO: 274789 - DNA, 278 bp, Homo sapiens
aggaaaaacaaaaaaaacttcgattcctgaatctccaaatggaggaaagccacccacggacccagatggaggaacacccatcctggcctgtgatgtaagcaagaagtaaactttgattttgtttaaggtatatattttcagtatttatttgttaccacagtttatattatcctaattaacacactctgttgcttgggttgttgtaagaattaaagaaattattatgtgttaagttcttagaagagtgtctgacatataataaacactgaattaatgtt

SEQ ID NO: 274790 - DNA, 430 bp, Homo sapiens
gaaacagatgctattggatatgagtagcatatgcaatggaaatattgacattgccttcccgacagtcatgagggatagaccataggctttttggtaacctatattttctaggcccaaagcagggaatgagatggcagggaaattcagggtaaactccaaatttacataaagttatagaagaatatagatcatgagtagtggctagcaccttcctgacttccagaaaatggtggtgccgatattgaacaacagtttggagaaaatgtaaaatgtttacatttacatttacagtttagtctttgaacaacagtttggagaaaatgtaaaatgaaaatttgttaacgaacttgtttttaaaaagcacctagactccatataagagtacttgtcctatgttattttcataaactacatttgtgattgttttggt

SEQ ID NO: 274791 - DNA, 256 bp, Homo sapiens
aatgctcatggaagttgtgtgcagtcagtgttggaagcatgaggccgactcctagaactcagaaaggctgatggcccacatggccttcgcctttggagctgggccttgaagagggggacagcaggaaggagagcctcttatcagatgtggcgtggaaggctgcgggataggaggggagtatggactccagccttttcttagggctctcgagtatgagcagaaagcagcaggtgcagtgagtggttctgggcctggg

SEQ ID NO: 274792 - DNA, 279 bp, Homo sapiens
ctggttccacttgagatctggggcaaatacagtgcttgggctgagctggtgattgcaaaactgaggccccctattagacagttttccatctaggcctgcccttctggcttgggcttgttcccagagctgctttcctgtctctcccttgaatcttcttttctgaagcccctgtgtctctgccctaattcatcatctggaatattttaatattaccccaactggtcttcccgcctttagacagtaagacctatctatcttgcttatagctgtcagagttat

SEQ ID NO: 274793 - DNA, 203 bp, Homo sapiens
tgtctgcttggagaagtgtcccggcagctacctgactctcggaggctagcctggagccaggagagtggcccagcagctaaccatgggccaggcctgagccagttgggcagagggtaagagaagaagcatcttagacacagggaccagacatacgggcagggagggaggcggcggcccaggggctgctggtgagaaagagaagc

SEQ ID NO: 274794 - DNA, 462 bp, Homo sapiens
tgagctgagcacacacaattaaaatctcccctctgcagccagaggaaggacctgggctttggggagggcacaggagcaggcggctgggggcagggcatgctccctttttgtctctagctgcctttttgttcaaagataaacatgcctcgacctgcttcccctacctgaaagccgcttctgccggcgagagaaatcgtacacaatctctgctctggatgtacaaaaagtctgaaattgcttggagaccaggcgggagggagcggggtgaggctgggggatccgggcgggtaattgcgggtcatccatctgccttgtcggaggcaccagcccgcagcatttgcagagaggactccgtgaatttgctttttccccacatcttgcattacttactcttgcctcagcagccataaaaccttttcctaaaactgccctcaagcataataaacaggagacattcggaac

SEQ ID NO: 274795 - DNA, 736 bp, Homo sapiens
tagtattaccatgatcactcactttaaaagggcttgtttgtctaggtaaatagtacgaaattagctttgcaaacttatatatgttcatgaataagaacttacatatgttcatgaataagaattgttttgatattcttacgacttaaaatatttttctgaaaaagtatatatagcctttgagtttttttactgaagtactgtagatactaagagttgatattttgtttaaaatatatttttattgagcaaataatatttggaaaattttgatgtaagttggactttattatgataagtagttaatcttaactggaaggctatcagtagatgtacaatgtagctaaattagaacctgactcttgttaataaaggaaacgattatatttactttttaaaaagtgacattgttaaattagtgaggatttatttagtgcttactgtgggcccaatacagattgaaaataaatatgtaccataaaaaagagatacctgctaaatataatgtggttaaatagcttaattttaggcattttacagacctgagttctaattctgaccctttcactgatttagctgtatgaccctggcaaatgttttaatctacttgagctcaatattttagtaataaggatttttctaaggactgataactatcagtgaagttagagcaacgtttatgaagcagtctgacatacaatacacgctcattgtacaaatttgaaaaatgtagaaaagc

SEQ ID NO: 274796 - DNA, 637 bp, Homo sapiens
aaaatggaccctgccccagagtcccccactgtgagagcatccccatgtggagagcatgtaacccctgaagccccctacccggggggtgggccttgcccatgcctcctgcagcttcggagcccctgcggagcgccgcccattcactccctcatcccacgagcctggctcccaggtcgggaggccgagtctaatagaggaggcaaactccacccctgccactaccagaagctgaggctccggggccaccggccgcccagggacctcccaggcctgtcacaggctgtgcaccctgcacactgcggggccactacctaggtgcctgctagctccttccttgccctccctcttgccttccttctgtctttacgagacctagtggtcctgagaggctcacctccacctcccagaaccttctgaccagtgcattcctagggggtctcagccctcatggcagccctgcccgtctccagagccccccattcttcagtcttggctccctgcaccccacccccctgctaggactgagccccactggccacctgggccaggctgtccctggctgttcccatgggcaccttctgtccccagtcctcttcccattcaaattgctttgtgggactggctaagtttcaaaggg

SEQ ID NO: 274797 - DNA, 415 bp, Homo sapiens
tttcacatatcccagaaagccccattttaggacagcatttagcagagtatattcaagatcccactaacgttttcggaagacatgacttccagatgatataaggctccatcaggaactgtgcaggactgtgcactctgttgatactcacatggtggaattatattgcccttggccaaccctaaagccatcaagatagcaggtttggaataattcactgtcgaagtcttcttgagctgagcagtcatgtgagcttggaagatgatccctctccagctgatccttcagctcaggccatcatctacatctggattcctgacccggagaaactatgagtaatgtgtgctgcttttgagccactaagctacatggtaataggctatgcttcaataaacaataatacacttgaaaaaaaaaa

SEQ ID NO: 274798 - DNA, 335 bp, Homo sapiens
actggaccaagctggagacaccccatgagcccaggagcagctttccttccaactctgctaacacctgaacagatctccttttgatttggtctctttgagaagttctacaacagctttttctgaatcactttgtctagttttgtgcaaacggtaactggggcatccagaagaatgtacagagcagagagttggtcaaaaatgtgttagtcctgagaagaaataaaaggcagcctagacattaaatttgggaaggacaacggctcgacacatatggattaaaaatatatcacccacaatgaatgaaatgttaataaacagaaataaagaagtattaa

SEQ ID NO: 274799 - DNA, 387 bp, Homo sapiens
cagcaaagctaagcgactggggacagccacttgtggctgagacaaaggcaggctccccctgccgcaggacgatcactaggactgtcaggctgtcgaaatgtatattgcagacaggacatccctcctggcatccagtgtgagcgaagtccaggccacggcaacaacagcctggcctgaggacagcctgcaccacacatcaaagccagaggccctgggaggctggccagccgccaaagacgcctgagagcggcaggggagtgtgttgccttaggacaatagcaaactgggacgtggtagagtctgtaaattccaagcactggggaggtcttctcagagattttaccctctcctgtcagggctgtgatttaatttcctttgaagaaaaaa

SEQ ID NO: 274800 - DNA, 284 bp, Homo sapiens
ccagcctcccaagtagctgggattataggcacctgccaccatgcccagctaatttctgtatttttttttttttttttagtagagatggggtttcaccatgttggccaggctggtctcaaactcctgacctcaggtgatccactgacctcagcctcccaaagtgctgggattacaggcatgagccaccacgcccagcctagaccctgcttctaaaaggccgctataggggaactgccctgggatcttagactccagttagcaccagaaaaacatactaggaaaaa

SEQ ID NO: 274801 - DNA, 462 bp, Homo sapiens
cactgggaaggacaattgcttttaggccttccttattttgaggcatttttaataaagctgtaaaataatacgtttttaaagagagggaaaaactcatgagttcccactgatatatccaattctaatttgaaatttaaagatttcaattctctgattttacatgtgtgtttcatttcctgtgtgtgaattgttaacacaaccttagctcaagccatcatgtcctcctccctaggattcttcggtagtctcctaactggccttcctaaatttactcatgccattctccgcagcaaagaatggattttttttacactgtgattttgtattttgaatttaacctacagtttatacaagagatttataagacatgaacttggaaaacagaacaaaatgtaattgaggtataagagcacagtatgtcatgtttcaataaatataattcaaaatttttaaatgatcaaa

SEQ ID NO: 274802 - DNA, 396 bp, Homo sapiens
tggcccccaagctgagaaccgggagccggaggaaatcatagcgaaatctcaacctgatgtagccccatcagcatcacacacacactcagagcaaaatggcctgctcttcaatgtagcttagtttagttcaattgtcctgcccaccccctcctgaccctcctgccgctgaggggtggtatttgaaagaacagcttctttcctctcttctccttgggacagcaacagcacagagagtgggccgccatctcttactgcccactcaaccgttgctggggactgattctttcagctctacatagaattcaagaactatatttggatctgcttcagagcagtaatccccacagccttaaaacatgcaaaataaaaataaattaatcatccatcagcaaaata

SEQ ID NO: 274803 - DNA, 454 bp, Homo sapiens
gagtttcctgtgatgctccagttcacagagctaaaaggagtagagtgatggctcagacgcgggcctcccagctcaagttctgtgctctggatggaaagtcagggtgaccctgaaggacggggcagctgtgcagggacaggataggcccatcctggaaggctcattggctgagggaaagagggtacaggggaaataattccctttcatccatccatccccattattgctcctaaacttcccttccacctccagcttctttcctctcttctccttgggacagcaacagcacagagagtgggccgccatctcttactgcccactcaaccgttgctggggactgattctttcagctctacatagaattcaagaactatatttggatctgcttcagagcagtaatccccacagccttaaaacatgcaaaataaaaataaattaatcatccatcagcaaa

SEQ ID NO: 274804 - DNA, 757 bp, Homo sapiens
tgtggtgatgggcacctgcaatcccagctactcaggaggctgaggcaggggaattgcttgaactcaggtgacaggagattgcagtgagccaagatcgtgccactgcactccagcctgggtgacacagagggagactcttaaaaaaataaaaataaaaataaaaaacctctcttcctactcccttagtgttttgaagaaaatcacacagtcctggccgggcgcagtgactcaggcctgtaatcctagcactttgggaggctgaggcaggagaattgcttgaacccaggaggcggagcttgcagtgagccgagatcgcaccactgcactccagcctgggcaacagagcgagactccatctcaaaaaaacaaacaaacaaaaagaaaggagactgcagaatttttttagtacaattttaaatattaaatatctctgatatttgtacttgtgtcagttaaaaaaattgctaatatacttggcaataattaacttttaagcattttgtgaaattctgcagaagttacccaatttcattctcataataattaggagtaggttctgtctttgccctgtattttgatgggcagacagaaagcacagtgaactttagtagcttgctcaagattgtgctagcaagtggcagaaccgggacagaaccccaaatctggtacgtagaagcattcatatgttgtagtccattacatatattatctttcaaaatttgcagtaagttattgaaaagtaccaacaaaaaaacaa

SEQ ID NO: 274805 - DNA, 244 bp, Homo sapiens
ttttttttttttgagacagagactcactctgtcgccccaggctggagactcttaaaaaaataaaaataaaaataaaaaacctctcttcctactcccttagtgttttgaagaaaatcacacagtcctggccgggcgcagtgactcaggcctgtaatcctagcactttgggaggctgaggcgggtggattgcctgagctcaggagttcgagaccagcctgggcaacaacagtgaaaccccgtctct

SEQ ID NO: 274806 - DNA, 303 bp, Homo sapiens
tgcaaagaaaaacaatgagaggaaacaaaagtatacaaatcagtcagaaaacaataaaatgacaggagtaagtcctcacctattgataacaatcttgaatgtaggtaatttaaatttcccaaatgaaagatagatactggctaaatgaattaaaaaaacaaaacccaattacatgctgcctataagaaactgacttcacctgtaaagacacccatagactgtaagggaatggatagaaaaagatattccacacaaacagacaccaaaagcatgcaggagtagacagacaaaaaatactgagtc

SEQ ID NO: 274807 - DNA, 192 bp, Homo sapiens
aagaaatctcttcccatggccccaccactgggaatgcgctgggtcacacctgaagccagcatggccctggctctcacccaaggcctgtgacagttgttcaatttggtgctcctgttgggggaactactgctggagtgttctatttggccatcttgttccacccttgaacccaaatatatttctgatattgtc

SEQ ID NO: 274808 - DNA, 484 bp, Homo sapiens
tgcatcaaactttccacagctgttaggagctagtacgtccgtagcctcattgggccctttccccacccctaccctgctgaagaacatgggaaatttctgggcatgctacgtggagcctttaaaatatgaatactttgtctctctggtgagaaagcactggggtccagatggggagaagatgttctgccataagaaaatctcctggtctggtccgtgccttggcttagcacagggctgttcaggcagtgtgaggacccgacaggagggaggggcaggcagaagggagaacccacttttttatccattctgcccagcaagtaggggaccggggttgtccgggcgtcgggggagcggggagctcagactgtttttagactgacttggaatccggcccagagcttgatgcccggttcaaagcattccctcctgagtggacattacaagacctgcagcgaagaataaaacagaaagacttgcaaacaaa

SEQ ID NO: 274809 - DNA, 204 bp, Homo sapiens
ggtcaaagaaaaacacaagggaaattagataatacttagacaagtgaaaacaaatatatagtataacaaaacttacgagatgcagcaaaggtaaggaaaatatatatctgtgaacatctacattaagagagatctcaaatcaataaccttacttcattccgtgagaaactggaaaaagaagaaaaaactaaacccaaagctagc

SEQ ID NO: 274810 - DNA, 392 bp, Homo sapiens
  misc_feature (253)..(253): n is a, c, g, or t
tcttgtatatctgtatgcatggatgtatgtatgtatgtatgtatgtatgtatgtatgtatgtatgtgtgtatttatttatgtacgtatttatcaggagaccgggtctcactctgtcgcccaggcctgtagtgcagtggtgcgatcttgggtcactgcagcctccgcctgccaggttcaagcaattcttccaccccagcctcccgagtagctggggttacaggtgcctgccccacggcgcctgactccatttcngtattttcaagtaagagacgggggtttcaccacgttggcccgggctggtctcgaactcctgacctcgggatgacagacgtgagccactgcgttcagtgtacagtgccatttcttagaaatcactcctcacgggaacaca

SEQ ID NO: 274811 - DNA, 1054 bp, Homo sapiens
ctgtgcaattcgggtgagttccttcacccttctgagccatcccttggctcgtctggaaaatgcaaaaaaaaaaaaaagaaaaacaccaggtttttgcatcctcctggatgagggatataaagtgcctgacacagcatatgacagggatttgataaatgggggctgttagctgtcccattgtggatgtgagaatagcattctgctggctaaaaggcagacatgaatgttctagaacatggcgatcccggaatgtgcagtgaaggcaggaagaggaagaatgggcagggaagaacaagttgggatggaggaatgaactcttatctccagaagcagagctaagaatgcccacggagccttggcacatgacagcctccgctgagccaaatggcccaaagacttctgaatgagcttttgctgcaacaaaaaactttggatcattttgagagcctcccgtgaggcgccaatatgttgcagtaccttcccggccccgacactgatgtgattcatcgtaggtaacatatgaatacgctcaagctggccagcagcttgaaaaattggagtctatcaaattgaccttgagaaacacaggaaggtaatatttagtgacataccagatgaaatccttgcgcagagatgtgaggtgaggaaggacctgaagggaagtagaccagcaaatatcaagggtcaaggagttgggggatgatatagagacgaagcctaacagatgtcaccagagcaagaaggccttacgacttcacatcctctctgcagggtatgaatggtgcaatggaatgaaatggtaactacagcttctggtgcaaaatttgagtttccataatcatcatcttgggaaaatgaggaacacaatataatggcatacagagagaacaagtgaaaagatgagagatgatgaacaggttgagtttcttcagcctacaacctatcaaatctaattttaaacatctggagccacgtgtattagttttgtttctgttccattttcctttttctgtgtccccgacggtgaatgattctgaataattcttagtctggg

SEQ ID NO: 274812 - DNA, 594 bp, Homo sapiens
  misc_feature (553)..(553): n is a, c, g, or t
ctgtgcaattcgggtgagttccttcacccttctgagccatcccttggctcgtctggaaaatgcaaaaaaaaaaaaaagaaaaacaccaggtttttgcatcctcctggatgagggatataaagtgcctgacacagcatatgacagggatttgataaatgggggctgttagctgtcccattgtggatgtgagaatagcattctgctggctaaaaggcagacatgaatgttctagaacatggcgatcccggaatgtgcagtgaaggcaggaagaggaagaatgggcagggaagaacaagttgggatggaggaatgaactcttatctccagaagcagagctaagaatgcccacggagccttggcacatgacagcctccgctgagccaaatggcccaaagacttctgaatgagcttttgctgcaacaaaaaactttggatcattttgagagcctcccgtgaggcgccaatatgttgcagtaccttcccggccccgacactgatgtgattcatcgtaggtaacatatgaataagaatggaggagtgatggctgttgganctcgtccctcttttgacaaaaaaggggtgattgtggttgaa

SEQ ID NO: 274813 - DNA, 333 bp, Homo sapiens
caccactgaatattggggcattttattaggtagtaacatattattacaacgttgatttttgtaacttattattattttttttagttgttccagaagccacaatgtcccattaccaccttctacaacctaactgaaagcagaaacctgaacctagtgattttgcagaagcaatttgcaaagttcattataaggtaaaattatttctgagaggccaattttctctaagatattctaaaacaaacaatttttcaaacacaatatactccaactaaatcactgcaattataaccattttcgtcttactaaataaactattgtacatagataatcaag

SEQ ID NO: 274814 - DNA, 909 bp, Homo sapiens
  misc_feature (12)..(12): n is a, c, g, or t
  misc_feature (20)..(20): n is a, c, g, or t
cgcgctaaattntttgtatntttagtagagacggggtttcaccgtgttagtgcaagcttcgcctcccgggttcatgccattcccctgcctcagcctcccgagtagctgggactacaggtgctcgccaccatgcccagctaatttttgtatttttagtagagacaggtttcaccatgttgaccaggctggtcttgaactcctgacatcatgatcttcccaccttggcctcccaaagtggataaatcttttaataatgtaatttttagatgaggaaactggaatctagctagtaggtcacatacctaataagtggaggagcaggaatttgaacccccgaactcagccacaactgctgtttaccccaaataaggtccacaaatcatgacacaaaatgtgtttttgtgtatgaaaaatttagaagggtctatgacccaattctcagctctggtgacctgtgtggtgggaattggggtgacttgttcctgttctagtcttttctatatcttaaacagaaaaccgacactttggttattacaacataatgcaattttaagtaaataagcaggagccgtctttaccctcctgggatttccttgtggccgaatgaaaacccacccctacgctgtcattttatgtctttcagtttctgtgcagtcagaccacagagaggggctttcttcaccatggatttggcatcccttcagttagagagtggatctggacatatgccagatttgcctggatgtttttctgctttccaatcataagccaaaaaaacaaaaaaacaaaaacaagaagcacacaggaatgtatgatttgaattctggatctctcagttcccatctcttaattttttagttgtttggctaatgcttgggcattttagccatggataaatactagtaaaga

SEQ ID NO: 274815 - DNA, 466 bp, Homo sapiens
agggtaacttcccttgttttcagtacttctcctgtatttgcagtttctccaaataatcagctcaaaacaattcttctgccaaagaggcgtattttgggatggaatattctggcctcctacagtcatattttgggatagcatatcttgaaccccatcagtagttactgacagaagttattcacaaaagaccaaatatatgattctatctatatgaaatgttcagaataggcaaatatatagagatagaaagagactcaatactgtatgggactgagggaggtggaggaatgtggggtgactgctaatagcaatggggtttcttttgggggtgatgaaaatgttttaaaaccaatggtaatgatagttgcacaactctgggaatatactacaaaccacaaaattgtatactttaaatgggtaaattgtaaaatatgtgaattatatctcaataaaactgttgaaagag

SEQ ID NO: 274816 - DNA, 353 bp, Homo sapiens
cttgaaattaaatggcagaatttcatactgtaataggatgtatcaatttacctagtattaattagtgttaaaatactggatttttgtcaattattattagtctttgatgcatttctgtagctagcattgtcttttgtatgtgttggcctttgcatatttttccaaagaagtattatatacttttggggtttcttattttgaattgaagaatatgctaagattgcataaaaggaaaaataataaatacactatgttcaataggtcaatgtcttgttttttgttttttgtttttttttcacagcaatgattttaaataaaataaacatagtttaaaagtctgaagtattttgtcc

SEQ ID NO: 274817 - DNA, 342 bp, Homo sapiens
atattcaacctgtatctgggaacccaccctgcaggaggacagagggcctttgagggtggtaaggcccaatggagtgctgacccgacgtagtcaccctggctgaagtccctgagatgcctcctgcaccgctggtcaggaagagggagagcacatggaagtgcagggaaacctgaggcagtcactgaggacactccaaagctgcattactatcatgctgcccagacaaagccagcattctgttccccaagtgagcattcaaggcagcacagacacaggacaaaaagtgggtaaatgcattttccaacaccacaaagcatgggctacggcagcactccgaggcta

SEQ ID NO: 274818 - DNA, 887 bp, Homo sapiens
ggctggagcagccttagatgccaggtcagggtggcccgggggccactgcctccagctgtgtctagtgctgcagggatctcggcatgaggccccttctcccaggaggggaggcacagcctggagacacaggccccatccttcccaatggggacacttcagggagcggctctcaggtcccgagaaagaccttcctggccacaggagacacacggacatcgggaacggacggaggaaggatgtgcagttgcagccttttcagcagacgccctgagaacgggaggtcaagagttggagcagacggcgacagggcctcagacctaaggcaggagcaccccctatgccagacctcctgggtcacaggatatgcacggacattgggaagggatggaggatggacggaggaaggacgtgcagttgcagctctttctgcagatgccctgagagaggagcaagaaggtcctcgccagatgctcctggacttgctttggactttcccttgctcttggacttgctctggcacctgtgctcttggacttcacagcctctagaactgtgagaaataaatttccgttcagtataaaacaacaacaaaaacacaaaaaaaaaattgttggggcgcctgcgggccccggaaaaagtattcaaacccttcggtggcgcgccgggcccaggaggggatggaactgggccaagcgggccaaggaaaccggctgacagggcggtttccaccaaaaaaaccgcgggaccgcgtgtcgcacaaaccaagggctcgcgcttccggctctaacacggcccacgcgatacccccccgcgtggcgacagtcacacacgaacacacacaaaggaagatcaacgacccacccacacgcagacagccatggcagggc

SEQ ID NO: 274819 - DNA, 256 bp, Homo sapiens
ggctggagcagccttagatgccaggtcagggtggcccgggggccactgcctccagctgtgtctagtgctgcagggatctcggcatgaggccccttctcccaggaggggaggcacggccaccagatgcctccacccagaaaggtcagatgtgggagagttccagagtcattccccaaccctggatgagcttctgcagcctcagtgctactcaggttccagcaagacctggagcaggtgcaggtgaggccggaggcca

SEQ ID NO: 274820 - DNA, 869 bp, Homo sapiens
gggccaggtcagggtggccctggggccactgcctctacctgtgaccagcgctgctggggggatctgggcatgagaccccttctcccaggaggggagagcctggagacacaggccccatccttcccaatggggacacttcagggagcggctctcaggtcccgagaaagaccttcctggccacaggagacacacggacatcgggaacggacggaggaaggatgtgcagttgcagccttttcagcagacgccctgagaacgggaggtcaagagttggagcagacggcgacagggcctcagacctaaggcaggagcaccccctatgccagacctcctgggtcacaggatatgcacggacattgggaagggatggaggatggacggaggaaggacgtgcagttgcagctctttctgcagatgccctgagagaggagcaagaaggtcctcgccagatgctcctggacttgctttggactttcccttgctcttggacttgctctggcacctgtgctcttggacttcacagcctctagaactgtgagaaataaatttccgttcagtataaaacaacaacaaaaacacaaaaaaaaaattgttggggcgcctgcgggccccggaaaaagtattcaaacccttcggtggcgcgccgggcccaggaggggatggaactgggccaagcgggccaaggaaaccggctgacagggcggtttccaccaaaaaaaccgcgggaccgcgtgtcgcacaaaccaagggctcgcgcttccggctctaacacggcccacgcgatacccccccgcgtggcgacagtcacacacgaacacacacaaaggaagatcaacgacccacccacacgcagacagccatggcagggc

SEQ ID NO: 274821 - DNA, 1083 bp, Homo sapiens
ggctggagcagccttagatgccaggtcagggtggcccgggggccactgcctccagctgtgtctagtgctgcagggatctcggcatgaggccccttctcccaggaggggaggcacagcctggagacacaggccccatccttcccaatggggacacttcagggagcggctctcaggtcccgagaaagaccttcctggccacaggagacacacggacatcgggaacggacggaggaaggatgtgcagttgcagccttttcagcagacgccctgagaacgggaggtcaagagttggagcagacggcgacagggcctcagacctaaggcaggagcaccccctatgccagacctcctgggtcacaggatatgcacggacattgggaagggatggaggatggacggaggaaggacgtgcagttgcagctctttctgcagatgccctgagagaggaggtaggagcacccttgctgtggtttgaatgcttctctcctccaaaactcatgttgaaatttcattgccattgtaacagtatgaagagtgattaggtcataaggtccccacctcatgggtgggattggtgctgttataaaagggtgagttcggccccctcttgctctctttcttgccttccgccatgtgatgacacagcaagaaggtcctcgccagatgctcctggacttgctttggactttcccttgctcttggacttgctctggcacctgtgctcttggacttcacagcctctagaactgtgagaaataaatttccgttcagtataaaacaacaacaaaaacacaaaaaaaaaattgttggggcgcctgcgggccccggaaaaagtattcaaacccttcggtggcgcgccgggcccaggaggggatggaactgggccaagcgggccaaggaaaccggctgacagggcggtttccaccaaaaaaaccgcgggaccgcgtgtcgcacaaaccaagggctcgcgcttccggctctaacacggcccacgcgatacccccccgcgtggcgacagtcacacacgaacacacacaaaggaagatcaacgacccacccacacgcagacagccatggcagggc

SEQ ID NO: 274822 - DNA, 659 bp, Homo sapiens
gaccaggagaccatccctgcagcagccgggccatgctctgaggatgtgggacgaggacccccactgtctctgagtacagggcctcagacctaaggcaggagcaccccctatgccagacctcctgggtcacaggatatgcacggacattgggaagggatggaggatggacggaggaaggacgtgcagttgcagctctttctgcagatgccctgagagaggagcaagaaggtcctcgccagatgctcctggacttgctttggactttcccttgctcttggacttgctctggcacctgtgctcttggacttcacagcctctagaactgtgagaaataaatttccgttcagtataaaacaacaacaaaaacacaaaaaaaaaattgttggggcgcctgcgggccccggaaaaagtattcaaacccttcggtggcgcgccgggcccaggaggggatggaactgggccaagcgggccaaggaaaccggctgacagggcggtttccaccaaaaaaaccgcgggaccgcgtgtcgcacaaaccaagggctcgcgcttccggctctaacacggcccacgcgatacccccccgcgtggcgacagtcacacacgaacacacacaaaggaagatcaacgacccacccacacgcagacagccatggcagggc

SEQ ID NO: 274823 - DNA, 1338 bp, Homo sapiens
aggctgtcatcactgaattctgatgggctacctggaactggcttagggtgggattacatacgcctcctgccacatcggatttccttctattttgtcaggggtggcatcatccagtgagtaaatctgttagtgatctccctcgcataacctaggaattctctcaggatccatttttccagtagttttgagaaagcgaccaacaacagcaaagagagtagttcttccattccaagagcagccatcttgcttaactgacaaactagagagaactgcaaggactcagtacatccctggcacagtccgttctctctcacagcatattgtatgagactgtgtgagtgctgcttccacggtacactaaaaacccatggtccctgcattatttgagcaactgacaagcttctgaagttcaggttcgcgaacgctgagagcagcacccagtggatttgtggcagggacagcgtttcactatgttgtccaggcttgtttcaaactcctgggctcaagccatcagcctgcctcaacctcctaaagtgctgacattacaggcatgagccactgtgcccagccaggaaatgtttcaaatacttgagatttttgatgaaccaagctggctggtgtcgcctcagtttgtctaaattaccaaggaccgctggaatttccctgggaatatgtttcgggaaaggtcagaaactcttcagtcgtcttcacgcttccactcagtagcaacgtttttgcacactcattgactatcaactggttgtctatgactcaaattacataatgaatccagcacataaattatttactcagatttaatgccagcaactgttatctttgtatttttttcccctctgccagctaatctggctcatttcattggaattttggtcatgcccattctccttcggcactaaattaactccataacgtagtataaacagaacaagcttgtgtgtgatatgcttaactgttaatttacctaattaaactaattcaattaaatcatttacatctttttggtaacatgccagttgataccacagcagaagtggaatgtttcagaagatgattgttcagcaaatgaatggaaaaaaaataaaaggaaaacaaaatgagacaaccgtccaaatctcttggcttgaaaattaaatgatactgaaaaaatgcagctttcacggggcactgtgattagatatttttctgaaatcaattttctctacaaattggtattttaacagagtgatcacaatctattgtacaaaatattttaaacactatttgtacattcacatatttggtatgtttaagtaaagtgtgcttgttcccacaaaaagg

SEQ ID NO: 274824 - DNA, 935 bp, Homo sapiens
aggctgtcatcactgaattctgatgggctacctggaactggcttagggtgggattacatacgcctcctgccacatcggatttccttctattttgtcaggggtggcatcatccagtgagtaaatctgttagtgatctccctcgcataacctaggaattctctcaggatccatttttccagtagttttgagaaagcgaccaacaacagcaaagagagtagttcttccattccaagagcagccatcttgcttaactgacaaactagagagaactgcaaggactcagtacatccctggcacagtccgttctctctcacagcatattgtatgagactgtgtgagtgctgcttccacggtacactaaaaacccatggtccctgcattatttgagcaactgacaagcttctgaagttcaggttcgcgaacgctgagagcagcacccagtggatttgtggcagatgaggaaactgaggcccagagaggttaagtgattgccctgaagccacacagctaaccagagaagatataagttcctgccttccttacttcccattctcataagcaagtttccgcatgaacaaggtggcaggtctgagcaaaatgctaaaactgtggccccattttgtttgtgcacatgtatgtgtgtacatgagctattggtgtgacgggagtttgcggggatattctctccctgttacatgttttcacatttcccacaagacgggaatgaaaaggaaggaagagctgaaccattccctcaggcaagtagatctgtggcaaacaaagagtccacagctcggtctccacgggggtcagtctgacttccttccctcagaagcatcccgggctacattttcatcttcgccgtcttccaatcttgcataatctataataatgtgattccaaatgcattttagcaaatgcaagatggaatggga

SEQ ID NO: 274825 - DNA, 393 bp, Homo sapiens
gggatgggcacagtggcttacacctgtaatcccagaattctgggaggctgcggcgggtggatcacctgaggtcaggagttcgagaccagcctggccaacatggtgaaaccccatctctactaaaaatacaaaaattagccgggtgcagtggcatgcacctgtaatcccagctatggcaggagaatcgcttgtatctgggaggcggaggttgcagtgagccgagattgcaccactgcactccagcctgggtaacagagcgagactctgtctcaaaaaaaaaagtcatttatgttaccatatgatagattctttattgtgatttttcaaatgaagtactaaataaatattgaaataattcctcaattttaatatagaatatgatacatattaaca

SEQ ID NO: 274826 - DNA, 1502 bp, Homo sapiens
acatcgatacgactttttttttttacgattcaaaggaacaccattttaatatctgaaagtagcataatgttcagccaataggcattggtacaaccatacatactgcttgtttacagcaggcatcccttctgagtggctggcatctgtcctgtaccagttgttaaaatattttgaaaatcatctctgtattaaaataattgtggccctatgagatagggaatatgaaataaatgaaggattcctttaacatcaaaggtctttagagtaagactagaatacattagtatattttaaaagtctaaggaatgcaaaattcaataaagtgatatagccaacccttcacctaagaaagaaaaacacatcggggaacttcccactgtacaaagattttccaggatgggaaactaacatgatagaattatctgggtgctaatgggcttgctagttacattctgtgcacaaaggaaggaaaggtttataagcactggatcccaaatactttacattcattgcaacatagaagagaagagaaaaactataaatgtagttttaaattaaataccaaaactaatttcaccacttacagttcatttcccagtgtgactttttgcatctgagagccagaatgtttgtcaaccaaaagaaatccatgatgatgaagaaaccacatggctgaaggtgattttggtccattgaactgatgatcgtttactctaaggcagctaaggagacagtacgtaagcacttggatctcgccaggatggaattggaatgtatcctcaagagacagcagcaagaagtcgaagagtcccgcaaaatggccaataaaaacatcatatcctcctttctattcacaaacaactattatcaaatctttcccagatatctagaaagcagacactatgacaaatcttcaggctaggaagttcttcctggtatctaaactaattccttctgttgcaatctaaactcaatctcttactctatcctcaatgaaaaccaagagacgctgctcatcctcacttactgttgattttccctggatccctttcctatctaagcgacacaactcaaatgtcccttcttggctcttgtatcatccaagattcttgccagttatgcaggctgctgctaaggagtgatggagatgcacccaggtcagaggcatcttcctggctgtggtggcaggcactgccaatgcccagatcatggatcttcctggtagctgacctcctgacaacctctgggtctgaccagcatcccccaggggaggtaatcaaaccaaggcccagggctgcctaggagcctgtagacactaagagcactggagagccagagaggatgtcctctctgttcccctcctactccccactctgtcctttaggaagagggacctcactgaaggactcctcagtggcagaatgaatccatatggcttggcaggccagcagagaatttcagagaaaacgtctggaaaatgggaagctagctcttcaaccgct

SEQ ID NO: 274827 - DNA, 747 bp, Homo sapiens
atgaacaaaagcccagaagtggtaaagcagaggttccattctgcagattagtacaataggatattttaaagagaactgtgggtcgattctagactttgtcttgcatataataaaaagccacttcaaggtatttaatactgtcctttgaaatatcgcacttgaaatcccaattggctttctccacagcaaactactttagtcctgaaaaacttccagaacagtggttctcaagtggagggcttgttaaaagattgcctcttgcccaagggattctgaggcaggtctgggatgaatcccaagaatttgcatttctaacaagttcccaggtgatgatgatgctggtccagggaatacactttgaaaaccactgctctagaacaacatattcctaaaaagagaatttcaaggccaaaatttcagcaaactttgcatattataatcctatccttgagattcacagtgcccattagcaacattaaaggtcctaaggaatgcttatagtaaatgcttcacatttttgacctagcctttatcaaacaccttcttccctccatagatcacctattaatgtttcaaagtttgagaaacactgctctagaaatttttgtgacttaaacctaaggttgttagaataatacaaaagacactgtatattcagtgtttagcacgttcgtgcttaaatatggatggctgttagctgctacctgacaaaacattcagcaagcaatcattctttggtccaaaaaa

SEQ ID NO: 274828 - DNA, 345 bp, Homo sapiens
cccaggcagtcaggcctgcataagccccacattctgcagggcaagtgcatgtggcgtggctcaggaagagcagggatgaagagagtgggaaccccacgaggaaccgtgggcagcaggctggcggggagcccgcggtgcctggcgcgttctgtcttctggcctggaacgtaatcacgcgggcgctctgcttctcacccttgcatttgcgtgcacgctctgctgtgctcagagtcactgacaccaagggccctgtgtggctgggtggggatgcgagatgcaggcttgcctggtgacaggacttcttgcttcctgagttgtaccctgcacagactgcagaggctatca

SEQ ID NO: 274829 - DNA, 360 bp, Homo sapiens
ctgaggcaggcagatcacctgaggtcaggagctcaagactagcctgaccaacatggcaaaaccctgtctctactaaaaatacaaaaattagctgagcgtggtggcacacacctgtaatcccggctactctggggggcctgagagacagagcaagactccgtctcaaaaaaaatgagaggggatatcactactgactttatagatatcaaaaggattataagggagtactttgaaaaacctcagacaatgtaaatgatgaatgaataaacttctaaaaagccacaaagtaccaaaagtaactcaaaaagaaatagaaaatctgagtaaactgaaaagaaaaaattcttacaaagagctttc

SEQ ID NO: 274830 - DNA, 399 bp, Homo sapiens
ttatatcatgcaggaaatagtctctcaccacaatggaaaagttttaaagcataacgataagaaatcaatgacaacttcaatatttgccaattaaacaacaattctaaatggtgtattgatcaaagaagaaaccataaggcaaatcagaaatattttaaatggaaaaaggtataatttgatggatgtagataaagtattgcttagagagaaatttagtgctttaaatatttatattagaaagcaaaaatagggcatggtggtgggcacctgtagtcccagctactcgggagtctgaggcaggagaatggcgtgaacccaggaggcggagcttgcagtgagccgagattgtgccactgcactccagcctgggcgacagagtgagactctgtctcaaaaaaa

SEQ ID NO: 274831 - DNA, 375 bp, Homo sapiens
agtttgttcctgactgttgactttgtcctatgggagaggtcatctttgtgcaaattggcaatccacaagaagtgagctgtgcacaagagcatttgaagactcatgacacacagtcatagcaggaagtggcaaggcagcaagctgtgaagaggcttaaggggaagatggggaccagaggctgagaaaagatacagatcatccagagagcaattgtaatagacaccgagcctccctcttcaagtactgacctctaataaacatcttgcattcaagctccatctccactccctgagaacccaacctatgaggctaagtttaaaagaatttacagcaagagcagcaaaagcacattaaaataattaaacaatttttact

SEQ ID NO: 274832 - DNA, 443 bp, Homo sapiens
attaatacagagcctcaagaaagacaaagcaggttaaagaaagtacaagcatctttgcccaccagagtgacaaccctagacatcaccgaggatgggcaaggcacatccaatatccttctggcaggagtaagaattagccccagctctttggaaagcactttggcactgtctagccaacctgtgtgtactgtgtgaccctgacattctctgtcttggtatagatgtgagcaaagttcatactcatgtgcgttgggacacgcgtataagaaggtccacagggcattgcttataggaaaaaaaaaaacaacccaaaaactaggctgggcatggtggctcccacctgaaatcccaacactttaggaggctgaggcaggaggatcacttgaggccagaagttcaagatcagcctgggcaacatagtgagaaccaatctttcttttaaa

SEQ ID NO: 274833 - DNA, 343 bp, Homo sapiens
actccgtacccccctcccacatacacacgcctgacagatggggaaactgaggctcaaagagccgagcgcggaaagagcttctggacttcacaggccaatccggtaaccttatgcctgacaaacaaaaccttattgtcattggaggaggatggagggcgggagtgactaaatagctctaacttctgcttgccacctgccaggactcctttccctgggcttagtaagaggagagtctaaacgcgctaatgcccgggaaggagcaggcctcgcgttctggcaggctcctctatgggatcccggttccgaagaacagtagcaaataaacctctcctaggttatgcac

SEQ ID NO: 274834 - DNA, 474 bp, Homo sapiens
ctaatctccgtttcttataagcatatcagtcatattggattaaggccccctaataacctcattttaacttaattacctctttaaaaaccttatctccaaatatcgcattctgaggcactgtggactatcacttcagcatatgaatttgagggtaacacaaattccacacattaacagatggaagaactgagtctgtgaggtcaagtgtcttgcccaggctcagagcacagtcaggacttgttttctgtactagacacctaagcaacaaggaaacttctaattttcactttctgatatatcatggaattttttccacatcattgaaaacacttctacataatcctttttaatattacctagtttcccattgtgtgatcataatttatgtaagcaatcctgcattgatctaagatgtttcttgcactttttaaaaaaatatgcctgggaaacatagcgagaccctgcctctgcaaa

SEQ ID NO: 274835 - DNA, 397 bp, Homo sapiens
aactctgagggtgcttgttgaatggaattcatctgaaacttcagaagtgccttcccattgtgtcagggtgtgtgtgtgtgtgtgtgtgtgtgggtatgtgtgtaggcggaggaaggagggacagtgtgtgtttaatcttctcaactaactttcacatttttttgagagtagggtcaatgtcttctactttcattagtgtgcttgtctttcaaagctccttgcctactgcagacagcagagtgaatggccctattttcatgtcatgttaaagacacccatgaaggtgaactgaactatacagaagagaaaggtagccagggagctgataacaacagagaaaaatgagaatttactcagcaggtggatctcaccaacttgcagaaggctttaagattct

SEQ ID NO: 274836 - DNA, 487 bp, Homo sapiens
gccttccgttattacagcgtagtacaagagatgagatgtgtaggaaaataacaggaaaggttcagataaagagctacagtgctcagtggcaagagagatagcttctgtttgaggtgatccagtaacagagctggtcttgaaggatggtaagttttaaacatctttggtgagaagaaggtcattcctgatggaggaaccatcatttatgcaaagacacagaagtgggaagtcttaggatatgtcctgagagcagtaaattgcttaatttgtctcacccagttctcaactgggtgattttgcccccatggatcactttggcaatgtctggagacatttttggctgttacaaatggaggaagagggagttgttactagggtttagtggatagaaagatgctgctaaacatcctacactgtacaggacatcccccctgcaccaccacccccaacaaagaattatctggtccaagatgtcagtaggactgag

SEQ ID NO: 274837 - DNA, 276 bp, Homo sapiens
tataaaaaaggaggaaatgtaggaaagggagttaattatcaacacataaaacattttatgcacagaacactagtctgctcacttataatagtggccaaattaagataacaaaatttagcagatttcaatgatgtgagggaccaaggtgaggtttatgaggtagttgacagagaacagagaattaaaattacatcattaaccatatagtgaaacattttcattgaggatcatcatttctcttttcttcctagtacagctcaatgatacacatttata

SEQ ID NO: 274838 - DNA, 945 bp, Homo sapiens
atcagaaatgatgcgtacagtagtagttgtttgttgttagtgcgaggactttgtgatggagcaagctttaatttaaacttttcaagacaatattatgaagaatgcacagaggaaaaagcatgttatggatataatttgagccctatgaaatggggatagctacagcattgaaatgtacctaatacaatttgagttattctcactaagaaaccttgatggtatctgccttctaggtactgtgcttttggaaatactatatatccatttaaatgcagatcttctcttttctccagggagcagttggtgaatctttcaattgaaccacgggtatgataaaaccaactgaaaatttttccatgaacaatagagtctgtcgttttgaagtaatgattatcaagtttcataatattgtgatttttaaaaattcatttaaaatatcttcataaagtcaaaataatgtaccgggacttcttgtgcaaaggaagaagttttctcttgtcactttgttgtcagtttgttaaagctgtgaaatcatacggctttgcaattcagtttttaggttggcactgccatcccagtagagtaaggtaggctttaggaatcagagcaaagaattataagtaagttctatgtgttctcaccctctcatgctagtggatgagcgtgtggtgctgtaggagagtttaaagatctttctcggctgggcacagtggctcactcatgcctgtaatcccagcactttgggaggctgaggtgggtggatcacgaggtcaggagattgagaccatcctggccaacatgatgaaaccctgtctctaccaaaaatacaaaaattagctgggtgtggtggtgcgcacctgtaatcccagctactcaggaggctgaggcaggagaatggcttgcacccgggaggtagagatagcagtcagccgagatggcgccact

SEQ ID NO: 274839 - DNA, 2175 bp, Homo sapiens
tagctataacccttctcttatttcagtggcagctttagggtttctgggatacatctttaatttatcacattctgctttcaagtgtaattatacctccctttctggcctttatcctagtgttacgtatttttactttatgcattataagttttgtgattatcattaccttcatttattatgtcaaatatttttaaaaagatttaaattataagaaaatgtgtagtacatgctttctaaatgccatttccaatatttgtttttgtataggtccagatttttatctgggatccttttgcttctgcctggaggactcttaagatttcttgtagcgtgggttggtgaattcttttagtttttgtatgtttttcaatgtccttatttcactcacagttttgaaattttatttttgcatagaattctaggttaatttttttctctagtactttaaaaatgttgccatttatgaagcattgccatttaaagtatcatctttcatgtgcttgtgaaaatggcataaagccggtttcttgtgctggttatgtaattttcagaatgtgtatttaaatttaaaatattaaattttcctaaaaaactaaaaatattaatcatgaatgtcctagattcatcttaaattccaccaacagtgcacttaaaatgtgcccaacctgagggtcaaacctacctgctgacatgtaatttgtgtttgtgagacattctcaacagcatttgctttccccagctgagtgatcttcctcacatctgaatgtcttcagtgcaaaaggaaatgtttttcttcgcaaaaatactttcaaatactcttacttcaaggaagtgcattaaaaacaaacttctcatttgcatccctggaattcaaagccctaatcaagtgcttcaggatcaagagctaaacaggggaggacaaagcgtggcttcttcactaggagtcaagccaaagtcaactggtttggtctccaacgtagatcggaactcggttcaccagcgacctgaggacccggcccagaagagggagtatctcttcatggtgccttcagatagaaaatctcctaggatttctttctttccctttgatctacttccaactctccctttctatttcttcaagacctttttcggatccctactgcgaaggacctaaggggccggtgcccttccccactggtccctccctgcctggtgtcttaggagcccaagctcacctggaacattactgcccgccggagacagcgagaggaccaaggagcgcggcggtgcggtgggaaccacagcgtcaccgctcacctgcgcctcgtgggctcctagaaaattgaataaatgccccctgaagcttctctgcaggtcacacggaagaggagggtggctgccgacacgcgggagaagcttcaagaagcgtcgggaggacctacctggtcctgcccctgggccttgaagacaggcctggccaggctgatttggtccggtagtctcaaagaaaatgttcaagggtggcccaaacctccaccccaagattaaggctcttaaatgtctgacggttttgagactcgtcagtagaatcaatcccgcctgtatcaggagactcctttgccaaaattcaaagaccaagaaagagaaagattgggcaggttaaagtctgtaattaaccaaacaggagacagaatttttctgagaaattgtatgtgtgctgtgagaaaaagactagcctcaaggagaatctgttcttttggcttaattgtaggaaagaatggaattgccaccaacaatggtgcgttgaaacggcaggtgcatcaggctgtagatgtgaaggaattaaaaatattttaccccaaaatacatttctttgacatattttgagatgtctgttcagaaagccagctgcagaagtagccctgcaaagttgtctttcgttggggagatttgcatctgtagggaatctgcattgatgcagccaagtctttccttgcccagatctaggaaagattaactgagagtctgacagctgtaaaggtctgaaagaaactttcagagcttattctttctgagagctgctgcctgtaaggtttcatttacatattaagatcacctttgctagccaggcctcctcttctctccctcccataacctgtcttgcccacaataaatggatatacctctgactct

SEQ ID NO: 274840 - DNA, 467 bp, Homo sapiens
agatggctaaaggaaaaatcaccaaaaagaaagggttctaaaggaaaatcctgaaatcacaatggcaaaaatgacagaagaaaatgaattaaaaaatcaaaagagacagatgttacatgcagaagcccacgtctgctttctctgagaggatgtgatatactcttccccgggcaggagctgatcatttaaaagacctttatttaatagtttcggatggtttatttgtattactccttttagaaggatgataataaaatttcccttttcctaatgatttggccccattttataaacattgattttttttttctccctcctaactcaatacttctccacagtagtggctgaactatgtacttccctgtggcagtcatgagacaaataatcatccatacagagcttgatcagtgctccctgcacagccaggcaaaggggctttatgaagaaaggcactaggaattctgaat

SEQ ID NO: 274841 - DNA, 355 bp, Homo sapiens
  misc_feature (125)..(125): n is a, c, g, or t
  misc_feature (134)..(134): n is a, c, g, or t
agaagtgctcgcctctctggcagagggagcttcacttctgttccattcatctccctagctgctcagcagttcctccttttggaggctgctgttcctctcctcttccgaggcttgggcatcccagntgcaggacntgggagcccaagccccccagccacgtgagcctcgtgccccggtgcacagcagccccgctcctgcccagccgtcagcgctcactttcctcccagcttttgttccgcacctttcctccctacaggttctggcactgcgccttgctgctgacttgtatttttttctccatgatacaggagggagggtaattaggaggaaatcctgagaatcttcaaactactgg

SEQ ID NO: 274842 - DNA, 368 bp, Homo sapiens
ctctttatttgttcttactctgttctatttggccccagaaagggctccccatttcagaaagagaatgtctggtacaggggagacgctcagtaaataaaagaccccaatttgttctcaagccatgaatattttgcaaattaatgcaaagttctggtttactaattaatctactgtgcatttggttaatttgaatcagtcctcagggtcagacagtcctggaagggggaatagaaaaactggcaactgaggttatcaatctgcagacagactttgaactctggtgccccccacccactacagccaatgaaaagggccttgaatgacacaggagctttctccctttcctttgaaaagtgtttgtcctttcc

SEQ ID NO: 274843 - DNA, 139 bp, Homo sapiens
tcttgtactgtactctagggctgtttatatttttttaatctataatattaagtttcctagtcatttacctttttttggtaaacacttgagttatacaatgatgaaaagtaaagttccttcctactgtttctctccagtc

SEQ ID NO: 274844 - DNA, 561 bp, Homo sapiens
gtgtagcctaggggcaataggctatgccatatagcctaggtgtgcagtaagctacagcacataggtctgcataagtacaccctatgatgttcgcacaatgacaaaattgcctaatgacacatttctcagagggcatccccaacaataagcagcccatgactgtatattgctaaaataagtacatatagaatgtaaaaatatagcaagcaaaacaaaacaacaacataaaaaaatcctcatatttacactagcagccaggaactgtcttttgagttctgaggacaatgacctcctttcactgaccccaaatggctggagtcagtcagtagtccacacatacttctttacttgtttcctctttgccacattcactaggaagatgctacaacaaccatcgccaggtggccaactctggttcacctctatgctcacattcaaaatggccctgggattgagctgggtagaatgcagcctccaaacctagaccagaagctccccattagagcttccttttcttagaataaataaacatccaaggtaaagaggagccaaaatgtattc

SEQ ID NO: 274845 - DNA, 301 bp, Homo sapiens
cagctagtaagttgcagagctgggattccagttcagttggtcagattctttaaccagttcttaacctgcaggctagattttagccttatcctggttcacatgtatttaaatattctggccggaggataccccactaagtataaaatagctttgaaataaagctatttcaagggaatgtctaagaaggtatctgaagcatctaaatgaagaaactagcattagaaaacatactaactggcaattttatttagaatcatgtggctgtgcattccatttcttaaagatagtaaattttcttaag

SEQ ID NO: 274846 - DNA, 315 bp, Homo sapiens
ttggccactcctaaatttggagcaagaaggccccgagggaggaaggggaatcatgtggtcaaaagtgcccagatcaggccagtaccaggtcagcgtgcgggggctgaaactctctgtcccactgatgctggggacgtaggaggactgggttcagaagcccctcagtggttgttaggagtctggaggtccaggcacctagacagccctggcgtgttcgtgttattaatcagggatctctttttatttatttatttatttatttatttatttatttatttatttttgagagcgtagtttcagtcttgttgcccaggg

SEQ ID NO: 274847 - DNA, 566 bp, Homo sapiens
gctggttgcgggttgagcgaaaacaaggaacagatttgagtttgtccaaagcatgcttggtacttgaaaattaacccttcaagactgggcatgtgtccagtgatgctctgaagctggcaaagatgagcatcaaatcaccagacgtgcatggagagcatgagctgaacgaccgtcgtgataggcttggcagaggatgaagcagagggtggcaccggagccctacctgggtgctggcactgcctcggcctcttgcttactatgacgccgtgtgaatcacagcatctagcggccctccttcccccttactatgacttccaattttgaaatactgtgactctgctgtgtacttaattgacatctctttctgaaggaatttacaatccagttgatgatgtaagacccactatcataagccaattagagaaccaaacaagtgctgaagggacccctatggaggcagagaacctgaaatgaacagtgaagactaaatctgacttacaaaggtgaggagcagggagtacatttctttcctaatgcttgcactgggatttctgacgaatacctca

SEQ ID NO: 274848 - DNA, 319 bp, Homo sapiens
tcgtgctcatgcgctctctctttctctgtcatatacattagagaacctatgagcccacccgccagccaccccacccccaacactggggacattgctgaaagtttgtttaggactgcaaaatgaagaaaaaataagtaacgtggtgtgtagaatggagtggtggaggaggggaaattgacagggatgggaaagctgggtgggaagggttagctcagtatcacagctgtgaggtgagagtagcagtggaaacagaataatgaaaaaatagagacattttgaggactagccttctaggaggagatttctggatataggaaaa

SEQ ID NO: 274849 - DNA, 451 bp, Homo sapiens
atagggtagccagaagatgaatggtatttgtttgtcccccacatccactgcatccctagacccactgccccaaaggcagtagaagtaatattactagtgaacaaattcagcccacctgcatgcctgcagtccattctaggtagaactaggttactcagaagcaggcactggttctttgctgatggtaaacacttataggagcattggagttcactacaccaggagccacttttcctcagggcagttcagtgatttcccagagcaaaagcaagaaccaaagggaatcccaaccatttctcctccctggtccgctccatcacaaagtcacacccacagcttcccttgtacctcctctccctaagcatgcagctctttgaagttttctgaatgttttgaccactagctaaaagaagacaattgtggggtaataaatactccctttctatgcaaa

SEQ ID NO: 274850 - DNA, 232 bp, Homo sapiens
gcccagagaaacaataagaagcataagaattggaaaggaagagataaaacatcatctgcatgtaagtagataaaatgactgtacatcagaaaacctaaaagaggacaaagaccactagcaaaggattggctacaattaaacatttaaaaaattcctgtcattcttatgccaaaacaaaaaaaacagaagaaaatgtagaagaaaagagtatattttctattgcacagaagtg

SEQ ID NO: 274851 - DNA, 273 bp, Homo sapiens
tggcatgagattgttctatcaataatctaaggtaattcaggaaagattgaattttgagtattaaaggtttgcagatgctagtgtttaatttttgatagtgtggtgtcttggttatgtattgcggcatagcatactaccccaaaacttagtgtcttaaaaccatattttaattatctcacaagttccttggtcaggaatttgctcagtgcttggttgggtgattcttctgcttcacatggcattgactggagtcacttaacagtctggtgtggg

SEQ ID NO: 274852 - DNA, 400 bp, Homo sapiens
tgagatggagtctcactctgttgccaggctggtgcaatctcggctcactgcaatctccagctccctggtttaagcgattctcctgcttcagcctcccgagtagctgagattaaaggcatgcaccaccatgctcaactaattttgtatttttagtacagagggggtttcaccatgttggccaggatggtatcaatctcctgatctcatgatctgcccgccttggcttcccacaatgttgggattacaggagtgagccaccgctcccagccctcaattctttaaaacagaaaattcagcatctcagatggaatcaattgagctgttagtttaattttgagaatctcagatcaagctgatgaaaaggacataatgaacacattttaagaagacactggctatg

SEQ ID NO: 274853 - DNA, 260 bp, Homo sapiens
tatgggcaactcaaggaagaaaggaaagaagagatagaggaaaaatggattcaacaaatgaaagtgttctttctgactactgctgtgtttacaaacattttaatcatcaaaacatgctttatttgatagaaagatcaaatctgcctttgtaaaacaagagactattttaatcattaagacaacacatatgtttgatttggaggcgtgttctcattcaaaaccttgcaaaatataatttcttcttgtctgggagatggtgt

SEQ ID NO: 274854 - DNA, 850 bp, Homo sapiens
aaagtcgcgtttattacgcaagtccaatatgtctctagcccaaatgcgtttgaatgtgttgcacaggcgcatgtgttagtgtgtgaaggagtccagcccccagaactggtggatgaggcaccccagaaacgtgcctgagttgagaagtttgttcagagccaggcattttgagcttgaacttacacccataggggtaaaaatggaaaccacacagttgattagtcagtccgccaaacatttttgcaaggagttacacaacttagtgccacgttgtgtctgtacggccatggggttgtgaaatgggggaacccgaaacattgttgcgacttgaaaatcacagcatcttggtttaggtaaaatgtgtttttgtcacgcaaagcttttaaaaccaagcgtggcacttatggtgtaaagagtatctgtgttccctagcttttgggttctaccttaatggacagagattaaatatcttgctaagaaattaaaagcacaatgtctcaacgggcataatcatagacggttgtgggcggtgccatgttcttcatcggtttcaccgcgctcgttatcatgtggcagaagcactatgtgtacggccccctcccgcaaagctttgacaaagagtgggtggccaagcagaccaagaggatgctggacatgaaggtgaaccccatccagggcttagcctccaagtgggactacgaaaagaacgagtggaagaagtgagagatgctggcctgcgcctgcacctgcgcctggctctgtcaccgccatgcaactccatgcctatttactggaaacctgttatgccaaacagttgtaccactgctaataaatgaccagtttacctgaa

SEQ ID NO: 274855 - DNA, 594 bp, Homo sapiens
  misc_feature (1)..(1): n is a, c, g, or t
  misc_feature (34)..(34): n is a, c, g, or t
  misc_feature (36)..(36): n is a, c, g, or t
ngagagagagagagagagagcgccgatccatatnanctgggagcgaaaagtcttcgctcttcacaacactttcatgagctcgtacacaccccttgccggaggtggcccatgtcaagcacctgtctgccagccagaaggcattgaaggagaaggagaaggcctcctggagcagcctctccatggatgagaaagtcgagttgtatcgcattaagttcaaggagagctttgctgagatgaacaggggctcgaacgagtggaagacggttgtgggcggtgccatgttcttcatcggtttcaccgcgctcgttatcatgtggcagaagcactatgtgtacggccccctcccgcaaagctttgacaaagagtgggtggccaagcagaccaagaggatgctggacatgaaggtgaaccccatccagggcttagcctccaagtgggactacgaaaagaacgagtggaagaagtgagagatgctggcctgcgcctgcacctgcgcctggctctgtcaccgccatgcaactccatgcctatttactggaaacctgttatgccaaacagttgtaccactgctaataaatgaccagtttacctgaa

SEQ ID NO: 274856 - DNA, 512 bp, Homo sapiens
cttcaagtagccatccggactcgtaggcacctccttaccagttcagaatgcactgaaggtagaacgacaaggcctcctggcagtcaccctgtccagttgattataaaacttcgtgattggagaaccctcgtggcgggagagctttgctgagatgaacaggggctcgaacgagtggaagacggttgtgggcggtgccatgttcttcatcggtttcaccgcgctcgttatcatgtggcagaagcactatgtgtacggccccctcccgcaaagctttgacaaagagtgggtggccaagcagaccaagaggatgctggacatgaaggtgaaccccatccagggcttagcctccaagtgggactacgaaaagaacgagtggaagaagtgagagatgctggcctgcgcctgcacctgcgcctggctctgtcaccgccatgcaactccatgcctatttactggaaacctgttatgccaaacagttgtaccactgctaataaatgaccagtttacctgaa

SEQ ID NO: 274857 - DNA, 351 bp, Homo sapiens
aaagagatagccaagaagagccctcctggaatctggtttatccttgaggttcgggaagtatgtatggacagggctgtatccactcaggagcaatcagatgtgaaacaaacttgaaagcattctctaaggcatacacagatccatcagcaaagagcagaaatcttattagctcaaagtgcttaagcagaacctctgaccaaacactggctgaacacataaatgtgtttgttcaaagaactaaaggaaatcatatttaaaaaaggaaggtaaaggaacaattacagttgttcctccatatccatggattcctcatctgtggattcaaccaactgtggatcaaaagtatttagg

SEQ ID NO: 274858 - DNA, 580 bp, Homo sapiens
agctactccgcaaggcgactacactcattctttgggctcccaaggctgagaaatggagaaccaattggccggtttgctctctgttgcttcccccccacccggccttcctccgagtggcgaggcaatcctgcacaagagtttgtaaagtgcttaggaagcttgtaggatgaaagacgctataaatacacccaatgttactagtttatgaccacggagcattccgtggaaccactgtcactgcgtcgggggcaggttgatggcatagaccttcctggggaggggggcagagagagagggcagccccttcatcaccctaaaagctaggctgggtaaattttcaaagtgtagcgaaaccccacgtgaaaagttccacacacgccccacacagggaggactccgcggctgctagcagcgccggagactgggcctacaaccccggcaacgtggggaggcgtggggcggccgaggggccccggccgcagccgacgcccgcggagcggctgaaggagcagctcccggacgggggcgcggcgccaggcccgggctcccggcgcggggaacggcccgggagggcggccgc

SEQ ID NO: 274859 - DNA, 274 bp, Homo sapiens
attgctgtgtaatattccattgtataaatatatgttgtatagccgtaagtacggcgcaatttattctaacagtggacatctgggttatttctagttattagctaacaaaaagcttctgtgaatactcttgtacatgtattttggtgaacacatgcatttcttttggttgtatgtacctaggagaagaattgcctaggatagtcatgtggctagtattagtaccttggtttttaatgtatggctcttggaccagcattatcagcatcacctggca

SEQ ID NO: 274860 - DNA, 280 bp, Homo sapiens
aggatcgcttgagcccaggagttggaggctgcagtgaactatgatcatgccagtgcactccagcctgggtgacagagcaagacactgtctctaaaggaatgaatgaatgcatgaatgctactattagccacatcagtaaaacatcagcagggaggcagccagaagttggctggcaggggcaggggtgggcggtctccagaagcaggtgaggccctgatcccttcattccctcacttggataggctgcaggagatgtggccaaactccctcattccagaca

SEQ ID NO: 274861 - DNA, 408 bp, Homo sapiens
taaatgagacagaatcttgctctgtctcccaggctggagtgcagtggcatgatctcagctcactgcaacctctgcctcccaaatagctgggactacaggcgtgcgccaccacacacggctaatttttgtatttttggtagagatggggttggtctcaaactcctgacctcaagtgatccacccaccttggtctcccagagtgctgggattacaggtgtgagccaccatgcccagcccgactggcttaacataatgccctctaggttcatccatgttgtcataaatgacagaatttccttatttttttttccataagagacagccttaaataaaaaagaaagaaagaaagggaaagaaagaaagaaggaaagaaggaaagaaaggaaggagggaaggaaggaaagaaag

SEQ ID NO: 274862 - DNA, 764 bp, Homo sapiens
ctcagtaatgtgctccggttcattcaggagtgtgggtttcttgctgagctgggaatatgctgtttaaaagcgatgcccgaatcagtgcttacttatcaaaaaagagttcctcacagtggaagccgttgctactaatgctaaatggggattatgctgccgagattcgaaggtcagggattaatgcaggagacatggaaggacagtgtcccggggtccatcattacagcagtgcagtgtgcgtgtctctctggagtggtttgtgtcatgtggacaagccgccgaccggagcagcacctggtgtggaacccgtttagaaactagcttacaataattttcatttattagggccagtggaaaattgtgaaagtttccatagatttccttgtttttaggtttttattctttttatatttccagtttggggggaaaaatacatgtattgccacttaaacagattatgtgattactgtgtgtttctttcaaataatagaattattacttgtaaatttctgcatataattacagattaattgcctttcagagaataaatgggatatttagccaatgcatgttgagattctcagtgaggagcttccttcttcttccactgctttaaatgaaactgttagagtgcttaatagatttctaacctgtgtcaattgtctctgaacactgccttacttctcctattctgacttgttaacaaatatcttatacacaaagtgaaaaaaaattaaatccagtgaaataaatcacttacaaat

SEQ ID NO: 274863 - DNA, 302 bp, Homo sapiens
ctgcagtgcctggcctcgattcttttcctatactgtgcctgtatgtctcctgtaatcacttttggagggctgcttggagaagctacagaaggcagaatagtgagtacaaagattggtagtggccaggcttttagctcttcagaggcaagtgtctgtatgcatttgtctcactattcatacttttatttgaagagtctacccacagcatgattaacgtgacccaaagcagactttccccaaaggtaattgctgtggaaaacatggggaagccatttgaacagaagatgcacagttgaggtaaa

SEQ ID NO: 274864 - DNA, 328 bp, Homo sapiens
acagcacagaagagaccagagaagagcctcctggaggagagcctgcactttgaccatgctgtccggatgggtgcagtgctcttttctgcaaagtgttcacttctctgctttttctatggtcccatttcatagaaagatttggggtgatgtttctttccctcaacttttattttgaaaacttgcaaacacagaaaagttgataaaatcatacagtgaacatctgtatgctattcaactggattcactagttaatgttttgtcacacttgttttctgtcttctgcgtatggaagattgtatatgtgccctttttccctctgaatcatttc

SEQ ID NO: 274865 - DNA, 706 bp, Homo sapiens
gttcaacatgaaagaatccatacaggggagaaaccctatgaatgtaaagaatgtgggaaggcttttagtcgtggctatcaccttactcaacatcagaaaattcataccggtgagaaacctttcaaatgtaaggaatgtgggaaggccttcagttggggttcaagcctagttaagcatgagagagtccatactaatgagaagtcttatgaatgtaaagactgtgggaaggcctttggtagtggctatcaacttagtgttcatcagagatttcatactggtgagaagctttatcaacgtaaggaattcgggaagacctttactcgtggctcaaaacttgttcatgagagaactcatagtaatgataaaccctacaaatataacgaatgtggggaagcctttctgtggacaacttactcaaatgagaaaattgatactgatgaaaccttatgattgaaagttgtaaaagaatattttgtgtgtgtgtatagacaacttatcataataagaactcttactcttgagaaaccttgtgaatgtaagggttgtgcaaaagccattcatttctgtttatgggcaattatcttgctatccagcaattcatactagtgagaaatattttgaatataactaatatgaaaaggcctttagacttctgtacagtcttattggatatcaatttatactgatgtaaaatcatttaaatgta

SEQ ID NO: 274866 - DNA, 422 bp, Homo sapiens
gaaatgagctccatcaaccaaacacaacttttaccacagtcagaccctcaaaggtttcaaaaagcgtaaaggcaaaaagcaccatccaacggacaacaacttcaaaatttaaagaaacatcagctaacacagatgagaaaaaacccagcaaaagaattctgacaactgtaaaagtaaaagtgtcttcttacctccaaatgatcacactagctccccagcaatgattcttaaccagactgaaatggctgaaatgacagacaaagaattcagaatcgggatagcaaggaaactcaatgagatgcagaagaaggttaaaacctaattctaggaaagcagtaaaatgatccatgagttgaaagataacataacaattttaagaaagaaccaaattgaaattctgtaaatgaaaaatttactacatg

SEQ ID NO: 274867 - DNA, 403 bp, Homo sapiens
tgagggtttggggcacagtcttcacacaggctggagtgcatcccagaggtgagggtttggggcacagtcttcacacaggctggagtgcaccccagaggtgagggtttggggcacagtcttcacacaggctggagtgcaccccagaggtgagggtttggggcacagtcttcacacaggctggagtgcaccccagaggtgagggtttggggcacagttttcacacaggctggagtgcacaccagggaggcttcccgcctctggcagaatcaccgccatgctcagtcacaaacccagagctgcgtttggacgctgcagcacacgctgcggccccagcaacggtcctgcgcaccaggctcctctcccagtaaggtccgcttctctgtggagctcaggggtccctgca

SEQ ID NO: 274868 - DNA, 274 bp, Homo sapiens
cggggtctcaccatgttggtcaagctggtcttgaactcctggcctcaagtgattcacctgcctcagcctcccaaagtactgggattacagatatgaggcaccatgcccaagcctccttttctctttttttcttttctttcttgtgagacagaatcttgctctgtgggtcaggctaaagtgcagtggcatgatcatagctaactgaagcttcgacctcctaagcttaattgatcctcctgcctcagcctcccaagtagctaggacacataggtga

SEQ ID NO: 274869 - DNA, 381 bp, Homo sapiens
tcttaattctcacagccaggtgaagagggaggtgtcagtcctctcttcttacttacaaaacaacaacaacaacaaaaacagaaaaaacaacccaaaacccctgaggctcagagaggtaaagtgacttgcccaaagacacacagcaagtaaatattgcagctggtatacgaaacctatttccctgatactggaaacagcaagcactctttccactatcctgtaattctgtcaggctgcagcatgaagacaaagatcacactgatcagagatttacccaggatgctataaataccattgctaattactcataaccacaaaagtcaccacgtcttgccttgttgttcctttaaccaatacacaaagagccattctcagcaatgt

SEQ ID NO: 274870 - DNA, 473 bp, Homo sapiens
aaaagattagaatttaggtaaatttatagcatatgtaagattttatagaaatatttacctaaggggtagttattttaactgtctatgtacagcagtataagtgaaggccactctgatgtgctggtttcatatgggagaaactataattaaccgaatgcataatatatagccagcaagacagtttatatacagtgtcatttggtccttagaagaattctttgaaatagatgattttcatctccgtcttataagtatgaaagctgaagttctaagttcagtaactcatctaaggtcacttagtaagctgcagaggcaggatttgaacactgcttgatctgattactcagtccataaacatttcatgtatcacacaacttccattcttgtccatttattgaagttgcctttttatctgcaacactcctctttaccttgtatactttaaagtgattaaaatatcctgtaaaaatgtt

SEQ ID NO: 274871 - DNA, 945 bp, Homo sapiens
actttttggttttcttaggaactaaatatattacctcttaatatgtttagatatatataaatatatcttattatattggtatatattaatatatattattcccactggtgtactttaggataggtatgttaggtggctcaggatgaggattacagaggtgcaaatagaatctgctcagaagccagattgtctagggcattatttcacctatgtggactgtcaaatgcatcttcccttgacttactagagaactcagaagtaagcaagccctggagcacctgaaagtaccaaggatacaaatcatgtattccatgctaattgggttctttttgagacagaaggaaagttcattttcattaggtagtttatcaagtttctccaaaagcaacactgaggaatataggagaagctatgagaaatgcagaaagagaaaagaaaaaaaaaagagttaaaagaatgagaacaaaggaggggttagaatgacagatactgggggcaagtgatggggagcatcagaaaggactttgagagaggacaaaagaaaaagctgccgtatttcttctaagatgtaattttttttttcacctcataacataacattaactgtcttacagttaatagcatctgagtattgcttttggccaggtggcagttttgatctagttgtcattgtacaggcatggctctgacttgctgtttctgttgctgtcatttcagtctcagtgtggacattgttttaacttctcgtgttgagtaattgccatttaaaatattttcttagttgttgttttcacatcttcatttagatcctctagggacaccaaacaggcaccagtatcaaaatttgcaggatggttgtcagtggcttgaaagacagtcctggagcagtgtcggaacattcttcatacttacattcttgatggcagaaggatgatactgtgaata

SEQ ID NO: 274872 - DNA, 301 bp, Homo sapiens
ggaattagaggtagggtggatatcgggtctagggttgggtgaagggttggatctagaatttctgttgcttttgggtttgggttgagttgaggcatggagggtggatttaggatggatactgtgatgacctgttggtggctgtccgccctacagatggttataggattgtagtaatgtggatggagaagtttattggcattaggattagggtagagtttggaattaggaatgacattgagaaaggattaagaattgaggctggctgggcttggtggctcacacttgtaatcccagcattttg

SEQ ID NO: 274873 - DNA, 442 bp, Homo sapiens
tcctgcctcagcctctcaagtagctgggactacagtcacatgccaccatgcctggttaatttttgtatttttagtagagatggggttttgccatgttggccaggctggtcttaaattcctgacttcaggtgatctgcccaccttggcctcccaaagtgctgggattacagctgtgagccaccatctcccacccttccagacaaattctatacatatacaaatatccactctctctctgtgtatgtataattgtaggatatttggttatatatctttttccctcacaaacagaagcatactgtatacggtttgcaccttgctttttcatgaaatgatgaactgcaaattgttctgtatcagtaaatctagattaactccttttttcccaagagctacatagtattttattgcatcatcctctttttttttaaaaaaaaaacaa

SEQ ID NO: 274874 - DNA, 408 bp, Homo sapiens
aggctggtcttgaactcctacctcagatgatctgcctgcctcggcctcccaaagtgctgggattacaggcatgaggccccatgcccagcctgctctgtgcttttaacaaatgttatgtaactgaatcctcaaagcagcccctatcaggtaagtggcacctgtgttttagaccaggaaatagtgacacagagaatccaagtgtccaccacttcaaagtagtgggcctagggtctgcctccttgtatgtctgcctccaaccccagtgtctgtaatcactattacatgctgctgctgttcatttctcattattgtaaaattagattttatgtctatttctctgattctgaaaatgacctaagtgtttcagtggaagcctatacaacatagctagcttggtcactttcatgg

SEQ ID NO: 274875 - DNA, 684 bp, Homo sapiens
agttgataagtttagttttgaattctgagtttgagtttacttttccaaatggaaacaagatcaaaggatggatgagaggacaggagtgcagaaattcaagaattggtacagaagggatattgagggctacacagaagtggctgaagtcatcaggtatgattatgactcaaaatggcaaacaattattcagtgttttttatgtgctaggcacaatttcaaatgtactacaagaattatctcttttattctcacagttctaagagtttctcttcctattttacatatggtaaaaaatgaggacaagagaggtctagtaacttgcaaaaggttacaaaggtcaggggtgatagagccacagttcaaacccagcagtctgacagcagagtaaatgctcttaactctttatgttgtgttacctacacttaagttagaggaagtcaggatgaaacatgagagtaataagccttccaagtgagggaactggagagacaagtagagtaccaggtcaagggaaggagtactgaccttgagatatagcctgtggggttctgggtaggacaacggagaggactgcagaagttccagcagacactgggcaccaacttcacctgctgcacagttttgcttagaaacagcagcatgttataacacattcagcttccttgccttaacaaagcactaagt

SEQ ID NO: 274876 - DNA, 363 bp, Homo sapiens
ttgacctaccacatctcaattcaaacaagtcacatttcaagtgctcagtagccgtatgtggccacaggctgccatattggacaacagaggtctaaggtgtatatgatttggggaaatgcttgcttatttctctaagcttcagtttccttatctgtgaaatagagattagcatgcaccttccagagtccttgttagaattaaatgagataatgtattttaacattcccaaaacaataccagtacacagaaattgctcaaaaaattctagctgtcattcttactttaataactttgtcatttatcttccttaaatgttacccttgatataaatgtaattttagaagaaataaatttgtaattgca

SEQ ID NO: 274877 - DNA, 107 bp, Homo sapiens
atacaaacaaatttcctttttaaagtacttttaagaaaaaaagcatggccttggaagttttggttcttttttcctcccctgttgcaaattctcatggtttgggttgg

SEQ ID NO: 274878 - DNA, 334 bp, Homo sapiens
tttccaatcttcagaatcaaacagaaacattagctcttcttgggtctctaacctgcaggtgttcaaactggaatttacaccattggttctcctggttcttaggtttttggacttggactggaactacaactacatattagttctcccatgggtctctacttgctgactataggtcttgggatatttcagcctccataatcatgtgagccaattctgtattatgaatcatataaacaaacacacacacacacacacatacacatagatacataaatacatatatatataaatacacacacacacatacacatagatacataaatacatatatata

SEQ ID NO: 274879 - DNA, 424 bp, Homo sapiens
gttagccaggctggtctcaaactcctgacctcaggcgatccacctgcctcagcctcccaaagtgctgggattacaagtgtgagccatcatgcctggccaatataacagatcttataggaaaaatagggttggggcagaccagtcaaatctcatgcagttttgttaccagagcaccaacaaaatcagtaataatcgttaagtaaaaatgctagtactaataatctccacttgcatttgtagtcagtatcatcattttttgaaattagttatttgcattcttaaaccctgaggttatgcttctttctttgagatacaggtccttgaagggttttgcttccaattagagaccagttttatcaaaattactggtccaaggaataggaataggcttcttcatcagtctctttaggggatgtatggagag

SEQ ID NO: 274880 - DNA, 500 bp, Homo sapiens
aatactggcattataggcataagccaccatccctggccaaaaaataattctgaaacagcaaggaggaaggcggtttcttcttgggaagtcttgattttagttgagcatgtagagggatcacttgacttattaaccacttaggattgcacagtaagataatttaaagggtagccagcactggagtgggcctgggaaggggatgggcagtttgtgttagtgtgtgtgggtccaagataaaaatgttgggtagcagagttttgcctaatgcattgtcgctaaaagggatgaagggcatcgggatctacaggagatggaaaaagtagtgacaggatagtagtgggaaaaactaggatcggatcaaggcactggaaggcagaaatattgagtagaatgtttgctgcaatttatgtttctgtataaataccgagtacaaagtttcacttgggtggtcaaggtgctatggctgtgacaactcctgagagtgggttttctggttaaaa

SEQ ID NO: 274881 - DNA, 300 bp, Homo sapiens
aagttgacacagaagatgaaccatcccatgcacctttctaaagatttttttctttgatttttgagcaatgcttgagagttcacaaactccattcacaggattatctccttgaaacaacaccctggggagctgtgtcattcttgcttccatgtggagactcagagagaggtgaaggggctgggcgccatggctcacacctgaaatcccagcgccctgggaggccaaggttggggggaatcacttgagcccaggagttcaagaccagcctgggcaacatggtgaaaccctgtctctaccaaa

SEQ ID NO: 274882 - DNA, 382 bp, Homo sapiens
agtgcttccaaacacttttccttctttgtctttctaagccctaggtaattttaactatatgtatacctcaggacagaggatctctccttctttcctcaatgcagttttctacaactcttttgatgatcagttattggtaacaatggcttccatttcatcatctttctctctatgccaactcattcttgttgactttgtatttatttacggtgataacccatcttacaacctagcttgccatttctttacaattttcacctctactaactttgtttccaccccgtctcagcccagagccttggcactacattcattgcatgacttctggcatcttgaattcaagtatactctctgaccactgccttcaattcttctagctcac

SEQ ID NO: 274883 - DNA, 397 bp, Homo sapiens
aaatatttttattagtatttcaaacatacaggaaaagacaaatgttttccattcatcttgatagctaaatacctttagatctacacaccaagatgaagaccgccttgtgtcttggataaatgtaacgagcagatgctggcagctcgcaggtgctctgggctggagtagttagaactgccgggccaggtggagtgagccagcactgctcaggggagcttcatctctctgattccaaaataaatgttttctggagtctcaacttcaccctcctggagaggggtaatcttatctgtggaggagagagcaagggctgagggggcgctggggtggcatgagaggcccaaagaccttgacagacacggtgggcttggccgcggggcaccgggttaaagaggag

SEQ ID NO: 274884 - DNA, 180 bp, Homo sapiens
acttagtgaggtgttgattacatagtgaacctattattcacagaaattcaatggatgttttgaggtgccctctacttgatgcaagcctcagcgaggtggcagtggtggcctctgtccccatggcacggatggtctgttctgctttggaagcactggaagggcacatctgacaattgcagg

SEQ ID NO: 274885 - DNA, 473 bp, Homo sapiens
ctggacatgaagacaatatcactgcccagttagttagactatgacatatctatatcaaaaacccaggatgtagagggcggctctaagataacagaatagaaggctccaccaaccatccctccaacaaggacaccaatttaacagctacacacaaaaaagcactttcccaagaaccaaaaatcccagccgggagcagtggctcatgcctgtagttccagctactcaggagggtgaggcaggggaatcacttgaactcaggagtaggaggctgcatgagctatgattgcaccactgcactccagcctgggtgacagagcaagaccctgtgtcaaaaaaaaaaaaaaagaaaagaaaattagactaccatcatagatggtacaaacacttcccagtttgttgctttcgttttgtttgttgccatttttactatacagaaaaaaaaggcaataaagaatacattattatatatgtta

SEQ ID NO: 274886 - DNA, 244 bp, Homo sapiens
atgaaaaacttattacaaatttcagccaactcagatattaagaacatcagtgtcaatcctcctcccctcctgcgacctttttacacttgttttggtggactaggggctccttttctcctcctttttgacatataactgtgccattaaaaacatgatttctgatgaagctggcctagagggaatgaaggagattgcgtgggtatggtctctaggacaggcgtagctgttgcagggccaccctgtc

SEQ ID NO: 274887 - DNA, 539 bp, Homo sapiens
tggtagccatggtgaatcgattccaggactccccatggataccaaagtcccagatgcccgtgtccctgatataaaatggtgtaggatttgcatatcacctactcacgtcctcctgtaaactttaaatattctctagattgctcataatacctaatacaatgtaaatacttgttatactatattgtttagggaataataagaaaaaagcctacatgttcagtaacaaccatccatttttttttttcagaatattttcaatgcatggttggttaaaggatgtggaatctgtggatactgagggctgactattttattctcacccttgttttgggatgcatctgtctttcctagagacttcactggtgtatcctcaggcagataattcccaccaaccttggcccttgctttgtttggttttcacattgtattggtctcttgctgtcatttgatttaccctctatttaattccaagtttccattactttttcccctttgtttaaaagtatttttaaatgtaaaaagtcatatatggttatcat

SEQ ID NO: 274888 - DNA, 676 bp, Homo sapiens
tggtagccatggtgaatcgattccaggactccccatggataccaaagtcccagatgcccgtgtccctgatataaaatggtgtaggatttgcatatcacctactcacgtcctcctgtaaactttaaatattctctagattgctcataatacctaatacaatgtaaatacttgttatactatattgtttagggaataataagaaaaaagcctacatgttcagtaacaaccatccatttttttttttcagaatattttcaatgcatggttggttaaaggatgtggaatctgtggatactgagggctgactattttattctcacccttgttttgggatgcatctgtctttcctagagacttcactggtatctggccagtgggagcccctcaagctggcttcttgatatgtcttcattattttttgaacatttacttattttcttataccacaaaatgttctaggctcatcctggtttttttttcctgtgcagggtgagtccaaactattccagagttgcataaatttcaaacaacaaaaaaaattagtgtcgatcattcatcgtaatttaaaagagttgtttaaatctgtagtttggaagataacttttattctataaagtgcattcccgttgtctaataaatattcatagcttctaggtaaggtttattttataaaatg

SEQ ID NO: 274889 - DNA, 269 bp, Homo sapiens
gattcactgtgatgtttaatttgagcattttctaaatcaacctatgtttgcttaaatcatttcttattttttgcattttagggtgagtccaaactattccagagttgcataaatttcaaacaacaaaaaaaattagtgtcgatcattcatcgtaatttaaaagagttgtttaaatctgtagtttggaagataacttttattctataaagtgcattcccgttgtctaataaatattcatagcttctaggtaaggtttattttataaaatg

SEQ ID NO: 274890 - DNA, 540 bp, Homo sapiens
ggatttcagtcagaatggcacaggatggggaattaccaaaggggtttgagcaggggtcatgctctaattcacgcttttaagagatcactttggctgctgtacagaaaatgggctaaagtggaagcacttttatgcagctcagagagacttggttttatatctgcacagctatgcttattacagtgtatttaaatattaatatttattgactgatcacagcttaataagggttacagtaaaaacctggtcctttccctagagagttacaaaggcaaagatgataacagacacagagggtgggccgggggattctgagcaccttccttaggactctcgacagcagaagtaagtagaaggcaactccgtgctcaccctgagacacaacaccattcttggtggcaattttttcttttgtgctttccttgagtaaatgaataccaaacaacattccagcaacaacacttggtctgttctcatgtacatcaagcagtctggtaaattataaaggaataaaacctgctcaaatatgtgcactccagt

SEQ ID NO: 274891 - DNA, 194 bp, Homo sapiens
agtgcgatgggcattctcagtgggggacgaagggcatgaaacatcctgacctgccctgggcactgccaggaggtccagatggcaggagctgacggtttgaggggctcgggcagggcatcccgaggacagctttgggtgatctgtatgcaagggaatattgaagccatgggaacagatcctgaggatccgggggg

SEQ ID NO: 274892 - DNA, 620 bp, Homo sapiens
ttagattagggcccacccaatggcctcatgttaatttgatcacctctttaaagaccctagctccaaatacagtctgttctgaggtacaggggttagagcttcaacatatgagtttcgggggtatacatttcagctgctaattgtgtcttttgcctatttcctagttgattatttattttactgtcaagttttgagagctgtttatatatcttaggcactagtcactttgttgtgatttgcagttattttctcccagtctgtagcttgtcttttccacctttgtattagtctgttctcacgctgctaataaaaacatacccaagacggggtactttataaaggaaggaggttgaattgactcagttacacatggctggggaggcctcacaatcatggcagaaggcaaggaggagcaaagtcacgtcttacatggtgataggcaagaaagtgtgtgcaggggaactcccatttataaaaccatcagatcttgtgagattactatctcactagaatagcatgggaaagacccatccccatgattcaattacctcctaccaattccctcccatgacacgtgggaattatgggaactacaattcgagatgagatttgggtgggga

SEQ ID NO: 274893 - DNA, 338 bp, Homo sapiens
cactccagctatatcatatagtatttgtctttttgtgactgctttatttcaattagcataatatcctcaaggttcttctatgttgtagcatatactggaatttccttgtgtgtgtgtgtatgaacctctataaaggatccttcctttttaaggttgaacaatattccatgtatgtatatatccagttttgcttatctgttcatctgtcaatgaacacttggattgttgccacattttagttattgggaataattttggctattgtgaataatctgtacacatgagtgtacagatatttctttgataaaataggtaaataaaattgctttataaagaaa

SEQ ID NO: 274894 - DNA, 367 bp, Homo sapiens
acaaaatcaatatacaaaacccagtggaatctctatacaccaataacattcaagctgagaacaaaattaagaactcaatcccatttataatagctacacacacacacacgcacacacacagcacctaggaatacatttaaccaaggaggtaaaaaagaactacaaagcacagaagaaactgcagatgacacaagcaaacggaaatacatcccatgcttatgaactgaataaccaatatgattgttttaaatgaccatattgcccaaagcaatctacagatttgatgtaattcctattaattaccatcattttttcacagaactgggaaaaacaatcctaaaattcatattgaacgcccaactccaaa

SEQ ID NO: 274895 - DNA, 421 bp, Homo sapiens
tcgcttaatggtcacctgacattcctgggggttccctctcctgccttactcatgtccgcctaacctacctactctaacagcttctaagaacgaggaaacacgaactaaaataatcttgtcgtttttctttgattcatattctttattaagtatctaaataacaatctatgtttccaagggagttatacaaaccctgaattctacaacagaataaatattatttctacatgttccaaagatcttattaaagcacacactccatgtctgaacaactctcttaataactgagtgtctgtctgatctttctatttactggtgaatgcagcttgtctggtattatcctagtaattcctctgtgtactttatcaaccctttatggtgcaacatgagaaggaaaggggagagttactaacattacaaa

SEQ ID NO: 274896 - DNA, 303 bp, Homo sapiens
tgtttcagttataaccacatgactgacatcttgccaacaggaatgcatgtggaaaaggtataacacttcccatctgaggcactcaagaaaaggcgtgagttctctaccttctctctcccatccacctggctgacagagttggaggatggaagtgtcctggattcctaacagaaactgccagagtgctgcccaaccctcaggagactgacacaggtgccatgctctacacagaagctcacaggattgtgctacccattcctgtcttaaaatattaaagacctcactgctttcagcataaaaata

SEQ ID NO: 274897 - DNA, 425 bp, Homo sapiens
gaaggtcctctggaaaatatggtacatgagcttcaggcctgaagatggttcgctttggagatgaaacttatgggctggaatgtgaaacacagttactttgaggtggacctcagtgaaacttttccagacaggctgagaccaagggaagactagtattaaggattttatcctcaaaacaaactaggttgtcagagtccctgtaggctctctgggtagcagcctctgtgatttgcctcttcctgactaggaaaacctgtaagctgacaaagaagtatatttaaattgacctccaggtgagcctcatggtatgtcaggttgattatttgtacctggtttggtgttttgttttgttttttacttgataactgtataaattattttagtgaagagcctgttcttattctggaactcactttgaagacaaa

SEQ ID NO: 274898 - DNA, 338 bp, Homo sapiens
ccatatttttactgtatgttttctgtttagatacacaaaaacttcccattgcatcacagttgcctactgtattaagtacagtaacgtgctatacacatttatagcctatgagcaataagctatatcatacagcctgggtgtgtagcacgctctactatctaggtttgtgtaagtacacgctatgttagcacaacgatgaaattgcctaatgatgcattcctcagaacacgtgcctattgtgaaatgacgcatggctgtatatacagtcagccctctgtatctgtgggtttcccgtctgtgtattcaatcaaccacagatagaaagtatttaaaacaaa

SEQ ID NO: 274899 - DNA, 377 bp, Homo sapiens
gacttctccaggttctctacattcctgaagcaagtgctatagaatggcttggcactccacctgcacgttcccaagcacagaatcagggtgcagtaaagaggatctgggctgaccaacagtgtcttccacagatacacttgctaattcacgcatggaagacccagagtgtatcactcccctcaactgctggactactgtgctgcaaactttgagtcagaatgatgagcttcagtcaggcatatcatggctcctgaacaggattttgagagcaagattctgtgcctccctcatcctgctgcagcctctcagtgcatctaggtgtttctgcttccattgtacatatctatcaaaataaaattgttataattaaacaaaca

SEQ ID NO: 274900 - DNA, 373 bp, Homo sapiens
aaattatttattagtaactctcaagatcattttgtctaagtgaattggagatcttataatttaaagtgatccttaaatagcaatacaattactgttgatttttaaaattgatagacatttaaaatttttaaataaggtaaaatctatagagtcacataattgcagcattatatgaagttataaaaatcaatccttttataaaaattctggctaataaatctaagtaaatgtaaaatttaattgaactttatatttttacaattgtgaacatttatgaaagcaatgtttgctttatctcaggggttggaaaactctggctctggaggccaaatccacctgtttttgcaaataaagttgtattggaacataaact

SEQ ID NO: 274901 - DNA, 466 bp, Homo sapiens
gttttggagacagggtcttattctgtcacccaggtgcaatcatagctcactgtgacctcaaaatcctgggctcaagcaagcctcccacctcagcctcttgagtagctaggactacaggccacactgccatggctggccaatttttaaattttttgtagagatgggacttgctgtgttgcccaagctggtctcaaactcctggactcaagccatccttccgccttggcctacaaaagcattgagattccaggcgtgaaccaccgcaccctgcccatatgctttttgtaggaactcctcagctctgctgttgtacaatagaagtgccatagataatacgtaaacaaatgagtttggctgttttccaataaaactttatttaaaaaaaataggcagtgggccatagtttgctagcccccaattcaaagaaatacagattttttaaaagctattgggaaatttagagaaa

SEQ ID NO: 274902 - DNA, 186 bp, Homo sapiens
tatagcacttagcactgtatgacattgtttattttgaaattgtttatttctctctcctcaataatataagcccaaaaaagacaaggaatatgtttttgattctgtttctatccccgggccctagaatagggtctgggagatagttgcagcagaatccctagctgaaatggcaatcttgtgctaact

SEQ ID NO: 274903 - DNA, 1158 bp, Homo sapiens
  misc_feature (23)..(23): n is a, c, g, or t
  misc_feature (27)..(27): n is a, c, g, or t
  misc_feature (1099)..(1099): n is a, c, g, or t
  misc_feature (1104)..(1104): n is a, c, g, or t
  misc_feature (1115)..(1115): n is a, c, g, or t
aagcagtggtatcaacgcagagngccnattacggccggggagcacagactcccttttctttggcaagatggcggagtacgacttgactactcgcatcgcgcactttttggatcggcatctagtctttccgcttcttgaatttctctctgtaaaggagatatataatgaaaaggaattattacaaggtaaattggaccttcttagtgataccaacatggtagactttgctatggatgtatacaaaaacctttattctgatgatattcctcatgctttgagagagaaaagaaccacagtggttgcacaactgaaacagcttcaggcagaaacagaaccaattgtgaagatgtttgaagatccagaaactacaaggcaaatgcagtcaaccagggatggtaggatgctctttgactacctggcggacaagcatggttttaggcaggaatatttagatacactctacagatatgcaaaattccagtacgaatgtgggaattactcaggagcagcagaatatctttatttttttagagtgctggttccagcaacagatagaaatgctttaagttcactctggggaaagctggcctctgaaatcttaatgcagaattgggatgcagccatggaagaccttacacggttaaaagagaccatagataataattctgtgagttctccacttcagtctcttcagcagagaacatggctcattcactggtctctgtttgttttcttcaatcaccccaaaggtcgcgataatattattgacctcttcctttatcaggcacaatatcttaatgcaattcagacaatgtgtccacacattcttcgctatttgactacagcagtcataacaaacaaggatgttcgaaaacgtcggcggttctaaagatctagttaagttattcaacaggagtcttacacatataaagacccaattacagaaatttgttgaactgtttatatgttaactttgactttgatggggctcagaaaaagctgaggggaatgtgaatcagtgcttgtgaatgacttcttctgggggcttgtcttgaggatttcattgaaatgcccgtctcttcatatttgagaacttctngtcgnatcaccagtgntcagctttaactgttgccaataattggactgactcccgaagag

SEQ ID NO: 274904 - DNA, 1002 bp, Homo sapiens
gctaggtgcagccgggtgtaaatcggccgaggcagactggcggagtacgacttgactactcgcatcgcgcactttttggatcggcatctagtctttccgcttcttgaatttctctctgtaaaggagatatataatgaaaaggaattattacaaggtaaattggaccttcttagtgataccaacatggtagactttgctatggatgtatacaaaaacctttattctgatgatattcctcatgctttgagagagaaaagaaccacagtggttgcacaactgaaacagcttcaggcagaaacagaaccaattgtgaagatgtttgaagatccagaaactacaaggcaaatgcagtcaaccagggatggtaggatgctctttgactacctggcggacaagcatggttttaggcaggaatatttagatacactctacagatatgcaaaattccagtacgaatgtgggaattactcaggagcagcagaatatctttatttttttagagtgctggttccagcaacagatagaaatgctttaagttcactctggggaaagctggcctctgaaatcttaatgcagaattgggatgcagccatggaagaccttacacggttaaaagagaccatagataataattctgtgagttctccacttcagtctcttcagcagagaacatggctcattcactggtctctgtttgttttcttcaatcaccccaaaggtcgcgataatattattgacctcttcctttatcaggcacaatatcttatggcattccgacatgtgtcccccattcttcgctattgactacgcagtctaccaacaggtgtcgaaacgtcgcgtctaaagacctgtcagtttcccgggcctccctttagcccttcgaatgtgggtgctgtccttgctggggcccaaacgcgagggccggggaaaacccgggggcggaggagccccctgagtgcgccctgactgggagccccggggtacacgcgttgggcccccaat

SEQ ID NO: 274905 - DNA, 1033 bp, Homo sapiens
  misc_feature (23)..(23): n is a, c, g, or t
  misc_feature (27)..(27): n is a, c, g, or t
aagcagtggtatcaacgcagagngccnattacggccggggagcacagactcccttttctttggcaagatggcggagtacgacttgactactcgcatcgcgcactttttggatcggcatctagtctttccgcttcttgaatttctctctgtaaaggagatatataatgaaaaggaattattacaaggtaaattggaccttcttagtgataccaacatggtagactttgctatggatgtatacaaaaacctttattctgatgatattcctcatgctttgagagagaaaagaaccacagtggttgcacaactgaaacagcttcaggcagaaacagaaccaattgtgaagatgtttgaagatccagaaactacaaggcaaatgcagtcaaccagggatggtaggatgctctttgactacctggcggacaagcatggttttaggcaggaatatttagatacactctacagatatgcaaaattccagtacgaatgtgggaattactcaggagcagcagaatatctttatttttttagagtgctggttccagcaacagatagaaatgctttaagttcactctggggaaagctggcctctgaaatcttaatgcagaattgggatgcagccatggaagaccttacacggttaaaagagaccatagataataattctgtgagttctccacttcagtctcttcagcagagaacatggctcattcactggtctctgtttgttttcttcaatcaccccaaaggtcgcgataatattattgacctcttcctttatcaggcacaatatcttatggcattccgacatgtgtcccccattcttcgctattgactacgcagtctaccaacaggtgtcgaaacgtcgcgtctaaagacctgtcagtttcccgggcctccctttagcccttcgaatgtgggtgctgtccttgctggggcccaaacgcgagggccggggaaaacccgggggcggaggagccccctgagtgcgccctgactgggagccccggggtacacgcgttgggcccccaat

SEQ ID NO: 274906 - DNA, 836 bp, Homo sapiens
  misc_feature (23)..(23): n is a, c, g, or t
  misc_feature (27)..(27): n is a, c, g, or t
  misc_feature (777)..(777): n is a, c, g, or t
  misc_feature (782)..(782): n is a, c, g, or t
  misc_feature (793)..(793): n is a, c, g, or t
aagcagtggtatcaacgcagagngccnattacggccggggagcacagactcccttttctttggcaagaggatggtaggatgctctttgactacctggcggacaagcatggttttaggcaggaatatttagatacactctacagatatgcaaaattccagtacgaatgtgggaattactcaggagcagcagaatatctttatttttttagagtgctggttccagcaacagatagaaatgctttaagttcactctggggaaagctggcctctgaaatcttaatgcagaattgggatgcagccatggaagaccttacacggttaaaagagaccatagataataattctgtgagttctccacttcagtctcttcagcagagaacatggctcattcactggtctctgtttgttttcttcaatcaccccaaaggtcgcgataatattattgacctcttcctttatcaggcacaatatcttaatgcaattcagacaatgtgtccacacattcttcgctatttgactacagcagtcataacaaacaaggatgttcgaaaacgtcggcggttctaaagatctagttaagttattcaacaggagtcttacacatataaagacccaattacagaaatttgttgaactgtttatatgttaactttgactttgatggggctcagaaaaagctgaggggaatgtgaatcagtgcttgtgaatgacttcttctgggggcttgtcttgaggatttcattgaaatgcccgtctcttcatatttgagaacttctngtcgnatcaccagtgntcagctttaactgttgccaataattggactgactcccgaagag

SEQ ID NO: 274907 - DNA, 396 bp, Homo sapiens
ccagattgccagctctgggttgaccatggaggtagatgcccccaaatctcaggacctcgccaagatcatggcagacatccgggaccaatatgatgagctggctcggaagaaccgagaggacctggacaagtactggtctcagtagattgaggagagcaccacagtggtcaccacgcagtctgtcgaggttgcagctgctgagatgatgctcatggagctgagacgtacagtccagtccttggagactgacctggactccatgagaaatctgaaggccagcttggagaacagcctgagggacctggaggcccgctacaccctgcagatggagcagctcaacgggatcctgctgcacctggagtcagagctggcacagacccaggcagagagacagcg

SEQ ID NO: 274908 - DNA, 227 bp, Homo sapiens
agttaggataaacaggcgttaagtaagggttagtgtagaatttaaaattaaacatacccacataattcatatgtaagaagaaatcagcaaaatgaacagaaaaggcaacatctccaccaatctgtggctcccttctctacatacactgtgagaaacaaatatgttctgagcactcactacgtgtagaatatggcagtaatcattccctttgtccgttctgcagatag

SEQ ID NO: 274909 - DNA, 251 bp, Homo sapiens
tttcagaggaagtcaggccagaatgtggcaggcatcgagtgtcaggatgaggaactcgtcccaggtgtgagtcctcaaaatgcaaacacagccactaattgtaaggagcctccaaagagacagtgatagttgatggaaggaagcagcatggaggaaaggacagtggcataggaagagtgacctattccattggggtggaagggtgctgatcagatttagtcaacagtcatcgagttcctcccttgtcctag

SEQ ID NO: 274910 - DNA, 1857 bp, Homo sapiens
aaaggggcacatcttgccaaggtgtgcccaaggggcaggttgggttgctgtgatgatgggtacacagggccctgcacacggctttccagtcggagctgcaaaaggagacacaaaaatcacagctcattccaagaggtgcctgcagccagcagcacccagcagcattgtcaccactgcaagcagccactgacagccgacctgagaatgaacatgagggccagggaggaggcagctcagcctgcagcgtcagcagcgcagttcggcagagcctgctaatcgtcttgctcaagtttcaaactctgtttaccaaatgaccacagaagcgttttaacaacaaacacctcatttgaaggccaagatgaaaaattttacataaaaaattaattttactggtttacattgtttttatacattaaaatgaatacatttacttatttttttgagacagggtctcattctgtcacccaggctggagtgcagtggcacgatcatagctcactgtcgactcgaccacctggacccaagcaatcctcccacttcagcctcccaagtagctgggactacaggtgctcactgccacatctagctaatattatttttatttttcgtagagatgggggtctcgttatgttgcccaggctggtctccagctcctgggctcaagtgatcctcctgctttggcctcccaaagtgctgggattaaggcatgagccaccacgcccagccaaaatggacacatttacttattgtaaatttagtaatggccacacagctcataagtgacgatgccaggctcaggacccatctctgggtcctaataaaatattttctagcctctgtcctgtctaacaatacagttggaaaaaaactgggtacagctatgtttttatgtgcctaagggtcagcaagatgtcagagatgactgtgcatcgtatggatgggctggcaccgtctggatgagtaactgaatgcagtcgagtgagattcataaattacacctgcaccatggcaagctggactttgtcaggcaagaggctcttggactcctgctatcagagaggaaggaccagacaattcaatgactgcacctcttgtctcacctcagctcttccacctctcagaccctgcctctactccagtgcaatgtctgtctctgttggtgatgcacaacctacctgcctttacagcatttagatgaagtggccttttgtttccaagttgtcaagcgggagacgcagacagtgtttcttcgaggcttggggggtggttgtgcgagagtggacgctaagtccgggccaacactgagtgctgtatcccagggacataggagtcctgcgtgtgggtctgcgacacgtaagggcctctcaagcgtggggtctgtggcaggtgccctcctgcctgggtctaaggccagtgccgattattgttgtgaaagccccacattcctttcagaagaggtttggcaatcgactgctttaccataggtgctgccttcatgatcctgaggtcgtgggtaaaaatctccactttcaaccacaaggctgctttgaggattgcaacacttgggcagcagaggtttatgtccactgctggtttctaagccagcctgtgtctgtgcttgcacaggaatgggcaggagctctgattcatacagataaaaagctgcaaattataagagtttcagactgttctctctgtggctgctgcaactcacagattttgggagaagcctgggtatgctgagggcttacgaagtcgagatgacctcacaccacaaggtgacatgttggtggttccaacgtgctaatctctgatgcatcacacttgtgaattggccacttccagtgcagttacaaa

SEQ ID NO: 274911 - DNA, 706 bp, Homo sapiens
gtagggttttgtttgtttgtttttaaagaaacagggtctcactctgtctcccagggtaggcttaagtgaccctcccacctcagcctcccaagcagccaggactataggcatataagcatctaccacgacacctatctaatttttaaattttttttgtaaaggccaaggtcttactgtgttgcccgggtaggtctagaactcctattttttttaaatactcgtgctttcttttttaaccaggaattatttagaagtatgtttttaatttctaaatattagagatttataatttttttgttgttactgactttaatgaattgcagtcatagatggtggtctggaagaaaatagttaagatttgctttatggcctagtattagtcagtttttccatttgtgctgtggaagactatgcattccctaattgttagatgtaaaattaaaatcaagtatcttaactactttatcttttatagctatcaataattgaggaagctgtgttgaattccatagtagtggacttgtcagttgctccctatagttctgtcagtttttgctttgtatattttcatgccattttattagtggcacagtggctcacgcctgcagtcccagcactttgggaggccaaggcaggaggattgcttgaggccaggagttctagaccagcctgggcaacataggaagaccatgtatcttaataaaaa

SEQ ID NO: 274912 - DNA, 337 bp, Homo sapiens
ccgtctctactaaaaacacaaaaaaaattagccgggcatggtggcgtgcacctgtagtcccagctacctgggaggctgaggcaggagaattgctggaacctgggaggcggagcttgcagtgagccaagattgcaccactgcactccagcctgggcaacacagaacagactctgtctcaaaaaaaaaaaaagaaagaaagaaaaaaaagaaaaaaagaaaggcatctcttcctcctggcagacaccacaccaagaaatatagcttggcaggcagtgcacagaccgaatttcagtcctacttgccaccttggtctagtaattttgcacagtacacaact

SEQ ID NO: 274913 - DNA, 239 bp, Homo sapiens
cataaaaagaaaagcggtacatatacccaatagaacacaattcagccttaaaaaagaaagaaatcatctcattggcaacacgaatgagcctagaggatggtacactgagtgaaagaaagcaaaggccaggcacggtggctcatgcctgtaatcccagtactttgggaggccaaggcaggtggaagcgttgagcccaggagttggagatgaacctgggcaacatggtgaaaccccatctc

SEQ ID NO: 274914 - DNA, 432 bp, Homo sapiens
cagctcacagtcttccctttgtcgtttgaatgtcagtgtccctcctgctctcaaagtgatttttccttttttgctttatgttctttttttttcttttttggtagagatggggggtggggggggggtggcgatctcactgcccaggctggtcttgaactcctggcctcaagcactcctcctgcctcaccctccccaagcgctgagatatagacctgagccacagcgccttgccagttgttttatgttctttatccttttacctgcttgccttctgtaacctgggttgcattaaatttactcctacttgtgagtaaatgtgaaccatagcaataaatttagtctatccccagaaccttcagtagcaagcacccctattcctacgttatttgtatgtgtccactttaaataaattacctttcaattctgcctcta

SEQ ID NO: 274915 - DNA, 275 bp, Homo sapiens
tttttcttttttcgttcttacagctttattaaggtaccgttgatatgaaaaaaaatgcatgtatattatatgtccatttttattattgtggacacacacaggcacccataatagcatgaacacaatcgaggtaataaacatatccatcacctataaaggtttcctgtgtccctttgctctgctctttattgttttataaaaatacttatcatgaggtctaccctcttaacaagtttttatctgtgcaacactgtgttgctaactatgggtcgacg

SEQ ID NO: 274916 - DNA, 461 bp, Homo sapiens
gaatagatgtagggcagcagaatttcgaacttcttttcagcatcacaatactttaaaacagtgattgtcatctgcctcaaacccattgcctctcacataggaaatattttgaaacatattttttagtaccttgaaatgaaattcatgataattaacccatctacacacatttttaaaaatcaatatagggccctaacagcaatataaaggggaaataaaaagaaactaattgtaataaaataatattgatttcaataagtacattctagcccagtgcttataaattttaatgtgcatatgaatcatccagcattcttattaaatgcagattctagttcagtagattttggttcagtaggtaagccctgagatttggcatttctagcaagctcctagatgatgcccacactgctgtttagtaagagcatactttgagtagtaagggccgaaaagtataaaaa

SEQ ID NO: 274917 - DNA, 457 bp, Homo sapiens
tagggtatttctcttaactacaaaatttgttttttaatatttacaattcaataataatttaaccacagaaatgtgttccagtaacatattttggcatcaggaactttactactaaaactgaaagtgatatagagagggtcaagatatggtaaagagtgatgatttactatattagaaaatgaagatccttaaatgctaactaaaatacaactgtgactaattaaaatcatctcaacttaaatcttaacttttactttccttttttgtatgggacacaataattatgttttggctgaatagtactagcaaatgcaatcaataagcctttaaggccagggttctcctatgttttacatcaagcctcagaatatggtaaaattcctgctaaatcttccaaagccatatacacaggcatggtcattttgttttctagctagggcttgacctgacctcacta

SEQ ID NO: 274918 - DNA, 406 bp, Homo sapiens
gaccttgtgttcctctcacaggaatcttgtttgtaccagcagatgcccttgcggctcttatctgatctatgtccactttattcctgtcattataaccactctctaagagagctgtgaatagaaataagatacaatgcgaagatggccatcggaaaaccaggaagagggcctttaccaagaacccgaccatgctggcaccttcatctcagacttccagctaccagaactctgaagaaattgaagctcagagaagttaagatacttgctttagaacacagatagttaggggcaaagctgggattcaaactcaaagcacttggctcacgaatctatgtagttagaagtactctattctgccttcgtaacactctcttgctttaataaagtgaatgataataataccttg

SEQ ID NO: 274919 - DNA, 367 bp, Homo sapiens
tgcctcaaaaaaaaaaaaaaaaaatctagaacaatgttcttaattggggtgactgtgtcccctagttccccaggggacatttggcaacgggacaagtgggttggttgttacaactgggaaagtactactgccacatagtggatagaggccagaggtgctgctcaacatcccaggaaccacaggacgaccccatagcaaagaacgctctggccccgaaatgccaacagtgccaatgtggagaaaccctggtctggatacaaatgcatcccttggtattggatgccagcagaggcccatgatagctgcctgagagaagcttaaaaaaaagaatctgagtttgatactaaaattttcaaaacaaatatgt

SEQ ID NO: 274920 - DNA, 540 bp, Homo sapiens
caacaaggccagagggcagagaaaccagttaggagactccagtgataatctaggcagagaagatggtttgaatggaaaaaaatgaaaagaattaagtcactttcatcactatcattcctagttcttattttgttcttatgcttgtctgtaagaaaaaatccgtttgaaaaacctgttagactatacttggtgtgaaaggctttcctgactttattctagacaagattactcatttttggtttcaacctttctaaacttccagaaatattaataagggaagaaaaaatattacatccctgactctgcttctcagaattttactctgtgagctctcttcctcctactcaatcacaaaattattgctttacttaataataaaacaaacaactgcctcttctcccaggattccttatttattttcctgtttattctctaagaaaagaaaaataaaagaatgctattccctgtcccctcgtcatcattctgttacatgttattctggccagtctattagttcttccacatttttttttcttccgc

SEQ ID NO: 274921 - DNA, 231 bp, Homo sapiens
cacaggcacctgctttcttccaagaaggagctctcacctgtcactcaaaagcacctgcactgagaagttgggagagccagagaagactcctgccctttctgaattttaccaattatctattcaaatgtatttactcataagtgggtactcaaatggaaatgaaatgtaactcatatggaaaattcatccctaacctgtattcaacaggaaaagtaatatattctgaatggt

SEQ ID NO: 274922 - DNA, 422 bp, Homo sapiens
acaggctctgaatttacgcagcttgatagaaaataattcgtctatttttcaaacaatattgttatatattctcatagggtgcctgagtttgaataggcacagcgttcttaaccaggggtggaagcttttagaaacagattccaggcctcatctccccaagattctgcttcagcagctgtgaatggggcagtgtgtgtgtgtgtgtgtgtgtgtgtgtgtgtgtgtgtgtgtcagagaaagagagagacagagattgatcttgatgtacagtgccatttgaaaatctcaaaactaagtaagttgttccccttcagctacatcaggggagtattcatcaaataacagtcactagttgtgctgggaaaatagttgattaattgagccaaacctatctctgctaccaagcattgtagctggctgga

SEQ ID NO: 274923 - DNA, 544 bp, Homo sapiens
cttttgttacagaaaggtcatagtgagattttcctaaccaactgaattaggaaggcctagaggatttattgtattcttgccattccctaaatatttactgtatcctgtgtaatttggcacaaattaaacactcgcatccaaaccaaccattgtctttttaacagttggcatgttaaaagtgttcatactaagacatgccttaggaacctccagattttcttttgtttttaataaacaacaggttggactcggattagaaaccataaatctgacgcttcccacagtgacggagcttcaaataatagttgtgtacaaagctctgattagacttcataaaaccctttttaacttttcattatggaaaactaacatatacataggtagagagaataatgtataatgaatcttcatgtatgctcatcactgctttcacaattagcaacccatggttactcttaacaaccaatactttttggggaacagaagtggaaagatatttgtttacaaactgttcttcttgaatgattttagaaaattaaaaaaa

SEQ ID NO: 274924 - DNA, 315 bp, Homo sapiens
gatcttgttacagatttcctttaagtttgtcacaggacaaataagtcagggattgttttcggagcccaggcgctgtctttatacaggaattcttttcagaataacacacatcaagttctttaaggtattttgtcttagttgaaatatagcacagctgcctgctatgtattttcttcttctcagctatctgacatggtgtatattcatgtgctggattattattttctgtcttcccccacccagttgcaggtccactaaacagtccttgcctgcagagtttactctttgatggggtcgacgcggcagcgaatttag

SEQ ID NO: 274925 - DNA, 489 bp, Homo sapiens
agggcttgagtgttaattctgtaactgtccgaacccgtgagtgcggagccagacaggccaccactcctggctgcgaagcctggctgtcagcgtcctgcttgttaatgattgtctaatacaatgcctgccttgcctatctcacggggtaattgtgagggcaacataaggtcctgtcattaggaaagactcagttatccagcagcagttccgtctgccttcttcctgcgtgtcccacattttaattggtgttctcgtatgatttgggtttcccttattccatactaatcagacgacttcgctttgatttacttgttttggtgatcagtcatcaagtccagacttcttgttccctcagtttgttttcaggtctttacttaaggtttgtgcaccaatagttttcctgcaaactgtaaagtgaggatgacaatactacctatttaatatagtttgggtgtaaatgagattgttgattaaatgtagtcagatatt

SEQ ID NO: 274926 - DNA, 255 bp, Homo sapiens
ggtcctttctctgtcgctcaggctggacttgagttcctgggctcaagtgattctaccaccttggccttccaagtagcagggatcacaggtgtgagccaccgtgcccagctagagcaagtttttaaatggaacactgtactattttgtatgatctattcctaactgtccaatgtggcaaccactagctgtatatggctacttaaaataaaatttgccgggcgcagtgactcacgcctatattcccagcactttggg

SEQ ID NO: 274927 - DNA, 426 bp, Homo sapiens
ccgcctacctgagcggcgtcagggaccagggggcaggcccgacgcccctcccgctccgccgcagccccgagccggcgcgttcccggaaacgggggccgggcgggcgccaggtaagcggcgggggcgatggggacggccgcgggggcggtcccggaccaggtgggccctgcgggccggctgagagcccggtagggcccaggggccaagcgcaggcagaggccgcggccggggcctatgcgggccggagcccggatccaagccgggccggaggcggccgggagcggggcgggaagccggggagggagagagggagaagccggcggctgccgtggcttcctcagccgggtccgggggcgtccgctggggcaggccgcgacgacgcgggttgccgcgctagggggctgggatctcggcgcggccgcgttc

SEQ ID NO: 274928 - DNA, 122 bp, Homo sapiens
gaaaggaaaggaaaaaggaaggaaggaaggaagggagggagggagggaaggaagaaaggaagggaaaggaaagaagaaagaaagaaaaagaaagaaagaaagaaaagaaagaaaagaaaaga

SEQ ID NO: 274929 - DNA, 453 bp, Homo sapiens
aggctccccccagctcccttgctctccctggagcaccatgggcaggactctgaccgggatgggcaggttggggcattctggagaggaggttttggagtgatgggtgcagaaggcgttcagggtggtgaatttccctgaaagcctcaggcccagctctggctctgctccttcaactctaaggccccctttattcatctgaagaaattgaactcaactcaggttcccactgggggacgccacattgtcagttgcgtggaggtccttagtggtgtctgaggggctcctagcgtcagagagctctgcagaggcccctgccccacaggtgtctggtttggggctaggtgatgccggttaggaggggcaatgggtagatttggagcacctcatagatgtgttttcaaatgaaaatacaagctgggtgcggtggctcatgcctataatcccagcactttg

SEQ ID NO: 274930 - DNA, 392 bp, Homo sapiens
ctctgatgcattatccaagacatcattaaggtagttagtggagtcgatggctgagtcacagtgatgaatggatatacaggaaacagtggactgcaagtgtacatcactgctatcctcaaagaacaggaaagacagtgtctactgcagtgatcaagttccagcctgttcagaatcacccataaaggcattaagtgcacaggaagtaaatgtgaacagaaaaaatacccgagatagcggctttcaaatagaaatcaaggagcacttcactacataatactatttcctatcaggtagattagaaaagcctctccattaattcaaactctacacttacttttacttcagaacagatggccaacctaagccctggttttctataatttggccatagc

SEQ ID NO: 274931 - DNA, 331 bp, Homo sapiens
tgaaaacattaattgctttccttagatttaggtcagtaaacatttctgttgggtgggcgtcactggattggtgttaactgaaagacatttaacaccactggagtagactgagcacattggctcatacctgtaatcgcagcactttgggagtccaaggcgcgaggattgcttgagcctaagagtttgagaccagcctgggcaacacagtgatacctcctctcttctaaaaataaaataactgtccagttgtggtggtgggcgcctgtaatcccagctgcttgggaggctgaggcaggagaattgcttgaacccaggatgcagaggttgcagc

SEQ ID NO: 274932 - DNA, 405 bp, Homo sapiens
aattaagaaaataattcctgactttgctggtttctgatatgctaagctgcctgtgccatctcctaatgctgtgcttggttcccaatctcccaatttgacccaaactcacgtccctgcatccaccctgtcctgttctcgtgattttgccttgtgcagatgaaacctgttcaaggcaaatcccttctgactggctggtggtgattaaaccatcttctgatcagtcagaactcccctggtccttaattactgtgctcttccaggaagagtcccataatgcatgtgtttgtagatgatttgtaaaggtgggttctgaaaacaaagaaacagagactaagtgccttttaaagacaaatacttcttttgttgatactttcaataaatatctgagtggctaccacatgccaa

SEQ ID NO: 274933 - DNA, 286 bp, Homo sapiens
cacccgaacccccgttcagctgcgaggcataaacgccttcccctggttaggagctgatgcctcactgtgagcttggatggcaagttcatagaggccatccacacgaatgggtttaatgggatttctttatcaattgtttaaagagagtctttagcgtccctcaataccctttccaggaggatacacagaataaattcctgcttgacttttagatcccagataaaactactcccgcagaagaattagaatttctttgtcatattggacaataaaaattatgtaactt

SEQ ID NO: 274934 - DNA, 310 bp, Homo sapiens
tgacccagtcagctttgttttgtggctttagtggggcagcagccaaaagaaacatgctctggctgggatcctgccgcagtgcctcacaccagaccaggaaccatcaggccatggaggaggactgggggtgcccccgtggtccagccgtactcctctcctgggaccaccctctctccctcagtccccaaccttcttcccaggggtctcccacttcaaatttacccatttcctttggtactttgaattagatataaatactttaaatagtaaaatgaagtgaaactcctgcctcaccccctaattcaaatgg

SEQ ID NO: 274935 - DNA, 329 bp, Homo sapiens
ctgcctcgggaggggcgctggctgaagcacaatcaaaaagcaaggggtgatcgggcatggtggctcacgcctctaatcccagcactttgggaggctgaggagggcagattgcttgaggtcagtagttcaagaccagcttgggcaacatggtgaaacctcgtctctactaaaaatatggaaattagctgggtgtggtggtgggtgcctgtagtcccagctactcaggaggctgaggcaggagaatcacttgaacccgggaggtggaggttgcagtgagccgagatcacaccactgcactccagcctggatgacagagcgagactccatct

SEQ ID NO: 274936 - DNA, 260 bp, Homo sapiens
gggggatgggggagatggacaaatgaggtctggtttaaagaatgagaagtgtgaccaggcatggtgactcatgcctgtaatccagcactttgggatgctgaggcaggaggatcacttgagcccaggagtttgaggttacagtaagctatgattgtgccactgggctccagcctgggtgacagaactagaccctgtctctaaaaaaagaagaagaggtgtgtatccttctaaatgataaaacagatcactcccctgcttac

SEQ ID NO: 274937 - DNA, 387 bp, Homo sapiens
tttaaatatgatccatagtcttttaacataataaccaaaatgtctccatctcattcaaacatcacttgtcatatcaagaaccaggaagatctcaagctgaataaaaaaatacatttaatagatgacagcgatgttagaattatcttacaaagatttcaaagtagccatcataaaaatgaatgaacaatcataaacatccttgaacaaatgaaaaaatatcacctatttcaaaattggttgaagagaagatttggaatgttcccaacacaaagaaatgataaatgtttgagataatcgatattcaaattacctagattttattatacattgtatgctcatatcaagatagcacatgtaccccattaatatgtacaattatgtagccat

SEQ ID NO: 274938 - DNA, 335 bp, Homo sapiens
gaaccaaatgcaattccctggccgccctgagggagttagagtcgactagttcttcaccccttccagaggcgtgtctgctcaatcaagtcaaatactgaacaacttcctggcggagaggctgagaattttatacttgcttgctcgaaagcaccccaaataagatgatccacgccaacacctcccctttacagcaaaaggctgaagctcaaatacattaactacccttcccaaggtcagatagccagccagtaatggggcccatgaggaactgaattctacatctaactgattgaaaagctatgttctttggcatttgattaaactactttaatcat

SEQ ID NO: 274939 - DNA, 487 bp, Homo sapiens
tttaacaggcagctttccgtgtctattaatgttctttctcaatggtattttctattgtatggatggcactgtagtttatttaatggacatttggcttactcccaagtggttttgctctcataaacatggctgagatagcataacaagagttgttttgacagtcatgttaaacaggatgtcagcaggccctcagtgggaatgcgaaggggaacttggggtggtacagctgtgtgagggtgagtggctcctttcctagtttcttcatcctggcctcttagctaaacccctgtgtactgctttgttgttaacttggtccagctgcacccgagagctcattgaatggttcacttaagagctatgcatttcactatgtgtaaataatcctcaatattttttaaaattaagtatgtcctagttccaaaccagcaagatcttgctgtttttgtgcacattcacataaatgggattggatgtaataaaaaccaaa

SEQ ID NO: 274940 - DNA, 291 bp, Homo sapiens
ctccctcacaccgcgctgacagccccttgcactagactagggctcaggggtaagggctgatactctggtctctgggtccttagggcctggcacaaggcgggagtcagtgtacaggcagtgacccagtgttctcgggcacaatgctcgccatgcagcccgcaagcagaggccacaggcctttaactctgctccatgtggaggcccttaatcatcgtgagtgaaaggactgtagattctaacccgtgtggtgactgccaggactcaggtacaaggggtcaggtaggctctgga

SEQ ID NO: 274941 - DNA, 419 bp, Homo sapiens
aaaatagattatctactttcacttccgccttcatacgactttcctagaacacgagatcatattaggagagtatcctacaatttcccttctcctctggtttacagaaaggaactgaggcagcgggaggtaaggagacttctttaaaatcagaagacacttagtgccaacagagtctaagcctctcaactcacaagaaaatggccagcccaccctactacccctgctctgccctctcctctccttcgatacacactattgagagtgcatacaccaagtctagagatccattccagtacaagaagcactgactggaggggcaagagatcgatgtttggttctaaatctattatctacaatctaagccacttactatataagaaccttagccagggtaacatggcaagacctcatctatacaa

SEQ ID NO: 274942 - DNA, 364 bp, Homo sapiens
ctgccccctccccaggttttctttgaagatataaaggagttgctacaggctttcttccaatttaggaggttgcaactgtattttaaagatgatgctcctaaaatatgttatagtagggtatatggctaggaaagatccagagacatggttcaaaggcaaactctgcttccgactggtgagcaagatacacatttctgaaactttgtttcctttgtataaaatgagtggactgggggccgggcgcagtggctcacacctgtaatcccagcattttgggaggccgaggcaagcggatcacgaggtcaggagatcgagaccatcctggctaacacggtgaagccccatctctactaaaaacacaaaa

SEQ ID NO: 274943 - DNA, 380 bp, Homo sapiens
tgaaagtttacaggcaaagtctctacttgagtgaattttctaactcctatttactttcaactttaactgataatttctttactatagtggttttcaactagggacaatgttgccctcagagaacttttagtaatgtgtagagatttttatttgtttgtttatttacttattttttgctcacaggtgggagaaatgttttagaggcaagagaggctgctaaacatcctacaatataaaggaaacatccccacagcaaaaaaaaaaaactgttcttctcaaaatgttgacagtgctggagatcagacacattgctctactttatattttattgtctgtccctgaacttctttattaaatggccaatattgtatggtaaaatc

SEQ ID NO: 274944 - DNA, 551 bp, Homo sapiens
aggtcaggagttcgagaccagcctggccagcatggtgaaatcccatctctactaaaaatacaaaaattagccgggcatggtggtgagtgcctttaatcccagctactggggaggctgaggcggcagaattgcttgaacctgggaggcagaggttacaatgagccaagattgggccattgcactccagcctgggtgacaagagtgaaactctgtctcaaataataataataataataacaataatatgtttttgtgggtataagtgtggatgtaggatagatgtttatgtaagtgatggaaggctacatagtggttatagttgtgtagcatataatgtttactgaatttatacaaatctctgttcactaggcactacagaaaaacataagatctgattcctagcctctagggatgtacagtctcataaggatttgtctgttttaagttggaagtatttgtaatgttgtaaaggaagagtgacattggaggggcatatgatttggagaaagtgaggtactgactggacagtgttaggaactaaagatgtggag

SEQ ID NO: 274945 - DNA, 612 bp, Homo sapiens
gacagacctttcataaccctgctccctgcaaccacgctaatgtctctaactgattcaaagcaggggaagaaccgctccggggtccgcatgtttaaagatgttgatttcctggctccagcctcaggagagttatgggatcgacttcgcctgacctgctcccgacccttcacgcgtcatcagtcctttggcctggcctttctacgggtgtgttcttctctggactccttagatgactctgtggtgggtccctcagcccttctgagctctgtgctgaacaaggtgggagaaatgttttagaggcaagagaggctgctaaacatcctacaatataaaggaaacatccccacagcaaaaaaaaaaaactgttcttctcaaaatgttgacagtgctggagatcagacacattgctctactttatattttattgtctgtccctgaacttctttattaaatggccaatattgtatggtaaaatcgagagtatcatcagaaagaaaattaagaaaaacaatcagaattagaaattagaggctcctctgcctatggaatagccattcttttattcctttgctttcttaataaactttgtctcacttaaaaataaaaagaaat

SEQ ID NO: 274946 - DNA, 386 bp, Homo sapiens
acagttcttgccttgaggggaatgactgcttgcttctccactgcgtgtgtgtgttgaagcagggaagggcactaattcttgctcaaaatctaagcagctgtggtataacgcgaggaggtttagacatggaagacttgggtcaaggcacagctctgctctagtagctttgagactctgggaaaatccattaacctcattagactcagatggacctgagttttctcatctcaaaaactgagataattatacctgccctgtctctttcataggatgttctgctcagttgagataggggttgggatgggattttgctcaacccaaacccttacttctccactcaaacagattcctgactgaaggtgccctaccaatgagaagcacagact

SEQ ID NO: 274947 - DNA, 488 bp, Homo sapiens
tgagctggtgccagaatccaagttagatctgatccagtgcagatctaaccttattagatcccagtctaataaggtttttcttaccaaacagtggtgggaataattctttaagagtctggacgtgaccagatagttttctttctgggacttttcaagaaagtctgcttgtaggtggaaggttactgtactaacttcattataagaaatttagaagaattcagccgggcgcggtggctaacgcccgtaatcccagcactttggaaggctgaggtggagggatcacctgaggtcagaagtccgagaccagcctggccaacatggtgaaaccctgtctctactaaaaataaaaaattagccgagtgtggtggcaggcacctgtaatctcagctacttgggaggctgaggcaggagaactgcttgaacctgggaggccgaggttgcagtgagccgagatcacaccattgcactacagcctggggcacatctca

SEQ ID NO: 274948 - DNA, 240 bp, Homo sapiens
tcaaattttctgtttcttcctgattcaatcttggtaggttgtatgtttttaggaatttatcagtttcctctagattttccagtttgttagtgtatagttatttataatagtttctggtggtcttttgtatttctatggtaccagttgcaatgtctgctttttcatttctgattttgtttatatgggtcttctctcttcttggttgatctagctagtggtttatcaattttgtttatcttt

SEQ ID NO: 274949 - DNA, 465 bp, Homo sapiens
agcctgccaaagtgctgggattagaggcatgagccaccacacctggccaacatcagaggatttatatttgagaaaaaccctgcaaatgtaacaaattttgaaaaactttttcaaaaactacagcttaaaaagcagcagaggattcatactaaaatatatttttgcagatgcagtagatataaaaatatatttaatccaaagttaagtttatgtaaatatcagaggattcacagtagaaatatctaaggtgctggcacttcagacaccacactaaatcagagtgctgagtatagaaaataatccaaaactaaatttggtggattaattatttgtatataactttaaaagaagtagaactttttttgcagagttttaattacattcaaagtatacttttttccttaaaaaagttaggtttttttgaaaagaaaataatcatgtcattcaactttcaaattacttcat

SEQ ID NO: 274950 - DNA, 147 bp, Homo sapiens
aggcacaattttgtaagaagtgctgctgttcaactcttatatcctctggacacataaatgccatttggagtctcctaattcaaattcccatccttacaaattccttaaagaagtgtttaacttaagacaaaaacaaccacaggccag

SEQ ID NO: 274951 - DNA, 252 bp, Homo sapiens
ttatctggtacatagtgagggccccatacatgagaactgtttttgtcatctaaaggctgggtgtcatttatggcattttacagatgaagatgcaggcttgggacgttcagtcaacagacatttgttaaatcccagccccatgctggatcctgcgaaaacacatccccttcccttatggaatttaaagcagataatgttaattatgattacatcttatattaagtgctaaataaaaaggtaatgaacaaaaaa

SEQ ID NO: 274952 - DNA, 259 bp, Homo sapiens
taatggctgtgtggtgctatggcacttagcgggccagggatgttgaatgttctgcagtgatcagaagagtagcattctccccactgaaaaaatgatgattagaggactcattatgagggccaaattttgtgagttttatcagttaataattttttttttttgagatggagtctcgctctgttgcccaggctggagtgcagtggtgcgatcttgggctcactgcaacctctgcctcccaggttcaagcgattctcctgcc

SEQ ID NO: 274953 - DNA, 414 bp, Homo sapiens
tttaaattaatgcagctatagtaatatttttcctattataccccggtacactgtacggctgcctgttctatcttgtgaacaggttatgggtctgtcacataaagtgttatttttactatagtttcttcttctatgtagttataatatagtttttagaataacctacaaatagtagcagttttctgtcaatgagaactctgtgattatcatcaattttattctaatttttttttgaatctagtatttggcctgcatatgtatttgaatcagaatataaaacagatacattatgaaaaatagaaagaaattgaaataaatataatgagtcaacatatattaatgcaatatattgtattactacatagcaactacttttttcagttaaaccctaaattaaaaaaaattaaatatatt

SEQ ID NO: 274954 - DNA, 459 bp, Homo sapiens
cgtccatacactccgtctcctgaaggggaagcgggctcttctcagatgcacagggacaatgtgaaaatcctgtcctcagattgagaggctgtttcgtgggcaccgaattcggggtcaggaaagcagcctgcatccacgagtatcctcgggttactaagtggggccagtggctccaggtgtaacccatttaagtttgccagacagccgggatgttctggtgaaggatctgaagtgtatggccacaccagtcccagaagagcctgggagaagggaagatggtgaacacagtggagttctgctgcaaagccgaagatggttctggcacgtggcatgacccacatgactcaacatcaggagatctgacttcataaaagtgaactatcacaatgctgctttgcaagctgtgtgtgagtgtaaaagcgttgaaacttcctcaataaatgaaaagatatctttaaa

SEQ ID NO: 274955 - DNA, 1051 bp, Homo sapiens
ggtttcattataaaatggctttatttcctttgaactgttacgagtttccagagcatactacattagtcatctaatatctactgctcagataatgctacaaaacacacttcattttggattatctacattgttaacttcttgaacacagatattcacagttggctaagaataaggaaaaggaaagtggagtttaaagattaggggcaatgagatatagtgaaaggcttaactagcctttgacttattaccagtaaacaaatatttgttttccatttacaacatgtgttatcctgggcaagtgatttcatttctgagcctttgcttttttatttgtaaaacgaagcatcatgacttcagttgtctgccttatgatcaccagattgggtagactgttaacactgggggcccccatgaaccatacctggtatttgcactcttgtgtagttagtcctctcccacactgactctgggccgatgtgatttggcccagaggacatttgtcaagcagaggcttaaggatttgcacatcagggcttgccctcttggaacatttgctcttggcaccctaagctactgtgtagagaggtctggttactctgctggagaaactaggtggacagaaagatgtctggccaaacccagctttttcagacatgccaactgagcaccagacatgcatgaagaaattatctgggatgtcccagacttagtagatactacactaagcagaacgacccagcggaattcagaattgggagaaagtgttttaagccgctaactttgggggtagtttgttgtgcacagggttctgtggtgtgctggatgccctttaaaaaacctcatgaaaaactaaatttgtaattggtcagggccaggtatagtggccttcctgttacatattttattcatgcaaccgacatttgaggtctataatacagtggtgagtgtggcatagatatgtgctttcatggagttctccaatggatgagatcaataaacaggaaacaataaaaactcattttgcctttatgaataacccagtgaacaacct

SEQ ID NO: 274956 - DNA, 996 bp, Homo sapiens
ggtttcattataaaatggctttatttcctttgaactgttacgagtttccagagcatactacattagtcatctaatatctactgctcagataatgctacaaaacacacttcattttggattatctacattgttaacttcttgaacacagatattcacagttggctaagaataaggaaaaggaaagtggagtttaaagattaggggcaatgagatatagtgaaaggcttaactagcctttgacttattaccagtaaacaaatatttgttttccatttacaacatgtgttatcctgggcaagtgatttcatttctgagcctttgcttttttatttgtaaaacgaagcatcatgacttcagttgtctgccttatgatcaccagattgggtagactgttaacactgggggcccccatgaaccatacctggtatttgcactcttgtgtagttagtcctctcccacactgactctgggccgatgtgatttggcccagaggacatttgtcaagcagaggcttaaggatttgcacatcagggcttgccctcttggaacatttgctcttggcaccctaagctactgtgtagagaggtctggttactctgctggagaaactaggtggacagaaagatgtctggccaaacccagctttttcagacatgccaactgagcaccagacatgcatgaagaaattatctgggatgtcccagacttagtagatactacactaagcagaacgacccagcggaattcagaattgggagaaagtgttttaagccgctaactttgggggtagtttgttgtgcacagggttctgtggtgtgctggatgccctttaaaaaacctcatgaaaaattcatgcaaccgacatttgaggtctataatacagtggtgagtgtggcatagatatgtgctttcatggagttctccaatggatgagatcaataaacaggaaacaataaaaactcattttgcctttatgaataacccagtgaacaacct

SEQ ID NO: 274957 - DNA, 1532 bp, Homo sapiens
tgagaactgtcctccaacccccatcagggctggcacttgtactggccattaggaggaccaggtatagacctgcccatctcagccccaccctgctttctcctctacccaacaccaccagctttcccccctatttcccaccttggaagcaaagtacaggactgagaccgctgagaattccgtggcccaacccattgcctgggaaacccaagtacatcaccaagttaacaaaggtcaagccttaactgtaacaccaccactgcagctggctctcacctgcacgcactgcctactggccaggatatcaacatgcacagccactacaaagtctgatacagtttcatcctataagtaaacagcattgcagcctaaaaggaaacagcattgtctaacctaaccgaatattctgaatgtcagacaaaggcgagtaaaggtagcagatctcattcctgcctgtcaaagccatggtgctggtaccgcccttcactccccaagcggagacctcagcagatttcaccaggggcctgaggactcccccaccacccctctcagggctggtgtgtacatctgccatggggggcctgagtgcagggttccccaatctggctttactcagctttaccaccccatcctagagagaaggtgactcaagcccttgagcactccagggcccaacccaccacctgggacactgaaagcgcttctacagatgttaacaaagatcacatataaaccctactgctatcatggcagcctgctctaactggcatgtaccacctactgaccaggtcagcctccaaaacacaaggcaaatctgctgaaaaagatgcacagcactcaggaaggagacaggcttcatgtgacctctgcatccaccatcacccatgccaccctggcttctcagtattctgaagtggcttcttcatccacccagtacacagctactacaactgccattttataaagccaccacattaaagctatttttaactaatattgtacagagtctttgctactgaacatacccagaagcaaagagaaacagccctacataacatcatagtcacatcctgaagagaaaaaaaaaaatttccccccaaagaaagtaaattcaaaagcaagaagaagcaactgttttctcatatgtaaagaaatcagtgtaataatgctgaagtatttaatagcaaagggttatggcatccccaaagaaacagtaattctccggtaatagatcctaaccaaaaagaaataatcaaaataccaatttaaattattgattgtaaagaatctcatggaaataaaaagacaaatctgaaaaccagtactgatgaatcaacaaattaattttgaatatgaatgacaagtgtaccaacgagatggatatcattatttctaaaaaagccagaactgctagaaaataaaaaattattgaaggaattaaacaagacagttgaaagcttcaacaagagactagagcaagcaaagcagagaatctcactgcttgaaacaaatcttttaaattaatagagtcagaa

SEQ ID NO: 274958 - DNA, 131 bp, Homo sapiens
attcagtgacactaaatatgttaacagtgttgtataaccattaccactatctatatccaacactttatcattatccccaacaaaaactatgcccattaaacaataactcccacccttctacctctccccac

SEQ ID NO: 274959 - DNA, 262 bp, Homo sapiens
ggtagggaggttggggacacactgttgagataaatttgtttttaaatcttctttctagtgcatagtagagagagaaggcaactaaagagcaaaatttgcatataccctggaaagccctacttcttgattaactttatttgggatggtctctttatagcgcttttaagttttggagtagaaagatgaattcaggtaaagaaaactagacaaactaagttgtaatcattaaatgactgcttcccttctaatttcctccttagaa

SEQ ID NO: 274960 - DNA, 630 bp, Homo sapiens
atttcaggtagaaatgctatttataaaactgaagcagagcatgggaagagcgaatgaaggtggctatttgagaagacccccaaaaaagcgagactgcaaagcactcgcggttgttccttttctgatcttctagctacaggcagcgaggtgcgctcccaggaaggcccgccctcttcctcctgatagggcgcaaggtgccagggacgctcccccgctcttccccgcccagagggcacttgtgggggcggacgctttgtgcccagcaacatgagcgcggcgcgaaagagccgcgcgcgagaagggtcccggcattctcctcgttctcactaggcgtggagaattactccaggcggatcgtggcatgatgggaactgtagttgacgaccgccggccccgcgcctgaggggcagtaaaagtcgccaggtccggctccatttctggcacaaaacttgcagcaccgaggggttgtggagagcccttgcaggggaagagggcagggtcatcccgagaaccaacgggcacgtatagcccggcgaacgcccaagccggtcaccgcccccggtcacgtgtcgccagcctccgcggccgcgcgccgctctcagcaccgttcccgccccacccggcccggca

SEQ ID NO: 274961 - DNA, 334 bp, Homo sapiens
cccacctcagcctctgaaaatgctgggattacaggagtgagccactgtgcccagccacaattatcatttcttattaacttactcttttcctgtttccccctccagcctgtaacaccataggggcagggaccttgtctgtgttgaccacagcgaggtctctagtgcttaacatgtggtatttgtaggagatcggtcagggtggtggaagaaattgtaggaaaagatgcaaaccttcttggaagaggttttgcaaaagcttcaaaaaagggtttggctgaaggcagccaaattctcttacctggagcctgagagcaaaggttagataataagggga

SEQ ID NO: 274962 - DNA, 334 bp, Homo sapiens
tcagctagtcaagaggctgaggcgggaggttcgcttcagcctgggaggtggaggttgcagtgagctgagattgcatcactgcactccagactgcacaacagagtaagaccctgtttaacacatacacgcttttgcagggcaataactgtttgccagtgagttgactgacacacacacaaaaaaaccccaaacctgcaaggagatgctacttcatacccattaggatgactgtggtcaaaaaaactcagaaaacacgtgttgaaggatgcagagaaactggaacccttttgccctgttggtggagtgtaaaatggtgcaggtgctgtggaacaca

SEQ ID NO: 274963 - DNA, 659 bp, Homo sapiens
catctcgtcctgagggcactgtctccatcactttaatctgaactccttgggccacaggagtgatttacgtgatcacctaacctaagagatgcctcctgacctacgcctcccagggcaatgcagatggcgctgtgaacctcctttaaggagcacgggaaagacaccacgtgagggtgacgatgtgacagcaatcacaatatcaaagaaactaacccccaaaggtaaacttctttatccctttaaaaattttgaaacggaagtgcaaacatctggccacgcacagtggctaatgtctgtaatctagcactttgggaggctgagctgaagaggatcgcttgaacccaggagtttaagatcagcctgggcaacatggtgaaacccttctctacaaacaatttaaaaattagccagacgtggtggcacacacctgtagtcccaaccactcagaaggctgagatgggaagatcacttaagcccaggaggtcaaagctgcagtgagcagtgattgtaccaccgcaccctatcctgggtgacagagtgagatcctgtctcaaaaaaataaattcgtatctagattggctttggtcttattttcctaatgtgtcgcccgttgtcttcaccccattcatggtcagtgcgttagtctcccactgctgtga

SEQ ID NO: 274964 - DNA, 350 bp, Homo sapiens
gtgcacatctgtggtcccatccttggaggctgaggtgggaggatcacttgagcttgggaggcaaaggttgccctgagctgagatcgcaccacttcactccagcctgggtgacagtgagatttcgtctcaaaaatatacatataaaagaaagagaaaaaaagaaatgtgagcaaagcagaaggaggcggattcaaaccccagtgtgtcacgcctcatgccttttctttagtggtgggaaacccttatcttgtaaagggaatgtgtccccttcttcagccagcctctagtgtatttcacagaaaacaaaacctcccaataaaactgttgaaacctggaaaataaaacaaaca

SEQ ID NO: 274965 - DNA, 357 bp, Homo sapiens
atagaccactgttaactgtacctgaatgcaggactgcagaaaaactacgttaatccttatgtcctcatactctaccttcgtcttaaaaaagacttaaagaacttagtaaaatagccatagtaggaatcactttccctgacactgacccattgccaactttagcagctgaatcattgttgctacctttcttccctgcccaagaacttgcatttcattctctgggtaatttgctatttttttaaatagtaattcagcgactgacccagagccaacctacagctccagttgtgtgtgtgtgtgtgtgtcagcaggctaagaggcacatataaggcaaggcacacacatacaaggaccaaa

SEQ ID NO: 274966 - DNA, 426 bp, Homo sapiens
ctgctgggtgctataagaaatatagttgaagtagcaaacacagcttcagtctttaaacgattttgggtctggctattaagcggaaacacatatgtaagggaatgactcccagctatgttgaaagtctgactctgtgtaatttcaatgtacaggctgctcttggggccaagcaaattcctttccagggtctgcaagaggtggcagtctactaacttcagagtactttaaaaaaccagcgtttgtgagaaaaccaaaaacaggactctcatcttggaatatctaacttaataaatttcatttgcatgtatacagaaaccaacctacttactgctgccagccccaggagccagaggttagagtttttaataataatagcaataatgagttatacttattccagattagttttctagctctcaaaaaaac

SEQ ID NO: 274967 - DNA, 229 bp, Homo sapiens
ggcctgaaatctgtctcttaactcagagggacaccaggtcccactggcacagaagaaagaaagagggaagaggaggaggagaccagggccatcataacctcctaactttgccttgatcatcactagtatctactatcacctttttttctttttgtgacagtgtctctgttgctgaggctggggtgcagtggcgtgatctcacctcactgcaaccttcgcctcccaagtt

SEQ ID NO: 274968 - DNA, 2006 bp, Homo sapiens
  misc_feature (773)..(773): n is a, c, g, or t
tgactatacatttgcaggccttacacgccatactgacaggtgccacttacgtgactcatcagatgatgtcaccattgctgccaattatgggaaataactaatgcctattccagggatgagcccaaaccacacataaatgggttctaaatctcaccctcctaacctgcagtgagtccccccgttccaccctcttgaggctgcaaatctactgagaaggaatgggaaggattctacaacccaacttttgatactttttggccatctctcagtctctcccagcccctacccccacaccacctccctgctcccaggcagagaccgggttgcactttgttagggccagcaggtcaactgtaatggccaagagtgagttaaggctggaatgagaaatatgccccaagcttggaggggtaagcaggaataacacaaagcaaggaaagagattctttttgccctagtgaggaaaggaagcttcagaatgagggctggaggatagcaacttaggactgcagaagggggcagcttatgaagatgggagaaagtgggactgaagttgtaggggagcaggagggtagtgattttccgcttttctttctttctttctttttctttctttctctttctttctctctctctctctctctttctttttctttcttctttctttctctttttctttcctctttttctttctttctttttctttctctttcttccttctttctttcattcttctttgttctttcttctttctttctttttttttttttttnagatggagttttgctcttgttgctcaggctggagtgcaatggcacaatctcggctcactgcagcctccacctcccaggttcaaggggttcttctgcctcagcctcccaagtagctgggattacaggtgcctgccacgacacccagctaatttttgtatgtttagtagagacggggtttcaccatgttggccaggctggtctcaaattcctgacctcaggtgattctcccgcctcggcctcccaaagtgctgggattatgagcacgagccacggcgtccagccgattttccgctccctttcaagtgttaactcaccccctgacaggtgaagagggaagggttccttttacgcacaaccaaggttagcaaatgcccatgcaggatatggggtccctgcctctctggttgcttcatttcagcacttctatattagctgcttatggggaccctaaaatgaactggtcacccctccaccagctaagaaacaagggtgggattgctgtgccataagtcacactgaacgacttgcttctggcaagcatgctcctgtgtgtcaggaccttaccaaggcaaagaaatgccaggctcaagaggagcaggacgtgagacattggcctggcttctaacctggtctgagtggaagagacacagcttagggatttcagttttgctcttaggctactagatactgttatttcaccccctgagggagggacaggaagagcacggatttattttctctccgtcttcagtacttattttagcatctagtcataccccagggagagatgcgagacggtgtcactggctcagctgaagcagatgagcccgtctctagcagagatgtgcctgtttcttaggcatccgttcagcactagtcttggccatcagatttttaaaaaagaaatagctcatgaggcatttgcaacttctcctctctagacttctttctagttttcctctgttgtgtcactgcgatgtgtccagggacaaagccataagtagagcatacatacttaagactatgctgtacatataagacaagacctgtctgggttaaagcacgaccttatgcccaagcatttactctggtgctgaataacgcgaactactggaatcagcctcccccaactctgcgcgccccctgcccccctgctcctatcccattcttgctctcaaatggaccacaccattctcaactcgtttataaataaagggatgcagaattgcactt

SEQ ID NO: 274969 - DNA, 364 bp, Homo sapiens
tccaagttatcctctttatcaatttttactttttgtactatagaaaagtcaaaattattgtattaaaaaatctgtaacaaggctattgataaataacttcttttagggatagaaaactcaggaagttcaagatttctggattaatgattgacaatgttcttagtggtccctctttgatttatttcaattgtaagtaattcttggtgatattctaacataaattctgacaggtgaagagaataaataaattaagtatctctaggagaatcaatagaataagattatcttggttaaatagctaagaaagtatgctaaatagacacaaaaactttttcatcttccaaaatcagagttaaatagtaaa

SEQ ID NO: 274970 - DNA, 629 bp, Homo sapiens
tggctaaatttttaaaacagttttgtagagacggtttctcactaggttgcccaggctggtctcaagctcttggcctcaggtgaccctcccacctcagcctctcgaagtgctgggaatgcagacgtgagccactgtgcccagccaacacacgttcttgacacggtgaggacatgctccataccatgtccactaaaagtctgggtagaaaaatcagttccaaatgctgaaggaaatgcctccagcccactgtatttgtgaagaaaatcttgggtatcagggctgctattttaattttgccttaaaacaagcattgctcagaatacatgttgtaccaaagaatatagacttgactttgcttgtacatgtgactgttttaagaaagcagtgtcgaggccacaattagaagcagaacacatttagtttctttgcctgcagccccaatgtctttggtacatctgtgtcctaaatcatagttgtagtaatgtttgtattcatcacacagcatcaaaaattaggtaagtatgacaggcaagtgcctagtgtgttttagtggtattttcaaaatgaattcatgtcacacccaaatgaattgctctctcagggaacccagtagagaaggttgtacctga

SEQ ID NO: 274971 - DNA, 488 bp, Homo sapiens
ttcttttccttctctgggaacaggggcccggatgtggaaagcttgcagggagagtgtgggggaccccctgtgaggctgatgtttaatcacttgtctgtttagcaccgacgagtcagggagcaaatgtggccctaggtgtgttgttttaataataaatcagaggtgagtgctcacaattccttaattatgtacattttcctcagaaaaaatttcagggccccagcaggtgcctgctctctgggcctcattactgttgacagagctaggatttatgcgctcacagcggcttgtggcaaaatgtgcacagggctgggagaccgcccgtgttttccctgctattaaaatgtcacctcggggtaaataatatgtgttaacacaccagacacatctcccaggtttgtttcttttacctagtctgaaaataattaacagcttgtaacaacttcctaactaaatgtagtgagttatttagcctttctaaaaaaaaa

SEQ ID NO: 274972 - DNA, 447 bp, Homo sapiens
atgctaatgagttgacttatggctgacatcccctagtttcagaatggagggctggtcacctgaaagaccaaggcccgattaaagggttgggacttttcagccctacccctaattcctggtaccaattgtctatcttagtccattttctgttacttatagcagaataactgaaacaggggcctttatgaagaaaaggaattcatttcttacacctttgaaggtgcacctggttgagagggagggggtgaggttaagttgatcaccaatagccaatggtttaattaatcagatctgtgcaatgaagcctccataaaaccggaaaggatagagtttagaaggcttttcaggttgctgagcaggtggaggttgcagatcgtgccactgcactccagcctgggcgacagagcgagactccatctgaaaaaaaaagaaaaagaaaactgagct

SEQ ID NO: 274973 - DNA, 823 bp, Homo sapiens
caaaaaaaaagttcttgatttaaataagcaaactcaagagtttcagccttctttagaagcctggactgaattccagcaaggcctgggagagcctcaatccttggaactatctaaagtaccacattaacatctcatatatagttctgggaataatgttgttctgtctctgtttcctgctcatagcctgtaaaatcagatggattgccaatcagaaaataaagctgcccaacctggccttacattcattcaattaatgcaaaaacagaaagggagagatgttgggatccagaagcctgaggattgtgaccaacacagcattccactggaagctatatgatcaaagagcaaactgtttatcatgaatgcagaatgtgggcaaactcacatctgcacctgacactggaaggtatgctaaggggagccactccctggtgctgtgctccttgagattatctactgggacatctggagcctactgtttaaagaatgctgtcatacaggcctacactaagtcaagcagctgactgacaatcagccccttctccctatctcctttactcaatatatataaagggctctagaactcagggcccttgttcactagaagcaaggagccccctgaccccttcttccaaataaacttttttgtctttgtctttattcccacattcatcttcctttattcaggccaccagtgtacatggcaaagtaatcaaaatacagtagtcagtgagcaccaaccatgcaattgtgctaggtaaggagatggaaaaaatatttttgaggtgggagaaacatcctaacagataaattacagcagaca

SEQ ID NO: 274974 - DNA, 511 bp, Homo sapiens
cgtacccgatcagacccgttcccctatctgccgactctctctgctggaacttctctgttaggatgtgtctcccacctcgagaatattttttccatctccttacctagcaccactccctggtgctgtgctccttgagattatctactgggacatctggagcctactgtttaaagaatgctgtcatacaggcctacactaagtcaagcagctgactgacaatcagccccttctccctatctcctttactcaatatatataaagggctctagaactcagggcccttgttcactagaagcaaggagccccctgaccccttcttccaaataaacttttttgtctttgtctttattcccacattcatcttcctttattcaggccaccagtgtacatggcaaagtaatcaaaatacagtagtcagtgagcaccaaccatgcaattgtgctaggtaaggagatggaaaaaatatttttgaggtgggagaaacatcctaacagataaattacagcagaca

SEQ ID NO: 274975 - DNA, 419 bp, Homo sapiens
ctttgcaaaggtatataagaataaatacaatacactgaaggtatcacttacactttctttaaaggtaagaatttgtgagacttctgggagaattttgacaggtcctattagaggtattttaaaacacacaggggaaagtgatttgatgttaagcagtggcaaatctacacaaaaacaaaaacagtcatcggagactttcactcaatacaaagttctaccagacctatgcaaatagtaatcgcattttctagaaagagttctaaagtaagtcacacacacaaacctcagtagtagcacaaaacatcctttgttgccggacgtgagaaaaacacactcgcttctaaaaaaagccataggaaggaagtggaagaacctcaggggcgagtgggagtgcgaaaggaatgttgcagctctttttt

SEQ ID NO: 274976 - DNA, 619 bp, Homo sapiens
tatttttcagattatggtcccagggttatggttattgttactaaaaaagttgactactgggataaagatgttaggcaaaaactggaaaactgtactaaaatttttgaaaaaaatgtctatgtagataaaaatcttacagagttttggttagatgcatatgtgcaatatttaaaaggtaacagccaagatcctaatgagaagaatacttttatgaacaatattcctgattttttaagcaattttccaaattttcagcatgatattaatatttcttcatcaaatgaaatcatttcttcccggggcttcattcagacaacagatgtttcttcctcagccaaaaagaaaatattgttattctaattacgacgcatagctgaagactgtcaaattcccctaatggtgtataaccaggcatttatatattttgatcagtatgctgcaatattagaagacactgttagaaatgtattggttgcatcagcagctatgttcattgtttccttattgttaatcccttatccattgtgttccttgtgggtgacttttgctattggttctgtgattgtaggggtaacgggtttcatggcattctggaaagtcaatcttgattccatatcca

SEQ ID NO: 274977 - DNA, 329 bp, Homo sapiens
ggtacatagtaggtgtatgtatttatggggtatatgaaatgttttgatacaggcatgtaatgcataataatcatgtcatggaaaaggtcctaggtctctatgatcagtggttagcaaatcaatccaggttttgtgcccttccctttagggtagcaagttcgcccaagtcccaggtgggtctgaagatcctatctgaaagccagggactggagtcaaaagccttataaatttaccggtattctattctgctgcaactaagctggcactcaaaccaaaatacaaagtcctttgtcgacgcggccgcgaatttagtagtagtaggcgacagc

SEQ ID NO: 274978 - DNA, 364 bp, Homo sapiens
gaggacggaattggcaatatgaagtagatatggatttttaaaaaatcactttttctcccagcttaaatggaactcttaagtgttccttccattagcaaatcacttttttaattctttttttgttttgttttgtttttcattcagtttcattcagaagcataccacttattagaaaaaaagaaaaaatcctcaagcattctaggaaacaaaaatgcatagggataacttggcagttccataagaaaaaacacactaggatgagtgcagtgtgcatatctgtaatcccagaactttgggaggccatggcaggaggattgctacactcactacacttccctacctgtcccctctcattttaaagcaa

SEQ ID NO: 274979 - DNA, 376 bp, Homo sapiens
tcagtattgggcagttttatctgaatgggctccagcagtatggcctggcgaattttctgtttccaattccaattagggcgctgcctacccaggtgggaagagggctgttggctgccctcccctctgtagatgataggtttcaagactagctctaaatgtcaccaccctggagtcggccatgtatttttcttcatcacagctcagtgtgtctttcagtcacagcccagaaaactgacaactccatgcttccctcccttaccttattttagatttcctcctttctaaaatgtagttgaagaatgatttgctggacacattgtcacagaaaatatgctgccaggtgccccctgcccctccctgaccccacaaatccctg

SEQ ID NO: 274980 - DNA, 452 bp, Homo sapiens
gtcccaggaagacagacggacggaccaggacgtagagtgatgcagtgtgctgactcccgaatgataacttcagctgagtctcacccagagttccacagtgggatcccacctgacttcccctcatggatatttgataggcttcttacatttgtcatgggcaatgcagaactcatggttttcctctttaaatctatgctttcctccgtttttccagtctcaatacttgttataaagcaaagcccacctttttcttatgtccacacatccagtccgtcagcaagtccagtcagttcagcctcaagagtgtatttcaaatttgtccacttctcttcatttccatgaccacagcccctgtccaagtcatcatcacctttcagttgagtgactgcagtttcctctttactggcctccccagctctgcatccagcaacccaaataatcttaaaaaaaaa

SEQ ID NO: 274981 - DNA, 276 bp, Homo sapiens
  misc_feature (55)..(55): n is a, c, g, or t
acttgctgacggactggatgtgtggacataagaaaaaggtgggctttgctttatnacaagtattgagactggaaaaacggaggaaagcatagatttaaagaggaaaaccatcagttcagcctcaagagtgtatttcaaatttgtccacttctcttcatttccatgaccacagcccctgtccaagtcatcatcacctttcagttgagtgactgcagtttcctctttactggcctccccagctctgcatccagcaacccaaataatcttaaaaaaaaa

SEQ ID NO: 274982 - DNA, 431 bp, Homo sapiens
tagtcattgcagctactcagctacagtatttatggagatggtgtgtcctgaacagtgtagctcaggtcagcttgaactttccatttctgctctcattgtaggtgtaactactagtcctaatgtcaactgacccatgatttctactgtcagtcaatataagtgaacattgttttaaatatccttaactaacttaaagaattttaaaattgtactgtgattttcataacccgttgcctttttggtaccagagctacgtggtttgaattctggctacatgttttaagtaagaaaaaaaaagacgtatttttgcttactcagataaaagacaacctgtaaaaatataataattaaattttacatgtgctgtacaaggggttattttaaaaagcatttgttcaatttcaataaagctaagtgtgccgcaaacttct

SEQ ID NO: 274983 - DNA, 383 bp, Homo sapiens
gaggcaccagagaaaaacgaaactacatacacatcaagtccctcaggaatagagatgcaaaaatcctgaccgaaataccagcaaattgagtaccacaacaaataaaaatgattatacaccataaccaagtaggatttatttcaggaataaatgcaaggttgtttgaacatctaaatatcaattaatgttaatatatcatattaatagactaaagagtgagaacatgctcatctcattagatacataaaaagcatcagacaacatccagtacccatttatgactaaaaactctcagtcagatgcagtagcttatgcctataatcccagcactttgggaggctaagggggatggatcccttgaagcggggagtttgagacccacc

SEQ ID NO: 274984 - DNA, 451 bp, Homo sapiens
cacattcgtaaatagtggtgtgcattcctgcgctggtctgccagaaaacctgcattaaaattaataatttgctagaaacttttcaggttggcctggcttgacatggagtcattaagttttcagatatgcataaaaaccataggtaaaaactatcaaaaacaagttaaaagagcatatttgaataatttgtgtcaaggatggataatataataattagaaacattaagttccttagggtgtcttaatttgctttgggatattaacctctcacatttggcctcaataggcatgcaattttcatatttgcagaaatttcaatgcgtttccattatccatttgttgatgggggtgaagatgaattaagtaatctgtacttattttaatgtttagttgtcatcagttcatgcctaagaggacaaagcacttgaaatgtgtacatggtcatggcaaa

SEQ ID NO: 274985 - DNA, 290 bp, Homo sapiens
gccaggattcaaacccagacactttgctccagggccaaactcttgaccactataaccaaatgaagccagagtgattcaccagaatgagttcatctcgcatcaaaactctggattatctgtttaagcacccagacttccacctcctcatgagccaggaccttcctcagccacatctggatcctcagcccctcacagcacacagcggtagtcagaaagtatgctgagtaagtggagaatcaaaacaattccattgctagtctgacatcgtggttgtgaaaatcagtcgacgc

SEQ ID NO: 274986 - DNA, 605 bp, Homo sapiens
tctggcagaaagcaggcgagcctgggccggcgcggggccttgtgggagggcttaaggaagtaaaatggcggacctggcgaacgaaggtaggggaggcgccgttggggaccggctggcggccggggaacgggcggcgggaggactaggggccacaagcccttggggggagcaccgcagagtgcaagggtttcgtccgctccaggctagcgccgtggcgggccttgcagccgccccctattgcgtcccctcaggccgggctcaccggcccggcccatcactcccggcaaccccagccactgcagccgtctggctagaggagccgggtggccatcgggatcgcagccctaaggcccctctgcgtcgcagccaagctcggggctgaagggggcgggaggcgcggccccagtgcttcggccacggatgtaaatagaccttagggcctggttgtggcccggagcgcgccacgctccctccccgccccctcgtcctccgccacccggcatctccccttccccggcctggctgcctatctcctaagcccgtgaggccctcgtcctccgcgggccagccgcacaccgcggacggaggaagcccaggccgttttc

SEQ ID NO: 274987 - DNA, 598 bp, Homo sapiens
tctggcagaaagcaggcgagcctgggccggcgcggggccttgtgggagggcttaaggaagtaaaatggcggacctggcgaacgaagaaaagcctgccattgctccgcccgtctttgtgtttcagaaggataaaggacaaaagtcccctgcagagcaaaaaaacttgtcggattcgggagaggagcctcggggggaggctgaggccccccaccatggcacgggtcaccccgagtcagctggcgagcatgccctagaacctcctgcccctgctggcgcctcagccagcactcctccgcctcccgctcctgaagcccagcttcctccttttccgcgagaactggcaggggaagaagaaaagactcttcctttgaacccagaaggaatcccctgagccctttatctttgtattaagaagccttttgaagattataggtggagaagattgtgaactctcaagaacaagaaatgtcttgggtttttgaagtttgataaattgggaaagaggtcagctggcggctccagtcctgaaggcggagaagattctgacagataagatggaaattactgccctcctgtcaagcgagaaagaacatcctct

SEQ ID NO: 274988 - DNA, 430 bp, Homo sapiens
attcaaatttctttctatttggatattttcacctcccttatagttcaagataattgttcacttttggggttaatggctattcatttattctcccagtgatcgtaatctagagggacctaggaggggaaaatactcagagaataatggcatttgctcagctttataaagaaacacaatcatatgttgtattgattctttgcagtttaaaaaatatttgacagagggaactgtaaaaatctttcctcttgtcagttgtaagaactggaattttaacattctcttctcacagaatcaatgtgaaaaacatgaaaatttaataccagttggcagtaaaatctcactttatttaactgagaattttacattgagtatgatgagatcatgtacctcaaaataatgttagtatatgacagaaattaaaaatgatggt

SEQ ID NO: 274989 - DNA, 395 bp, Homo sapiens
atggtcccatctatcctgcttgtgttcactgccatttaaaatacaaacatttactactttccaaacaactctcgacactaagatgctttccttttctcccagtttcagttaccactttttagtcaaaaactcaaaacgattatctaccctattcttaccataaattccgaatgtctttcatacacacacgatttaatcgtgtgtgcccagatctcttttttactttctcatccagaacattactttcaggggaatttctccatcagttaaaatggttttttgaacttttggattctgccaaataaagtaacgtgttttaaaaacaaagctaaagagtttcctctatacttcaaagacacatgaccatcatagtttcattcttgatggactgagcc

SEQ ID NO: 274990 - DNA, 202 bp, Homo sapiens
acctcttacatagtcccattcttagatgctggagatcaggatttcaacatgtgaatttttgggggtcataattcagtgcacaatagcaagtgaagctttattcccggtggtggcagcaggcagaggtgtggacagacctcttgagaatcaccagctttccatagccgttccagctacagcggtgcaaaaaaggccccctgct

SEQ ID NO: 274991 - DNA, 418 bp, Homo sapiens
ccaggccaaaccacgtccctgtccgtgacttcgcacctggcctttcagcaccaggtgtctgcacagctcttggctgcacctgcactctgagtcattgcaggcaccaaacccaagccctgtaccttcaccctacacctgagccccttcctcaggagctgtgctgcctcctcagaactcaatttcatctcatcagactctgcccctagcaggtcctctgctccgtgctgccacaccctgcccagtgcgcccattcaggacagaagtcagtcctcgcaggcttgtccctgggtggcaggtgacaggcgctgggccacggcagagagcacatgtcaaccgcagtccccgtgttatccaggaggaagcgaagaaaacactgggcaggtccacagttaaactgcaactctctaacaagaagtgg

SEQ ID NO: 274992 - DNA, 434 bp, Homo sapiens
agtgctgggattacaggtgtgagccacggcactcggcccaagtacttcttaactgcaggacttctcagaggcttttaatatggtaatgagtgctgtgcagtgagatgactcaaatcaatatatagccaacacgtttgatatgaccacagaacccatttccctgaacactttttatcacctcctagagcaggggtcagaaaactactgcccatgtggtctgatctggccactgcttgttttcgtaaattttcactgcccacagccaacctcatttgtgtacatgccgtccatggctgctttcacactgcagccgcagcgatgagtcatgagacacgcacccgtggctcacaaagtctaaaatatttactctttggccctttacggaaaacgtgtacaaactttgtcctctgaaatatagtttgggaacctacttc

SEQ ID NO: 274993 - DNA, 510 bp, Homo sapiens
tcaaagatttttagaaaggctaatacttataagtattagcacattaatgcctgtcacatagtgctcagtcatttttattaataatagtaatattattgccttaaaggtataaaagcagtattttcccaagtggtttctttctggaaatgtagttatttactgttaattgtatcttttgacttgatagcaacatttacatcataattattcttgaattgttggcagaagcaccatgcccgtcatttattggctgcctccgactctggttttagttacactcaatttaataaattgatggggcatatccaagtcctcaccattttaacaatttgtgctaacgcatttgaaaaaaattttacttccaacctctaaatccattatctctgttaacaggaggcatttctgaacacagtaccaaggctcattttacctttttacaatgctttcttaatgtttgacctttatcagagttatgtttaaagaaacattaaaaatttaatgttaatgaaa

SEQ ID NO: 274994 - DNA, 377 bp, Homo sapiens
gccctgggccacagcaggaagccagcaggtctggtgggcacccctggaactcactggagttgaggcctggtcctgatgctcattccgacacctgaagcctgattagcttggcaagtctagctccctcttgcacgagctgagcgacgcagcagggcgaggcctggcccgtgcccaacgctgacgcttccgcctggtccagctggtgacaacgtatgagacacctaggcctgtggccggctgccaggaaaggagggaacctagactgctgttcaccatctgaataccccgtgacttaccagcaagcaggccactctctcacacctccaccagggtcgcctcccagataatccttctcagtcataaggaggaactcttga

SEQ ID NO: 274995 - DNA, 379 bp, Homo sapiens
gcccagcccctcctttctttccagaagcccaccagtggcccagagtggaagggtgggagtcagaccagtccaaggttgctaattaagactggactgccaggcacggtggctcatgcctgtaatcccagcactttgggaggctgaggcgggcagatcacctgaggtcagaagtttgagaccagcctggccaacatggtgaaaccccgtctttactaaaaataaaaaaattggctgggtgtggtggcacgcacctgtaatgccagctactcaggaggctgaggcaggagaattgcttgaacctgggagacggaggttgcagtgagccgagatttggccactgcactccagcctgggtgacagagtgagactccgtgtcaaa

SEQ ID NO: 274996 - DNA, 281 bp, Homo sapiens
cactccattaccgcaagatgaagatgaggaaactgaggcacagagaggctgagggagttgcctgaagtcatatggtgaggaagtggtggaggtgagatggtagccacatgtctgtctctaggaactctcaggggactcccctgcagacagacaatgctgcatgtagtccaactgatcccttggctggctttactgtgacatctttaaaccgttcacccagcgcccaggtgacgtgtcttgggccactagccactgtgggttgggttttgctggaagccacc

SEQ ID NO: 274997 - DNA, 199 bp, Homo sapiens
ctgggagactgaggtgggaggttctcttcacccagggagatcgagactacactggtgagcagtgatcgccccactgcactctagcctaggtggcacagcaagaccctgtctaaaaagaaaaaaggaaaagaaaacctagtaagccaagaaattgcaacatttattctggtattttcagaagtttggaaactgaagcagt

SEQ ID NO: 274998 - DNA, 277 bp, Homo sapiens
aaaagaaaatctcccattccatctcatggaacacgttgtctttggggtacctagatattagtgttagttcaggctctgctggggtggccaatatctggtttactggtggcaatttcatacgagtctgcagcaacgtcaagtcttgcctccccagaggaaggaattcaactgaggggcatacgtaagaagagactcaaggaggttctgagcaggatggagtttattaaaagagagcaggaagaaaggagagactttattggagtctcttgaagacact

SEQ ID NO: 274999 - DNA, 390 bp, Homo sapiens
aaaaaggaaagtttagaagctagcatgatgctgaaaacacaatctggtaagattaatctgaaacaacctacagatcactgtcactcatgaaaataaatataaaaatcctaaagtattagcaaatttagttgagcagtattgtttacgtttaggacaccttgaccaagtaaagatgatttttaagaaagtaagtttattgtaatattaagactttaattagtaaaatatattatcagtagatcaaagggacaaaaccaaatgatcatctcagtaaatgccatgacaagatttcataaaaatcatatcagtgtagaaaaatttttaaggaacacaggaatatttcctgaacaagctaagtattatctagctcaaatcaatagccaacatcat

SEQ ID NO: 275000 - DNA, 346 bp, Homo sapiens
ttgaaggcttgtctgggctggaggtctatttccaaggtgaatcactcacatacctggcacgtttctgtcaggtattggcagtcgtcagttcctctcctctcaggcctctccacaggctgcttgagtgtcctcatgacacaacagttggcttactccagagtgagcaactcaagagagagcaaggcagaagctaccaaatctttatgtttgaagtcatgcaccatcttttccacgagtatcctgttgattattttgatcagcttgttcagtctgggagggaattgcacaagggcatgaatactccactggcaaggatcattgggggccatcttggaagctgtgtgaa

SEQ ID NO: 275001 - DNA, 442 bp, Homo sapiens
atttgttacaaaaaaaatttagtcttaatgtttcccttggggaaaaatttctcagaccatgaaaaccgaaacagacagacacttacacacacacacacacacacacacacccacacccacacccacacccactcttctttattttatcaggcccttctgggaaatattgttaacaaaaatactaaacttgagtcagaaaactagtctcagcctcaatactcaccaagtatatgacttatggatatcttttaatatcaaacaacctccatttccttacttgcaaattaaaaaaactttttattttgttcacctcagaaagttactatgaggattaataagtatgtatcatttacaagttatgaaaagctatgcacgtggcagttacatattttaagcaacccgaaattagttggcagtaaacaccataaatgccagcattgca

SEQ ID NO: 275002 - DNA, 435 bp, Homo sapiens
gtttttcttaatattttgtgaattttcatgataaatgagtatcttttaacagtaccccatctctaatggataaatactatagatgtatagtagtatgtgaatttgccatcatttgtttaaatgatttgtctatagttttcaattttttattataaaagttctactatgaatatcattatagttgaatttttccatgcatccttaattatttctgtaggataaattccaaaaagtagaattacttcattctgtacattttaatattttttggtgtatatgacttagaaagtgaaagtccatttccccaaggacagccaccatcaaaatcaatctttgtctagccttttcctgtatatatcctaacataaataactatatatattatttatataaaacctacatataaataattttatatagctgtttctgtctctt

SEQ ID NO: 275003 - DNA, 1744 bp, Homo sapiens
  misc_feature (313)..(313): n is a, c, g, or t
cccctagtttgctacttttagctgaatctgataattgcatggaaaaagttggaatgcaggataacaatgtcatccaagggaccccgtcccttttctggcctgctcatcatacagtggttttctagggagatttctccagctaaaatgcagacattactggtaagggtaacagaagtcaagttttgagcagcaaaccttgtggtaaggattactttatcagctcaatttccaatgcgaacagctggctaagagcagtgcctcccaacaacaggacacaggactggtagggcagtgggcatgggaagcttgggtnggatagaataatgagggagtgggcacaaggatgcactaggcagggttcactccctttcctgggcttcctcctgtttatgagaaagttaatcaggaaagaaggatacttactgcatgagggagtgggtgttactgaacactgtctgggtcagagacatgattattttgagaaaataacgactcagaattaaaaggctactttatttccaccaaagtcaaacataaaaactagtgataattaaaatgaaggagcataaatttattacatagtatattaattcaccgcaagaatagatttataggtgttgtcatgtcttttgtttttagggggtgaattttcaaaagagaggttaatgagaccacataaaatggtcgtatgaaaaatgtttttgccttctttggtaaaactgctctggggacagtgttcattattttcaattttccttttataaagatccaaatgatagggtcatgagttcaaggccaggaacaagttgatttttttcctgaatagtatgatttaatttattagataataagatacacgttaccatatgtagccccctcctctctttcttgctttctctctgtgtggctggaaggtaaatgaatgcatcagagggacttaagacctaaagaaattatttagggctgctgcttcctggaatatctctcataagaactgtaattaaataaagtaataagttatccccatgaaagattattttcaagtccaaagcagtatattctggtggcagctaattgatgattctgtttcaaagagtatagttttgtgaatattttgttctcttcttatgaaagcctaaaaagtgattcttttcccacgaagacacttttgcttcgatcctttccagtggtttgccaggaggtgggttggcctgcctaaccttagcctgcatgtccgagggaaggaagtaccagttcaggagctcagcagagggcagagctggggttagatttcatcctcaggtcctggagttactaaatgctagggttgaaaaggactcagtgaggaacttgaggcccagaaagggaaagtgctcatacatatgcacataatttttagtggccaacaagaacttttgccatttgattctacattcaggcacttttttggtgccatgtggtgttttcatcataaaagaggttgaaattgcagagtaatttctactgaactgtggtcagttcaccaaggcacatgcctgtaggactggagactcacatgaggtagtgtctgattgagagtcctggaggcagttagacttctttaaggatggatggcagagagatggggattcctgcttagttaatctgacttttatattctcttattattgatttgatagaataaatatttaaactttatgttctactaataaattatggtgtatcctagttaggaaaaaaggaa

SEQ ID NO: 275004 - DNA, 227 bp, Homo sapiens
cagtccccatcccaggaggaattgttctaatgcatagaattgaacagcaaatttcctaaaacataagccttcaaagatatgataaatgtggccggatgcagtggctcacgcctgtaatcccagcactttggggggccaaggccggcaaatcacttgaggctaagagtttgagaacagcctggccaacacggtgaaaccccgtctctgctaaaaatacaaaaattagc

SEQ ID NO: 275005 - DNA, 340 bp, Homo sapiens
gtcataaacataagggagattccaaaaagagtgtgtgctttgcgactgaagtcagtcacataaatcccccagtggaatacttatatgtgcagatagaatttgctgtagatatcaaaagtcagctatgacagttttagaagaaaagaaaattcaaaaaggatattacgttttgacactatccagccaaattatatttgaagtggcttaagagtcaaagagtttccacattttaagaaatttttatatgttttgtgccacatctatgatctgactagattaggaaaagcagcaaatggatttgggaaagagaggacactagggaatttgaaaatggaaattt

SEQ ID NO: 275006 - DNA, 240 bp, Homo sapiens
gcatatgcagcaatattaacacttaaaaattagaattgagtccaaaaatgtatcataagtgacaaagaaggacaatatatgaagtaaaaaatgacaagaacaagaacaagaaagtataacaatcatgagcatatattcacctaataatatagactttaaatatgtcaaacaataacaaacagaatgtaatagacttaaataaatcaataactggagttagagatttaagcaaacacttct

SEQ ID NO: 275007 - DNA, 1150 bp, Homo sapiens
cggtctgggcagcttctagacgccgttcacgcagctgtcctggccggggcctccgccgggctctgcgccttccagcccgaaaaggacgagctgcttgcgtcgctggagaagacgatccgcccggacgtggaccagctgctgcggcagcgggcgcgtgtggcggggcggctgaggacggatatcaggggaccgctcgagtcgtgcctgcgccgggaggtggacccgcagctgccccgggtcgtgcagaccctgctgcgcaccgtggaagcctcgctcgaggcggtgcggaccctcctggctcaaggcatggaccgactgtcccaccgcctgcgccagagcccctcgggcacgcggctgcgcagggaggtttactcatttggggagatgccgtgggacttggcgctgatgcagacatgctaccgtgaggccgagcggagccgggggcgcttggggcagctggcagcaccgtttggctttctggggatgcagagcctcgtgtttggggcccaagatcttgcacagcagctcatggctgacgccgtggccaccttcctgcagctggctgaccagtgtctgacgacggccctcaactgtgaccaggctgcccagaggctggagagagtcagggggcgcgtgctgaaggtgtgttctgtgggtacggggtggcatggggtggcagtgggcctgggtgctcagatggttgctggacgcaccgctgggtgtgttgtgcagaaattcaaatcggacagcgggttggcgcagaggaggttcatccgaggctggggtctctgcatctttttaccttttgtgctgagccaactcgagccaggctgcaaaaaggtgagttaatgggaagtgtgcaagagggtctgacagcatcaccatgcatccacttaaagtgggcaagaatgctctttgaggctgggcgcagtggctcatgcctgtaatcccagcaatttgggaggccaaggcaggcagatcacaaggtcaggagttcgagactagcctggctaacatagtgaaaccctgtctctactaaaaatacaaaaaattagccaggcatggtgatgggcgcctgtaattccagctactcaggaggctgaagcaggaaaatcgcttgaacccgggaggggaaggttgcagtgagccg

SEQ ID NO: 275008 - DNA, 1215 bp, Homo sapiens
ggaggggcgggggtaaaggctgatacatgggcagcggtgggccaaggtggcccctacaaagacccaggtgggaatcctgactgggcccgcccctccgaggctcagttttctcatcattacaatgggtagaagagggcgctcagcgtccctgctcgcgtccccctcgcgagggcccctgcacatccccatctgtgaggcaccttgcggaggggactccagaccagtgtcttccactcccagcggatatcaggggaccgctcgagtcgtgcctgcgccgggaggtggacccgcagctgccccgggtcgtgcagaccctgctgcgcaccgtggaagcctcgctcgaggcggtgcggaccctcctggctcaaggcatggaccgactgtcccaccgcctgcgccagagcccctcgggcacgcggctgcgcagggaggtttactcatttggggagatgccgtgggacttggcgctgatgcagacatgctaccgtgaggccgagcggagccgggggcgcttggggcagctggcagcaccgtttggctttctggggatgcagagcctcgtgtttggggcccaagatcttgcacagcagctcatggctgacgccgtggccaccttcctgcagctggctgaccagtgtctgacgacggccctcaactgtgaccaggctgcccagaggctggagagagtcagggggcgcgtgctgaaggtgtgttctgtgggtacggggtggcatggggtggcagtgggcctgggtgctcagatggttgctggacgcaccgctgggtgtgttgtgcagaaattcaaatcggacagcgggttggcgcagaggaggttcatccgaggctggggtctctgcatctttttaccttttgtgctgagccaactcgagccaggctgcaaaaaggtgagttaatgggaagtgtgcaagagggtctgacagcatcaccatgcatccacttaaagtgggcaagaatgctctttgaggctgggcgcagtggctcatgcctgtaatcccagcaatttgggaggccaaggcaggcagatcacaaggtcaggagttcgagactagcctggctaacatagtgaaaccctgtctctactaaaaatacaaaaaattagccaggcatggtgatgggcgcctgtaattccagctactcaggaggctgaagcaggaaaatcgcttgaacccgggaggggaaggttgcagtgagccg

SEQ ID NO: 275009 - DNA, 197 bp, Homo sapiens
ctagtgttctttcttagaggctgtactcaaagtttcattatccattcagtatttttattcttctttgtggaggtggcaagtgctaggtgcctctagtcaatcatcttgaagccccctgttatgttaaagtctttaatggaaaaagaagacaacatgcatgaccaggcagatactttgagcagagtcataggaactgc

SEQ ID NO: 275010 - DNA, 411 bp, Homo sapiens
tcttaccacatgaaaaacagcatggagcatcccagccacatcaaaggcacggtttgagccttgggctgtagaggctcagagagagtgacaaataagaccctggtgagagaccaatggggacagtatttccagactttggcatgaaacagatttctgagcacctcatgaaatgtctgcaagggcagctcctcagagtgaccctcccaaatcaatcaaagctggccccctatcttaattatgacttacaaatagaagcatgcacctggctggatgcagtttgccacatggtttacaatagcggtagaataagaaataacttaccaaacgagtacattttcttggctggctggggcactcagagttgacactggtaaggctccattaaaatgcctttatgttctgatatacaca

SEQ ID NO: 275011 - DNA, 612 bp, Homo sapiens
ccataatgggtgaaagagtgagactctgtctcttaaaaaaaaaaaaaaaaaagtggcagtgacatgattcaagaccatctgcttccaaagatcatgctggactttaaagggagtggtaaagagcacagggtgtatgtacatcagatgtttaaatgcttactagctgtattactttgggcaaggtgattaacttccctaagtcatagttttctcacttaaaaagaaaaatacaatatctgctttactggatagctgtgagaataaaatgcaataaagatgataaaagtccgtggcacagagtaaatactcaataaatgagaactgctattattgtcattattataatagtcatgacatcattcaaacttttggctaaataaaaatcatactagatgtttcttgtacataatcaaacattccctatatacattccttttatctgttaagatttagtgacaaattttatgttcttggatatagtttattaactgctaaaacaaagcacaacagaaaaatatattctgtgaatatattttcccagatacaacatttctggaaggacagacggagtggttttctctggcccagttgggcaatggcatgttctgattg

SEQ ID NO: 275012 - DNA, 332 bp, Homo sapiens
cctcagggagcttttactggtagcgaaggtgaagtgggagcaggcatatcacatggtgaaagcaggagcaagatgagagagagtaaggtgggtacagtataccacacacttttaaacaaccagatcttatgagaactcactatcacaaagacagcaccaagccatgaaggactgccaccaagagccaaaccacctcccaccaagcccccacctccagcattgggaactacaactcaattcaatatgagatatagatggggacaaaaattcaaactatacatttagcctgtaatctctcattctggagactgcattatctgatgtttatatag

SEQ ID NO: 275013 - DNA, 362 bp, Homo sapiens
cgtccttcacatggcagcaagagagagaagtgccaagcaaagaggggaaaagtcccttataaaatcgtcagatctcgtgagaactcactcactatcaggagaacagcagcacgggcgtaaccgcatgggtggggacacagccaaaccatatcaattactatttaattccattgtggtttcagagtatacatatgatttctattcttttaaatttgctaaggtgtgttttatgtcccagattgtggtctatcttggtggatgttccatgtgagcttgagaagaatatattgttggatgaagtattcagtaaatatcaattagatccagttgattgatggtgctgttcaattcaactatatcct

SEQ ID NO: 275014 - DNA, 467 bp, Homo sapiens
ctcctgcgtcgaagtattcctctgtagcccaggctggagtgcagtggcaggatctcagctcactgcaagctccgccttctgggttcacaccattctcctgcctcagcctcccaagcagctgggactacaggcacctgccaccacgccgggctaattttttgtattttaatagagacagggtttcaccatgttagccaggatggtctctgtctcctgacctcctgatccgcccaccttggcctcccaaagtgctgggattatagtcgtgagccaccgcgcccagccaatttttttgtattagagatggggtttcactgtgttagccaggatggtctcgatctcctgacctcgtgatccgtccgccgtcatctcttgaactgccatctgtcagctaagtctaaggttttatgcttaaccatttgtggtgtactagctggactagcttcaggaatgtcagtgttttctac

SEQ ID NO: 275015 - DNA, 408 bp, Homo sapiens
tgcactttcaggggggtttatttctgaaggcggaaggcaggcctcgaaccccaggtgttcttgctggtggaggaaagtggaaaacacgcaggctttgtgggaagaaaggacgccactcctcctcccgtggattgcctgtggagctgggacaggcagcttgccactcttgtcaggatgactgtggaaggtgatgtctagaagagagagcaggagcacaggcgcccctcttcagcttggttttgcactaaagggacagcagaacccagagggcctggctctgtcagcccagcctccagtgccttccgaaaggaaaaaccacgcgtggtacgtaggcacacacgcacgccgcaccacatgctttttattgaagtatacgtgtgctacagaccatttaagtacagaaaagct

SEQ ID NO: 275016 - DNA, 542 bp, Homo sapiens
  misc_feature (26)..(26): n is a, c, g, or t
  misc_feature (32)..(32): n is a, c, g, or t
gaaatcatcatgggctataagatcangatgcnaccaatatcctggtgtctccactggtctatctatatcctgacattcccaaggagaggcattcggaaagtattgtcggccagagagccaggagcatcctgaagctgacccaggtagcgctgccccatacctgaagaccaagtttatctgtgtgacaccaacgacctgcagcaataccattgacctgccgatgtccccccgcactttagattcattgatgcagtttggaaataatggtgaaggtgctgaaccctcagcaggagggcagtttgagtccctcacctttgacatggagttgacctcggagtgcgctacctcccccatgtgaggagctgagaacggaagctgcagaaagatacgactgaggcgcctacctgcattctgccacccctcacacagccaaaccccagatcatctgaaactactaactttgtggttccagattttttttaatctcctacttctgctatctttgagcaatctgggcacttttaaaaatagagaaatgagtg

SEQ ID NO: 275017 - DNA, 492 bp, Homo sapiens
  misc_feature (26)..(26): n is a, c, g, or t
  misc_feature (32)..(32): n is a, c, g, or t
gaaatcatcatgggctataagatcangatgcnaccaatatcctggtgtctccactggtctatctatatcctgacattcccaaggagaggcattcggaaagtattgtcggccagagagccaggagcatcctgaagctgacccaggtagcgctgccccatacctgaagaccaagtttatctgtgtgacaccattcattgatgcagtttggaaataatggtgaaggtgctgaaccctcagcaggagggcagtttgagtccctcacctttgacatggagttgacctcggagtgcgctacctcccccatgtgaggagctgagaacggaagctgcagaaagatacgactgaggcgcctacctgcattctgccacccctcacacagccaaaccccagatcatctgaaactactaactttgtggttccagattttttttaatctcctacttctgctatctttgagcaatctgggcacttttaaaaatagagaaatgagtg

SEQ ID NO: 275018 - DNA, 258 bp, Homo sapiens
gagctcgcaccaatgtatagatatgagttggagataaaaaattcctatcacctaataacattgtagccatcataatgtgttagtgaaatgaattactcaagtgtttatggtgattgctggtgtaaacaagcctgctgcactaccagttgtataaaagtctagcccatacaattatatacagtacataatacttgatattgataagacatgactgtgttactggttatgtatttactatactatactatttttttgaga

SEQ ID NO: 275019 - DNA, 491 bp, Homo sapiens
gaggtgctcttccgtttctggtgtctgtagccatctccagtggtagctgcagtgataataatgctgcagtgccgacagttctggaaggagcaacaacagtgatttcagcagcagcagtattgcgggatccccacgatggagcaagggaaataattctggaagcaatgacaatatcagctgtggctatagcagctgagatgtgagttctcacggtggcagcttcaaggacagtagtgatggtccaatggcgcccagacctagaaatgcacatttcctcagcaccggctccagatgctgagcttggacagctgacgccttggatcatctgccactgatctctggtcaacatttttatcacccaacacaaaagaagcagagatttatcaagttacttaaacaacctgaccctttcatcttttgctacacatactcttgtaattgatctctccatgaattgttttctgtttaaaatatctagaatgttttctgct

SEQ ID NO: 275020 - DNA, 310 bp, Homo sapiens
agacatcctctgagaatcgcttgatatccaggaggcagaggctgcagtgggccagatggtccactgcactccagccttgttactgtgtgaaaaacctcctgtggctaactcctggaaagattacaaaagcgccagcatcaaaatgcttcacatcagacaaaagacaatctttctttacttgctgggatatagctcccccactacactctcagcaacaaagaacagtaattcatttttttaaaaaaatcttcatatcctctaacatagaacggtgactggtacgcaacagatatttgatctgtgttaattt

SEQ ID NO: 275021 - DNA, 319 bp, Homo sapiens
gtacatgtgcacaacgagcaggttagttacatatgtatacatgtgccatgttggtgtgctgcacccagtaactcgtcatttaacattaggtatctctccaaatgctatcccgcccccctccccccaacatccctgcattttcaaacttcttagatagttttcaaaatatttctgtaaacaaccataattttacctaatccgaaaacatcttttataagtgaatttaaccaattcgtatttactatgcttagtgatgtgtcattttattttgtgtttcctacttataatatgttcctgtcttctctccattctttatctg

SEQ ID NO: 275022 - DNA, 670 bp, Homo sapiens
atgaaaggcagtctaccaccttttcagttactagaacaaagtattctgtttttccctgaatactgtctggtatccatgaagtggtattccacttttatgtggaaaagaaagatgggtagtgttggcttgaacaatgtatgtattcctctcctatattattcgataaattatttctgggtttacccagctttgcaaaaatgtacttgcccagagtcattgttggtgaatagttaatacagaatgccatctttgttcattttgtaacctgcttgggattctgaaattatcttaactgatttcatgattaaatcaatgcagtttcttaaaactggaatttaagaacttgggagaaaactcgggtttctcagactactggtaaagcaagtagccacaaattgcgggctttctgagctgtgttatgacttcctatacctttcggagccctgactttgctatttcaccgacctgccctctaatttttactattgtgaagatatcaagagggaaattaactgtagagggatttaggttttgtcaggttgctgacaaagcaatgtaaagatgtattttgtgtcttgtcaataaagcatgtttagcggaatattagatttgtgtgccgtatacaatatcagtattaaatacgtgatgggcttactaacatccctataaa

SEQ ID NO: 275023 - DNA, 268 bp, Homo sapiens
cctctgctgaccctcccgatgtaccagatgaagagactgggtcagtaacgcaaggaggtgatgtggacattcactacccagcattttgttcatcgtgcagcttttataaactgtccaaagcaaggttcagaaaaggcaggattttgcaaaaatctcacatcagtttcatctaggacgtgtggacatcacagtgattgggatgatgggctggctgacccttggtggttctcaacaatttccaggatgttgcatttatttatccatgaca

SEQ ID NO: 275024 - DNA, 334 bp, Homo sapiens
aaaaagcaacggtgaattcttgagcagagaatacttgcagaaatgtgggatgatagacattagttacccccaagagtgagagggccaaggctattgtagtggtctgaggaaatggaattcagagtctcagtggatgccaaaccatctagaaaatggttcttgttaccttggcaatggaagtcaaaccttaactaatgatcttttactgagaaaactcacaagcaaatgaagtgaagagtaattggagtcaggctatacattgcttccttagtttcaccttgcatgacagcttggaaagcagtttggacataaaaaatgattatctcaagcctcc

SEQ ID NO: 275025 - DNA, 387 bp, Homo sapiens
gatggaatgccaaacacatttttagaaaacataaactattaaatagtgattacattcatgggtttttactacaaaagctttttaaatttgtaatgaaactgtaaaaggaaatctttagctcattgacctaattattattccgaaaactatatatattagaaaatattttctaagtttaaaacaactctggactttcactaatgttttctgatcaattgatattcatgaaattctaaaatgattgttgttttttaaaatgttattttaggctgggcactgtggctcacgcctataatccttgcactttgggaggccgaggcaagtggatcatttgatgccaggggatcaagaccagcctggccaacatggtgaaaccctgtctttact

SEQ ID NO: 275026 - DNA, 267 bp, Homo sapiens
ggatattaacactttatcagatatgtggtttgcaaatatttcttccagtctgtaggttcccctttcattttgttggttgttcctttgctgtgcagaagctttttagtttgatgcagtcctccttgtttatgtttacatttgtagcctggcttgtggtgcgatatccaaaaaattattgctaaggccaatgtcaagaggctttccccctatgttttcttctaggagttttatggtttcaggtcttatttgggtctttggtcttgtatc

SEQ ID NO: 275027 - DNA, 443 bp, Homo sapiens
gttaattggcaaggtaacatgtgtctccctatagagcactgtgaattatttctttgcattcctccatagacatttaaagaactgacacattagtcaaataaaaggaaaaacagaaagcaactccatgggttgaacttcagtttggcaattggaaattccaatctgactaccaggaaaaagaaagagagtgggcaagatagtatttcatgagacccaagcaatggtatcatgttttgctttggtttcgttttgatttcaccacttgcacacaatagagcagaagggggaggaagacatggagttgaagagatgatgtaccagaggacaaaaaaaaagagagaacatgtagtaacaattagttataactagcatttttataaaattttacaatttgcaatttgtttaaaatattttatttcactttattctatacctcaccaccc

SEQ ID NO: 275028 - DNA, 140 bp, Homo sapiens
tgcagtgagccgagatcgcaccactgcactccagcatgggcgacagagtgagactccatctcaacaaaacaaaaactacaaaaaaaccatgtgcctgcattcaaagatttggtttggcaataattttcaagctatttttc

SEQ ID NO: 275029 - DNA, 168 bp, Homo sapiens
tgagagctgatgagactggctggaaaagatctctttggtactgagaaacagccgcctgaacttttcagtgttgctgcaatgggtgggtctttctctggcctccctaagctgttcaccttccccaccctgccacaggcaatactttccttctctacttttcctttccta

SEQ ID NO: 275030 - DNA, 298 bp, Homo sapiens
atagcttcactttaggttttaaatacactacggaagttcatgaaagatagttttaccatttttgttgtgttatgtgagaagccaatgagtgcacctcattttccagaataagtgtgttcctaattagtgaagtacaatgtgtacattataaaattaaaataatggactaaaatatccgtccccaagtaaaatttaaaatacatactaacatataacccaatttcaacatattaagtgaatatgtattcttaaaagatccactactttacatttagatgcgttaggatgtattagaaat

SEQ ID NO: 275031 - DNA, 327 bp, Homo sapiens
gtgctgctgcactccagcctcggtgacagagcaagagccagagtggggcgaggggagggcatggaatagttctttattagagttgaaatccgttttcctataatgtttgctcattgatcctagcagactgaatgaatccctttcatggcagtccttgggttatttatatgtaaatgaggggaatgctgcagtatagaacattccttctggatttcataagaaattgcaaataatctgttaccataactgtgttaacgagagctggctggcagatggatccctgcaagtaccatgggcactgtctttggttgaccctgttcagtcttc

SEQ ID NO: 275032 - DNA, 225 bp, Homo sapiens
ggtcaggactcagctatagttacaggcgcatactcctaagttaggttttcagtctttctacctattaagtgaggttgcagtttgtccacagggactcaaatctagaagtacagagtccttcccaggccatatttagttcactgtaacagttcctattatgacctcactgacagttctttttctctgaattctcctttcttctcaacagcttatccaaatgttccg

SEQ ID NO: 275033 - DNA, 582 bp, Homo sapiens
aagtgtgttattacggttggggggagcccaggtcccttctctactctgtttctggagagctttcacgaaacactcgtgcatttcccccagaaattgaggtcacagggcctggacatctggatttctccaaagccccagtggttctatgtggccaggaccaagaacccctggtggcataagcagtttgaaaaggcaggcaatgatctcctgggcccctaccgtaagagttcttgaagcaataagtggatctgcggcagggcccagattccatttccaggaagctcccgggggatgctgatgctgctggacagctgaccacacttggagtagcactgttatgactgatgatcagctaccgcagaccatggtaaaatgcagaagaaaacctaaactaagaaatgactgataacaagaaaccagtgcgttgagctcttggtatttccttaaatcttggtttgtattatatctggactggcttagtatgtaaaactactaattaagattcttagtaatttgcactattaatttagaaatgtaatagggtgcagtatgtactgctcaggtgatgagtgcaccaaaatc

SEQ ID NO: 275034 - DNA, 423 bp, Homo sapiens
agagcgactcagaaatggtttctgtgctgaggatctaaagccatgtctctgtggtcctgaagttggtatcttagtggaggacaccccattggacactttattgtgtagtctgtgtgacacatgccacatgagatctgtgcctaagatgctctggaaacactggccctggagctcctgggattgcttggtcacttctcactgtcgtaggacggtgattccaggactctcctcgagccaggctctatggagtaggagatcagagggtaaagtctatggctgcacttgtccctctcgtgtcatttaatcactctccacctagcctggtcagggaactgtcttttcttctcttagattggaagctccctccttgcaagtccccagtattttccaaccactgacttctcattgccccctccatgcagg

SEQ ID NO: 275035 - DNA, 417 bp, Homo sapiens
gggcacagtggctcacgcctgtaatcccagcacttagggagactgacgcaggcagatcacctgaggtcgggagttcgagaccagcctgaccaacatggagaaaccccgtctctactaacaatataaaaattagccgggcgtggtggcgcatgcctgtaatcccaagttgctgggactacagccatgtgccaccatgctcaactaatttttttgtatttttagtagagacggggttttgccatgttggccaggctggtcttgaactcctgacctcaagtgatccgcctgcctcggcctcctaaagtgttgggattctaggtgtgagccatggcacccagcctttatgtctgttcttgatttatcaatactgtcgttgcctcctcctgactctgtccaatgaattacttggaagcaaat

SEQ ID NO: 275036 - DNA, 291 bp, Homo sapiens
tgaaaagacctgaaggaaacgaggacactagccacagagatagctggggaagagtgttcctggaacaaggaacagcaagcgcaatggcccagaggcagcagcacatttgcaaaccttttcttaaagggccagatggtattttttggctttgtgggctgaatggtctctgtcaaaaccactcagctttgccactgcagcacccaagcagcctcagacaatacctaaatgaacatgtgtggctgttccaataaaactttatttacggacactaaaatttgaatttcatataat

SEQ ID NO: 275037 - DNA, 316 bp, Homo sapiens
gaactcctgacctcttgatccacctgcctcggcctcccaaagtgctgggattacaggcatgagccacggtgcctggccgccggcaggtttttaaagctaacattttatacaaaaaacagcttttctagtttcagtgagcacaaacaagctttaacttcagtggtaagtgggttactgatgtgcagctgctggtgatgttttaggggtaaccttacttgggagaaaggagatagaagtgaaatctgcaaactggcaaaatttgtaaaactgattctgaccttaattgtctctcatgcattccattttcttgcaacat

SEQ ID NO: 275038 - DNA, 382 bp, Homo sapiens
cgcgatctcagctcactacaagctccgcctcccgggatcgcgccattgcactccaaagtgagactctgtcttaaaaaaaaaaggatgaaaatcaggatcagtcaaaacagtcaagagacccacagagtgaggtctggcatggtccagccatgaggctcccgtgtccttgagctatgccatcctccttgtgggcggcaagccacccaggtgccgaggcaagagaccgagggcacgagctgttacagtataataaagaaaatatacagaataagaatagttatactggaactagaatatagatatgatgatatatgaatattaatcattagtttgtagcattactctttgttccaatattataataatctctgttctacaatta

SEQ ID NO: 275039 - DNA, 444 bp, Homo sapiens
tctccaccacacttgctgcagacgagggtccgggaccagacacgcccagagggccccagtgccctgtggttggggtggtgtttccttctgtctctctccctgatggggcacagctggaggcatctgctctgctctgaccattttttttttttttttttttttgagacagagtctcgctttatagccaggctggagtacaacgacaccatctcggctcactgcaagctccgcctcctgggttcacaccattctcctgcctcagcctcccgagtagctgggactacagccacccgccaccatgcccggctaatttttgtatttttcgtagagacggggtttcaccatgttagccaggatggtcttgatctcttgacctcatgatccgcgtgcctcagcctcccaaactgctgggattacagccgtgagccactgcgcccggcctgc

SEQ ID NO: 275040 - DNA, 468 bp, Homo sapiens
actgcatcacctaacttcgtttgcaggccactgctcactgtgtacataaccagcatcacaagcacagggactcaggaccgggcgctttctaatctcttcagtctctgggtctcctgcttccaggacagggctggagccaaggactcactctcaactgactgactgactgcgtggctgatgaagggaggagtgcatttttaaaaggagagtaagctgtccccaatacaccagtctaagaaatgacctcttttcctttctctacgtaaacttcatgtccttattcacaggcatataaaattacaaaatcatggtgtagacacacatttactccccgctctcctttctgtcatgaccctaatgatgcatttacctatacggaatcctcgggctctctcagacacaagcaaatacttctgatggcagagagaaaagtcaagacgtggtaagaaaatcagtgtccgggagcta

SEQ ID NO: 275041 - DNA, 474 bp, Homo sapiens
acaaagagtagaccacatatgacagtgatgacagtggccccataagatcataatactgtatttttactataccttttgtatgtttagatatgtttagatgcaaaaatgcttatcattgtgttacaattgcctacagtattcagtacagtaacatgctgtataggtttgtagcctgaaaacaataggctatactactatatttagcctaggtgtatggtagactataccctctaggtttgtgtaagtacactctatgatgtttgcatgatgtcaaagttgtctaacaacacatttctcagaatatattcctgttattaagcaacacatgactgtactgtgatataaagttaactattggccaggcatggtggctcacacctgtaatcccagcacttcggaaggctgaggtgggaggatcacttaagcctggcagtttgagaccagtccgggcaaaatagtgagactcatctctgc

SEQ ID NO: 275042 - DNA, 271 bp, Homo sapiens
gtatggatatgggttgtgttccaataaaactatttgcaaaatcaggtggtaggccagagttggctgggagggccacagtttgcagacgctgatggagaggaaaggactgagcatcttatcaaaactaccccccacctcacccccacccagggcacccatttgttgactgggctcttactgaaagccagtggctgatgctgcaacactggggcagcaggaggctcatgactgtgccctgccctggccctcgctttccaccatgattcccatt

SEQ ID NO: 275043 - DNA, 378 bp, Homo sapiens
ttcctaataacagcatcaatattcagaaaggttaccttttcataaggcattagcaatttgcatgttacatctatcaaaagagatgggtaaatgagctatatgggagtcaattacaatgtcgttcataatttattccatgtacaataaacagccgatcagatttcatgcgtgtttactttctgaaaagataactgcttgtggctgatactagttgcagaatacaaatatgtttcagagtaatgtgtttatctcactttgacattttaaatctccaaagttctctcactctctgtctttttttttttttttacaaagttgtctctgcttgaaaattagagcttgctctcaaaaataaaagatcattcttactggcctaac

SEQ ID NO: 275044 - DNA, 400 bp, Homo sapiens
gggcctcataaaagatgattaggtcatgtaggtgctgctttaatgcttggactgatgttattgttgtgggagtggattagttattgtgagcatgggttggttataaaagcaaggtcaaggctgggcgtggtgcctcatgcctgaaatcccagcactttgggaggccaaggtgggtggatcacctgaggtcgggagttcaagaccagcctgaccaacatggagaaaccacgtctatactaaaaatataaaattagctgggcatggtggcgcatgcctgtagtcccagctatttgggaggctgaggcagaagaattgctggaacccaggaggcagaggttgcggtgagccaagatcacgccattgcactccagcctgggcaacaagagtaaaactccatctg

SEQ ID NO: 275045 - DNA, 437 bp, Homo sapiens
caagccttgagttccctcaggagtctcatggtttatccatttttctgcctgccctggcttccttttctttgaaaacagaggaatttttctccaaaagtctgctagtagacttgagtttgaattataagagtttcttgattccagttctaaaattctaggaaaaggacactgattggcttagcatgggccatgtgcctgcctatagaccaattaagtactacaaggaaatgaatacaacagtaacaatatcttggctccggtgaccactcctggtggtcagtcagttgtatcctggaagtagggtcatagtgttgcagaatattgctccttagttcagctaaaactgggttcttgtcacacgaccaggaaaatttaggcacgcacacacactgaagggtgagtagaacaggattttattgggtgaaaagagaaaaaaa

SEQ ID NO: 275046 - DNA, 477 bp, Homo sapiens
ccacagatatagggatttcttgccctcttacaggcttttcctccaggattcctgccaaatactcacagggaagatcagggagaatcctgagaaagtttttcctgtgtcttggctggggtagaagaacaaaagccactgccaaaatctgcctagatatctctccatctccctaaggaacaaaagtcttaatctgcaggaagaaagtaacagaaagtgagactactggtggaaacccactgtaattggggaaggagaagaggaaaaagaaagaagatctactttcttgggaaaggaaatgaatgcctggtaggcctggcattgtgtttggaggaggatcaggaatgcttatgaaggccacaaccccaagacccaggttcacagtatctgcataatattgcaaattaatcagaatatcagaatacccccatttctcacctccttactataaagctaacaagcatcaaataaaaataacaa

SEQ ID NO: 275047 - DNA, 238 bp, Homo sapiens
gacgccacacctgtgctgcatgctactactcttaaccagggtcctgccccacctccctaagaagatcacattcagatgagctgaaggcagatccaatggtcgtcgattgagacagcattaatgcaatgtcagctgggttgatttctaaccacatcactgaaacactactaaaatcacaataaacgtgcttagacaacattacgtaatagtcaatatgctgagaagcaagactgtacat

SEQ ID NO: 275048 - DNA, 499 bp, Homo sapiens
caaagaagaatactatagacaagaagatttaagtcatgaatatctattaaccattaccttagcatcaaacttcataaagcaatcttccattataggaaatataaatataagcatgataaaacatattttaaagatttttgttgttcaaatttacctcagcccttgagaaataaatgttttctgtttttttaaaaaaagttatagaaaatctaaaaatcttaactattaaagaagaaactttgagctctatattataaaaaagataatatattttattttcaaagtccgtgcatttttcaaattcaccatatattaggtcacaaagagattcccaataaagtttaaacagtagaaatagaacagatgccattttctgatcataatgtaataaatttggaaatattattgaaataaaagaagaaatgagacttccgctttcagcaggattgcaaattagctgttctcaagaatcttcttgctgtaatacaattagatcctg

SEQ ID NO: 275049 - DNA, 765 bp, Homo sapiens
cttcaggtgagagctgcacttctttgctttgtttcagatgaatttcacaggggaacagggacaaagggcaggggttcttgactcccaaattggcttgggaacggcctctggggcctctttaccccagactttacagggcctgggcagggggccgaggccacccatatgctgctggtgattggctgactctggaccttgtccagtgtagaggaggggtggacccagacaagaacagcctggagtaagggcatcagattccaaacattactatgtagttgccccatttgggaagtttcgtagcaacaaatttgttgggttctttctcccctcccctggtttagaagcaaaccagagctggcagggttggtgcgtacaaaggactgtaataaacatacccggggaacaggcggctgcactctccagctattcagtgcgatttcacagcactgggacggcctcgttatggtgcaagctgttgtcctatacaaaggcagatgagataaatttctcccttttctccgctgaatggtctgtgaatgatactcgtcttggagtctgtcaaaagacaggaggttttgtttaccatttgtcttctttgtggactttgggggctctttctctttagagcgggcaaagacgaccaaagacgacgttgctatttaaccatttcggccctgcccccattgataacaatattaatttatcattttcccaaaccatctgtgatggataaagacattccaggagtctcccgtgaaccgaata

SEQ ID NO: 275050 - DNA, 194 bp, Homo sapiens
gacaagggtcctaatgggatgagatcctttcggatttaggcttttatacaaactcctgagaactggcaggttgacagccataaatggggtaccaaactttctactcattggattacaagttctcaggcatccagcctgggtgacagagcaagactccatctaaaaaaagaaagaaagaaagaaagaaaagctgg

SEQ ID NO: 275051 - DNA, 297 bp, Homo sapiens
aacaaaacagccagtgaaatggaaaataagaaatcatagagaaaatcaacaaaaccaaaagctggttctttgaagagattaataaaattgatgtgcttccagctaggctaactaaggaaaaaggatacgctaatattactaatagaagacatgaaagtagaaatcataacagatttccatttatattaaaaatataaaggaatattatgaacaactctgtgcccacgaatttgataacctagatgaaatggaccaattccttgaaggacgcaatctgccaaaagtcatacaagaagt

SEQ ID NO: 275052 - DNA, 1279 bp, Homo sapiens
caggaaaagaggaggagaaagaacactctaggcagagggcacagactaagccaagaccaagaagagagaaggcaggtgcatggggtgtggaggaagctattaatacaagcagttagatgttgctggaacgtcatgtgggaggcagggagaggtgaggggaggcaggtgatggaagggttcattttcctctccaggataggatagatgggggtttcaagagtacttttcaactagatggcagggaaaggtttctaagtcatgaagtagacaccaaaatctctggagggttcaaattgtgaactatgcttgaaatcatgggtgggctagacactggggaggcaggatttcctcttggagacaagttctcacatggtttgacttcatctattgccaataatatcctttctctccttcttccatagtaatagaatttttagcatcactaaaaggctacattttctttaacagcctatacttctcagccacctttccacttagatatggtcaatggatgtaactgggagaatttcacagaggctctgggacacctaaaaaacactcttttataccaaaagccattgaattgtgtaaacttgaaatggataagttgtacgctttgtaaattatatctcaataaagctcttgtaaaaaccttgcttttgactcctttgtgtacatcttttactacattgtgcttcctggaataaagatgtgatggctagtcctctagctgccatcttggactatgaggatgagggtcacaccccaagatggcagagcagtgaactggaaggagctggggcctggaggacttcactgaccaaagctgtctagccggtttttgggttacatatatctttggaatattttgcgaaatgaaaacaaatttctgttttctttgaaccactgctaatttgagtctctgttatttgctgctgaacttaaaccttgctgatacaacatttcattgggagtccattcttctggcttcctatgtccccctgtgtgtaacatgcagattcaggaaggaggcttcttcctgcacggactgcaatcccttgtgggccccaatgggctgtgtgacctctttgagccacattctatctgaaacatggagataattatattttctcacgctgcttactcatggaatcgagataatcaatgagctaatgcgtggggaagcacttggaaaattagaacgtgcttcataaacattatgcatggagttgttatcaccagctccctatctttttatgaacatgaacacgctagaaag

SEQ ID NO: 275053 - DNA, 435 bp, Homo sapiens
ttaaatacaaactatcttatatgaccatctattcaataactcagccatcccactcagcaccctcagcacacttggctgtagctggccaaagtgttgccacatgtcctacagacaactgccttggacagatgtttcttctacccccataatcccttctggacacagcccaagtcttccttccctcataaccggcttgattctgaccacttttgctttgatttttttccaatttaagatgtattcttcttggaaagatggtacaacattgatagaaagttttttttaccagctatcattccatcaccaagacccagtgggattcaattctggcttcacattggaatcccctgtgaagctgtaaagataccgatgcttgagtccctccactagattcggatttattggtctggggtgtgacctgagcatggaatttta

SEQ ID NO: 275054 - DNA, 769 bp, Homo sapiens
tcaaagacaggaaaaatgaaaagaaactgaagtggtctgaaaccatgactttcattttccttaagttcagagagtgaggtggctggagatacagcacgttgattatctgtgacacgatcagtcagaagcaggaccacatgaattctccatcagcaaacaaaatgactggctttctgtgtgattcttcacactgtgaatgcagctactaataacaccgattttacttcaggcaagagaaacagagcctctcattttcccttgagaataatgattgtttcttaatacttttctttttccccatttccttacagaggagttccctgtgcaagggaagcacatggtagggttaatgctacacggaacatgaactctgaagaccctcattttggtttccatgaaggtggtgaaggttctccaaataaaagcatttccaataagggtgaagagtagagagcagtgatgtttccaaaaagtttagaattcctccttcaaatgacttcctaatgaatatcagaaggcaatgtgtggagtcacaagtcattggaatggcacccactgtgtaatttcaacaaaacacttcatccctctgagcctctggtggctcatctgtaaattaaggcaaattctatcttcaaatttcttcactctttgatcaacaacttttattcaactttgttgaaaagaacaaaaaaattgcatctctggttgaatttggtggctctttttctggttaatataaaacgtgactgtcagaatcccatctctaaat

SEQ ID NO: 275055 - DNA, 587 bp, Homo sapiens
cagccgagtgtttccatgataccagccatacctgatgccaggagactcgctacacttggaagctcttcaaggtttaacagcctcccaggatgtcaactggaagatcatgccactcctgacaatgagaagaggagttccctgtgcaagggaagcacatggtagggttaatgctacacggaacatgaactctgaagaccctcattttggtttccatgaaggtggtgaaggttctccaaataaaagcatttccaataagggtgaagagtagagagcagtgatgtttccaaaaagtttagaattcctccttcaaatgacttcctaatgaatatcagaaggcaatgtgtggagtcacaagtcattggaatggcacccactgtgtaatttcaacaaaacacttcatccctctgagcctctggtggctcatctgtaaattaaggcaaattctatcttcaaatttcttcactctttgatcaacaacttttattcaactttgttgaaaagaacaaaaaaattgcatctctggttgaatttggtggctctttttctggttaatataaaacgtgactgtcagaatcccatctctaaat

SEQ ID NO: 275056 - DNA, 1509 bp, Homo sapiens
gcaatcaggtggagtcgagaggccggaggaggggcaggaggaaggggtgcggtcgcgatccggacccggagccagcgcggagcacctgcgcccgcggctgacaccttcgctcgcagtttgttcgcagtttactcgcacaccagtttcccccaccgcgctttggattagtgtgatctcagctcaaggcaaaggtgggatatcatggcatctatctgggttggacaccgaggaacagtaagagattatccagactttagcccatcagtggatgctgaagctattcagaaagcaatcagaggaattggaactgatgagaaaatgctcatcagcattctgactgagaggtcaaatgcacagcggcagctgattgttaaggaatatcaagcagcatatggaaaggagctgaaagatgacttgaagggtgatctctctggccactttgagcatctcatggtggccctagtgactccaccagcagtctttgatgcaaagcagctaaagaaatccatgaagggcgcgggaacaaacgaagatgccttgattgaaatcttaactaccaggacaagcaggcaaatgaaggatatctctcaagcctattatacagtatacaagaagagtcttggagatgacattagttccgaaacatctggtgacttccggaaagctctgttgactttggcagatggcagaagagatgaaagtctgaaagtggatgagcatctggccaaacaagatgcccagattctctataaagctggtgagaacagatggggcacggatgaagacaaattcactgagatcctgtgtttaaggagctttcctcaattaaaactaacatttgatgaatacagaaatatcagccaaaaggacattgtggacagcataaaaggagaattatctgggcattttgaagacttactgttggccatagttaattgtgtgaggaacacgccggcctttttagccgaaagactgcatcgagccttgaagggtattggaactgatgagtttactctgaaccgaataatggtgtccagatcagaaattgaccttttggacattcgaacagagttcaagaagcattatggctattccctatattcagcaattaaatcggatacttctggagactatgaaatcacactcttaaaaatctgtggtggagatgactgaaccaagaagataatctccaaaggtccacgatgggcttttccaacagctccaccttacttcttctcatactatttaagagaacaagcaaatataaacagcaacttgtgttcctaacaggaattttcattgttctataacaacaacaacaaaagcgattattattttagagcatctcatttataatgtagcagctcataaatgaaattgaaaatggtattaaagatctgcaactactatccaacttatatttctgctttcaaagttaagaatctttatagttctaatccattaaatataaagcaagataataaaaattgttgcttttgttaaaagtaa

SEQ ID NO: 275057 - DNA, 787 bp, Homo sapiens
  misc_feature (710)..(710): n is a, c, g, or t
  misc_feature (727)..(727): n is a, c, g, or t
  misc_feature (765)..(765): n is a, c, g, or t
gcaatcaggtggagtcgagaggccggaggaggggcaggaggaaggggtgcggtcgcgatccggacccggagccagcgcggagcacctgcgcccgcggctgacaccttcgctcgcagtttgttcgcagtttactcgcacaccagtttcccccaccgcgctttggattagtgtgatctcagctcaaggcaaaggtgggatatcatggcatctatctgggttggacaccgaggaacagtaagagattatccagactttagcccatcagtggatgctgaagctattcagaaagcaatcagaggaattggaactgatgagaaaatgctcatcagcattctgactgagaggtcaaatgcacagcggcagctgattgttaaggaatatcaagcagcatatggaaaggagctgaaagatgacttgaagggtgatctctctggccactttgagcatctcatggtggccctagtgactccaccagcagtctttgatgcaaagcagctaaagaaatccatgaagggcgcgggaacaaacgaagatgccttgattgaaatcttaactaccaggacaagcaggcaaatgaaggatatctctcaagcctattatacagtatacaagaagagtcttggagatgacattagttccgaaacatctggtgacttccggaaagctctgttgactttggcagatggcagaaagaaatgaaaaagtcttgnaaaagttgggattgaancatctggggccaaaaacaaagaattgcccccagaattnctcttattaaaaagccttgggt

SEQ ID NO: 275058 - DNA, 502 bp, Homo sapiens
gcatccttacaccatccaggttgaaagccaagttttacctcctgtgaagtcttttgcgttacaaacttggtatctttgccctttaagcctcaacctcacgtagtatcttttctggacaacagtctatttttggttggccttgggaaaaggaactgataaacatattctttaaaaatgtggttcatttcactttcctaagttaggcagtgtagccgggtattaaggagcccggatatagggattccaatcctgcttttgtcacttattctcgataagatttgaggccagtttcctaacctgtctttctcattttacttatctgttaaatgggggatacgtatagtacctattgcagagagcttttaaaagggttaaagtagttaatacacattaagccttttgaatagccagtgttcgataaatattattaaaactaaaatttgaagtttttatagaaatcaatattatgtaagtgatgctcgtccgggatcctctagatcga

SEQ ID NO: 275059 - DNA, 1024 bp, Homo sapiens
tgaaaaacaaaacccagataaccctaggtctctctccaaaatttctttttttaaaaatgtattgggggaaaaatatacttggcttacaaaatatgcctgtatacttggtgacatatgtacaggttttgcttggggcaaatactgatcaagaaattcaaatgccttctgggaggtgtgaagtaggccatgccaccttaggaaatgattcagcacaaggaagtcttcagaattaagatttctttaccagagaaaacatatttgactagtgattatagtatcatttcccaggtgctgctataaataaaatttaaaatagcccaacttactggataaattatttattatttaactatttaggctatttaaaatgcttactgcttgagagaaggggaaagagaaagagagatcattgaagaaaatcatctagggagtttgggttttgttgtagatgatttccttaaaaaggaacaaaagaaaaacaaaaacttctgtgcccagattttcatggtttaaagagggagttttttagcttgctacttgatcttctgcatatcaaataaaaaactagaatatattcaaatgtgctcaactgcgttgctttaaataattttgtggtgcttctttttagcatttgatgaatacagaaatatcagccaaaaggacattgtggacagcataaaaggagaattatctgggcattttgaagacttactgttggccatagttaattgtgtgaggaacacgccggcctttttagccgaaagactgcatcgagccttgaagggtattggaactgatgagtttactctgaaccgaataatggtgtccagatcagaaattgaccttttggacattcgaacagagttcaagaagcattatggctattccctatattcagcaattaaatcggatacttctggagactatgaaatcacactcttaaaaatctgtggtggagatgactgaaccaagaagataatctccaaaggtccacgatgggcactcattatgaggggtaggagct

SEQ ID NO: 275060 - DNA, 286 bp, Homo sapiens
ctgaacattatttgctttttgttacagtttaattgtgtgaggaacacgccggcctttttagccgaaagactgcatcgagccttgaagggtattggaactgatgagtttactctgaaccgaataatggtgtccagatcagaaattgaccttttggacattcgaacagagttcaagaagcattatggctattccctatattcagcaattaaatcgatacttctggagactatgaaatcacactctgtaaaatctgtggtgtatagtaatcctgggagtacctgcagca

SEQ ID NO: 275061 - DNA, 1388 bp, Homo sapiens
gcaatcaggtggagtcgagaggccggaggaggggcaggaggaaggggtgcggtcgcgatccggacccggagccagcgcggagcacctgcgcccgcggctgacaccttcgctcgcagtttgttcgcagtttactcgcacaccagtttcccccaccgcgctttggattagtgtgatctcagctcaaggcaaaggtgggatatcatggcatctatctgggttggacaccgaggaacagtaagagattatccagactttagcccatcagtggatgctgaagctattcagaaagcaatcagaggaattggaactgatgagaaaatgctcatcagcattctgactgagaggtcaaatgcacagcggcagctgattgttaaggaatatcaagcagcatatggaaaggagctgaaagatgacttgaagggtgatctctctggccactttgagcatctcatggtggccctagtgactccaccagcagtctttgatgcaaagcagctaaagaaatccatgaagggcgcgggaacaaacgaagatgccttgattgaaatcttaactaccaggacaagcaggcaaatgaaggatatctctcaagcctattatacagtatacaagaagagtcttggagatgacattagttccgaaacatctggtgacttccggaaagctctgttgactttggcagatggcagaagagatgaaagtctgaaagtggatgagcatctggccaaacaagatgcccagattctctataaagctggtgagaacagatggggcacggatgaagacaaattcactgagatcctgtgtttaaggagctttcctcaattaaaactaacatttgatgaatacagaaatatcagccaaaaggacattgtggacagcataaaaggagaattatctgggcattttgaagacttactgttggccatagttaattgtgtgaggaacacgccggcctttttagccgaaagactgcatcgagccttgaagggtattggaactgatgagtttactctgaaccgaataatggtgtccagatcagaaattgaccttttggacattcgaacagagttcaagaagcattatggctattccctatattcagcaattaaatcggatacttctggagactatgaaatcacactcttaaaaatctgtggtggagatgactgaaccaagaagataatctccaaaggtccacgatgggcttttccaacagctccaccttacttcttctcatactatttaagagaacaagcaaatataaacagcaacttgtgttccttaaccagggaaatttttcatattggtttttattaaccaaccacccaacctgaaggccggattatttttttttttaagagacccttccttcatttttattaaat

SEQ ID NO: 275062 - DNA, 1436 bp, Homo sapiens
gcaatcaggtggagtcgagaggccggaggaggggcaggaggaaggggtgcggtcgcgatccggacccggagccagcgcggagcacctgcgcccgcggctgacaccttcgctcgcagtttgttcgcagtttactcgcacaccagtttcccccaccgcgctttggattagtgtgatctcagctcaaggcaaaggtgggatatcatggcatctatctgggttggacaccgaggaacagtaagagattatccagactttagcccatcagtggatgctgaagctattcagaaagcaatcagaggaattggaactgatgagaaaatgctcatcagcattctgactgagaggtcaaatgcacagcggcagctgattgttaaggaatatcaagcagcatatggaaaggagctgaaagatgacttgaagggtgatctctctggccactttgagcatctcatggtggccctagtgactccaccagcagtctttgatgcaaagcagctaaagaaatccatgaagggcgcgggaacaaacgaagatgccttgattgaaatcttaactaccaggacaagcaggcaaatgaaggatatctctcaagcctattatacagtatacaagaagagtcttggagatgacattagttccgaaacatctggtgacttccggaaagctctgttgactttggcagatggcagaagagatgaaagtctgaaagtggatgagcatctggccaaacaagatgcccagattctctataaagctggtgagaacagatggggcacggatgaagacaaattcactgagatcctgtgtttaaggagctttcctcaattaaaactaacatttgatgaatacagaaatatcagccaaaaggacattgtggacagcataaaaggagaattatctgggcattttgaagacttactgttggccatagttaattgtgtgaggaacacgccggcctttttagccgaaagactgcatcgagccttgaagggtattggaactgatgagtttactctgaaccgaataatggtgtccagatcagaaattgaccttttggacattcgaacagagttcaagaagcattatggctattccctatattcagcaattaaagtaagtctacttttaaaaatagcaaaacatattttgcccttctctacccatctccttactcttatatgccttaaaatataaagatatttgacttaaatttctctctccttgtcaatgtataaatgtgttgtctgagcttaaaatagtagcagcaaaatatcccttattttcagctctaaaatcccaggcatataatagacactcaatatttttttaggggtactagccactaatttttcttcttttgtgaattacatatgcaagttgtttacctgttttttatattgcactggttttatttatttcagtctttatgacaatgt

SEQ ID NO: 275063 - DNA, 1152 bp, Homo sapiens
gcaatcaggtggagtcgagaggccggaggaggggcaggaggaaggggtgcggtcgcgatccggacccggagccagcgcggagcacctgcgcccgcggctgacaccttcgctcgcagtttgttcgcagtttactcgcacaccagtttcccccaccgcgctttggattagtgtgatctcagctcaaggcaaaggtgggatatcatggcatctatctgggttggacaccgaggaacagtaagagattatccagactttagcccatcagtggatgctgaagctattcagaaagcaatcagaggaattggaactgatgagaaaatgctcatcagcattctgactgagaggtcaaatgcacagcggcagctgattgttaaggaatatcaagcagcatatggaaaggagctgaaagatgacttgaagggtgatctctctggccactttgagcatctcatggtggccctagtgactccaccagcagtctttgatgcaaagcagctaaagaaatccatgaagggcgcgggaacaaacgaagatgccttgattgaaatcttaactaccaggacaagcaggcaaatgaaggatatctctcaagcctattatacagtatacaagaagagtcttggagatgacattagttccgaaacatctggtgacttccggaaagctctgttgactttggcagatggcagaagagatgaaagtctgaaagtggatgagcatctggccaaacaagatgcccagattctctataaagctggtgagaacagatggggcacggatgaagacaaattcactgagatcctgtgtttaaggagctttcctcaattaaaactaacatttgatgaatacagaaatatcagccaaaaggacattgtggacagcataaaaggagaattatctgggcattttgaagacttactgttggccatagttaattgtgtgaggaacacgccggcctttttagccgaaagactgcatcgagccttgaagggtattggaactgatgagtttactctgaaccgaataatggtgtccagatcagaaattgaccttttggacattcgaacagagttcaagaagcattatggctattccctatattcagcaattaaatcggatacttctggagaccctgggcaaaccaccttcgtg

SEQ ID NO: 275064 - DNA, 1652 bp, Homo sapiens
gcaatcaggtggagtcgagaggccggaggaggggcaggaggaaggggtgcggtcgcgatccggacccggagccagcgcggagcacctgcgcccgcggctgacaccttcgctcgcagtttgttcgcagtttactcgcacaccagtttcccccaccgcgctttggattagtgtgatctcagctcaaggcaaaggtgggatatcatggcatctatctgggtacacggtctcactctgtcacctagactacagtgcagtgacacaatcacagctcactgcagccttgaccttctgcgctcaagtggtcctcccacctcagcctcccaagtagctgggaccacacctgcacaccaccacacctggttggacaccgaggaacagtaagagattatccagactttagcccatcagtggatgctgaagctattcagaaagcaatcagaggaattggaactgatgagaaaatgctcatcagcattctgactgagaggtcaaatgcacagcggcagctgattgttaaggaatatcaagcagcatatggaaaggagctgaaagatgacttgaagggtgatctctctggccactttgagcatctcatggtggccctagtgactccaccagcagtctttgatgcaaagcagctaaagaaatccatgaagggcgcgggaacaaacgaagatgccttgattgaaatcttaactaccaggacaagcaggcaaatgaaggatatctctcaagcctattatacagtatacaagaagagtcttggagatgacattagttccgaaacatctggtgacttccggaaagctctgttgactttggcagatggcagaagagatgaaagtctgaaagtggatgagcatctggccaaacaagatgcccagattctctataaagctggtgagaacagatggggcacggatgaagacaaattcactgagatcctgtgtttaaggagctttcctcaattaaaactaacatttgatgaatacagaaatatcagccaaaaggacattgtggacagcataaaaggagaattatctgggcattttgaagacttactgttggccatagttaattgtgtgaggaacacgccggcctttttagccgaaagactgcatcgagccttgaagggtattggaactgatgagtttactctgaaccgaataatggtgtccagatcagaaattgaccttttggacattcgaacagagttcaagaagcattatggctattccctatattcagcaattaaatcggatacttctggagactatgaaatcacactcttaaaaatctgtggtggagatgactgaaccaagaagataatctccaaaggtccacgatgggcttttccaacagctccaccttacttcttctcatactatttaagagaacaagcaaatataaacagcaacttgtgttcctaacaggaattttcattgttctataacaacaacaacaaaagcgattattattttagagcatctcatttataatgtagcagctcataaatgaaattgaaaatggtattaaagatctgcaactactatccaacttatatttctgctttcaaagttaagaatctttatagttctaatccattaaatataaagcaagataataaaaattgttgcttttgttaaaagtaa

SEQ ID NO: 275065 - DNA, 1455 bp, Homo sapiens
gcaatcaggtggagtcgagaggccggaggaggggcaggaggaaggggtgcggtcgcgatccggacccggagccagcgcggagcacctgcgcccgcggctgacaccttcgctcgcagtttgttcgcagtttactcgcacaccagtttcccccaccgcgctttggattagtgtgatctcagctcaaggcaaaggtgggatatcatggcatctatctgggttggacaccgaggaacagtaagagattatccagactttagcccatcagtggatgctgaagctattcagaaagcaatcagaggaattggaactgatgaggttaaggaatatcaagcagcatatggaaaggagctgaaagatgacttgaagggtgatctctctggccactttgagcatctcatggtggccctagtgactccaccagcagtctttgatgcaaagcagctaaagaaatccatgaagggcgcgggaacaaacgaagatgccttgattgaaatcttaactaccaggacaagcaggcaaatgaaggatatctctcaagcctattatacagtatacaagaagagtcttggagatgacattagttccgaaacatctggtgacttccggaaagctctgttgactttggcagatggcagaagagatgaaagtctgaaagtggatgagcatctggccaaacaagatgcccagattctctataaagctggtgagaacagatggggcacggatgaagacaaattcactgagatcctgtgtttaaggagctttcctcaattaaaactaacatttgatgaatacagaaatatcagccaaaaggacattgtggacagcataaaaggagaattatctgggcattttgaagacttactgttggccatagttaattgtgtgaggaacacgccggcctttttagccgaaagactgcatcgagccttgaagggtattggaactgatgagtttactctgaaccgaataatggtgtccagatcagaaattgaccttttggacattcgaacagagttcaagaagcattatggctattccctatattcagcaattaaatcggatacttctggagactatgaaatcacactcttaaaaatctgtggtggagatgactgaaccaagaagataatctccaaaggtccacgatgggcttttccaacagctccaccttacttcttctcatactatttaagagaacaagcaaatataaacagcaacttgtgttcctaacaggaattttcattgttctataacaacaacaacaaaagcgattattattttagagcatctcatttataatgtagcagctcataaatgaaattgaaaatggtattaaagatctgcaactactatccaacttatatttctgctttcaaagttaagaatctttatagttctaatccattaaatataaagcaagataataaaaattgttgcttttgttaaaagtaa

SEQ ID NO: 275066 - DNA, 1302 bp, Homo sapiens
tgaaaaacaaaacccagataaccctaggtctctctccaaaatttctttttttaaaaatgtattgggggaaaaatatacttggcttacaaaatatgcctgtatacttggtgacatatgtacaggttttgcttggggcaaatactgatcaagaaattcaaatgccttctgggaggtgtgaagtaggccatgccaccttaggaaatgattcagcacaaggaagtcttcagaattaagatttctttaccagagaaaacatatttgactagtgattatagtatcatttcccaggtgctgctataaataaaatttaaaatagcccaacttactggataaattatttattatttaactatttaggctatttaaaatgcttactgcttgagagaaggggaaagagaaagagagatcattgaagaaaatcatctagggagtttgggttttgttgtagatgatttccttaaaaaggaacaaaagaaaaacaaaaacttctgtgcccagattttcatggtttaaagagggagttttttagcttgctacttgatcttctgcatatcaaataaaaaactagaatatattcaaatgtgctcaactgcgttgctttaaataattttgtggtgcttctttttagcatttgatgaatacagaaatatcagccaaaaggacattgtggacagcataaaaggagaattatctgggcattttgaagacttactgttggccatagttaattgtgtgaggaacacgccggcctttttagccgaaagactgcatcgagccttgaagggtattggaactgatgagtttactctgaaccgaataatggtgtccagatcagaaattgaccttttggacattcgaacagagttcaagaagcattatggctattccctatattcagcaattaaatcggatacttctggagactatgaaatcacactcttaaaaatctgtggtggagatgactgaaccaagaagataatctccaaaggtccacgatgggcttttccaacagctccaccttacttcttctcatactatttaagagaacaagcaaatataaacagcaacttgtgttcctaacaggaattttcattgttctataacaacaacaacaaaagcgattattattttagagcatctcatttataatgtagcagctcataaatgaaattgaaaatggtattaaagatctgcaactactatccaacttatatttctgctttcaaagttaagaatctttatagttctaatccattaaatataaagcaagataataaaaattgttgcttttgttaaaagtaa

SEQ ID NO: 275067 - DNA, 1255 bp, Homo sapiens
tgaaaaacaaaacccagataaccctaggtctctctccaaaatttctttttttaaaaatgtattgggggaaaaatatacttggcttacaaaatatgcctgtatacttggtgacatatgtacaggttttgcttggggcaaatactgatcaagaaattcaaatgccttctgggaggtgtgaagtaggccatgccaccttaggaaatgattcagcacaaggaagtcttcagaattaagatttctttaccagagaaaacatatttgactagtgattatagtatcatttcccaggtgctgctataaataaaatttaaaatagcccaacttactggataaattatttattatttaactatttaggctatttaaaatgcttactgcttgagagaaggggaaagagaaagagagatcattgaagaaaatcatctagggagtttgggttttgttgtagatgatttccttaaaaaggaacaaaagaaaaacaaaaacttctgtgcccagattttcatggtttaaagagggagttttttagcttgctacttgatcttctgcatatcaaataaaaaactagaatatattcaaatgtgctcaactgcgttgctttaaataattttgtggtgcttctttttagcatttgatgaatacagaaatatcagccaaaaggacattgtggacagcatttaattgtgtgaggaacacgccggcctttttagccgaaagactgcatcgagccttgaagggtattggaactgatgagtttactctgaaccgaataatggtgtccagatcagaaattgaccttttggacattcgaacagagttcaagaagcattatggctattccctatattcagcaattaaatcggatacttctggagactatgaaatcacactcttaaaaatctgtggtggagatgactgaaccaagaagataatctccaaaggtccacgatgggcttttccaacagctccaccttacttcttctcatactatttaagagaacaagcaaatataaacagcaacttgtgttcctaacaggaattttcattgttctataacaacaacaacaaaagcgattattattttagagcatctcatttataatgtagcagctcataaatgaaattgaaaatggtattaaagatctgcaactactatccaacttatatttctgctttcaaagttaagaatctttatagttctaatccattaaatataaagcaagataataaaaattgttgcttttgttaaaagtaa

SEQ ID NO: 275068 - DNA, 682 bp, Homo sapiens
  misc_feature (682)..(682): n is a, c, g, or t
cctagttttagaagtttcaagagcaagataatctccaaaggtccacgatgggcttttccaacagctccaccttacttcttctcatactatttaagagaacaagcaaatataaacagcaacttgtgttcctaacaggaattttcattgttctataacaacaacaacaaaagcgattattattttagagcatctcatttataatgtagcagctcataaatgaaattgaaaatggtattaaagatctgcaactactatccaacttatatttctgctttcaaagttaagaatctttatagttctaatccattaaatataaagcaagataataaaaattgttgcttttgttaaaagtaaaaaaaaaaaaaaaaaaaaaaaaaaaatttggggggggcttgggcctcgagaaaagggttttgaacaaccccaaatcgtgtggaggcggccgcggccccccggtaagtatagtggacatgagtgcgcgaatgagccgtgtccacgagaagaaacaccgggactgagaacaaggatgcgtgaattactacaacccaatgtaagaagaagcgcggggggaagccacggaagcggtcgtggaacacattccagagggagatacgaaaggcccacagcgggctcacaccgaggcgtcacagggcagtcgaaataaaatagcgccgccgtgagn

SEQ ID NO: 275069 - DNA, 719 bp, Homo sapiens
atgtggttcatttcactttcctaagttaggcagtgtagccgggtattaaggagcccggatatagggattccaatcctgcttttgtcacttattctcgataagatttgaggccagtttcctaacctgtctttctcattttacttatctgttaaatgggggatacgtatagtacctattgcagagagcttttaaaagggttaaagtagttaatacacattaagccttttgaatagccagtgttcgataaatattattaaaactaaaatttgaagtttttatagaaatcaatattatgtaagtgatgcaatcttattttattaaaccaaaattgaaatttaactgcagtatatcaggaagaatctaaatattacttacagtgaagaagatgctggtcagaacgtaattacactcaggtatgaatgaatgatggaattgcaggtatgttttactaaatggtatagctcatgagtctcacacccaggtgaattccctagtgctataggatttgattcatttatggtctcccattatttatactgtatttgttcttcattgattttattctttgcagtcggatacttctggagactatgaaatcacactcttaaaaatctgtggtggagatgactgaaccaagaagataatctccaaaggtccacgatgggcttttccaacagctccaccttacttcttctcatactatttaagagaacaagcaa

SEQ ID NO: 275070 - DNA, 655 bp, Homo sapiens
ccagacccgggtccttcactgacagattaatctgggccagcttctcctttaacatcaggaagtcttcaggaagcagctgctggaggaggctcttcctctccagcagggccttaagccgttcctggctggttgctatttcccctgctgagccctggatcttttccttgatgatttcaatctcttctagccgctgttttatgctagttccatacctcaggtttttgcggatgggcacctgtccgatagggcagactttcaatctgatgggagaagactgcgcacgtctttgatgcaaagcacgctaaagaaatccatgaagggcgcgggaacaaacgaagatgccttgattgaaatcttaactaccaggacaagcaggcaaatgaaggatatctctcaagcctattatacagtatacaagaagagtcttggagatgacattagttccgaaacatctggtgacttccggaaagctctgttgactttggcagatgggagaagactggccatcttctcccatcaggtgggtatatatgccactaatttgtttgattgtgtttttcccttgttcctcattttgttttggcctagtaatatcctattgattgtatgattatcacacactgatatccattttacctgatggacgcaagcctgg

SEQ ID NO: 275071 - DNA, 1837 bp, Homo sapiens
  misc_feature (1837)..(1837): n is a, c, g, or t
gcaatcaggtggagtcgagaggccggaggaggggcaggaggaaggggtgcggtcgcgatccggacccggagccagcgcggagcacctgcgcccgcggctgacaccttcgctcgcagtttgttcgcagtttactcgcacaccagtttcccccaccgcgctttggattagtgtgatctcagctcaaggcaaaggtgggatatcatggcatctatctgggttggacaccgaggaacagtaagagattatccagactttagcccatcagtggatgctgaagctattcagaaagcaatcagaggaattggaactgatgagaaaatgctcatcagcattctgactgagaggtcaaatgcacagcggcagctgattgttaaggaatatcaagcagcatatggaaaggagctgaaagatgacttgaagggtgatctctctggccactttgagcatctcatggtggccctagtgactccaccagcagtctttgatgcaaagcagctaaagaaatccatgaagggcgcgggaacaaacgaagatgccttgattgaaatcttaactaccaggacaagcaggcaaatgaaggatatctctcaagcctattatacagtatacaagaagagtcttggagatgacattagttccgaaacatctggtgacttccggaaagctctgttgactttggcagatggcagaagagatgaaagtctgaaagtggatgagcatctggccaaacaagatgcccagattctctataaagctggtgagaacagatggggcacggatgaagacaaattcactgagatcctgtgtttaaggagctttcctcaattaaaactaacatttgatgaatacagaaatatcagccaaaaggacattgtggacagcataaaaggagaattatctgggcattttgaagacttactgttggccatagttaattgtgtgaggaacacgccggcctttttagccgaaagactgcatcgagccttgaagggtattggaactgatgagtttactctgaaccgaataatggtgtccagatcagaaattgaccttttggacattcgaacagagttcaagaagcattatggctattccctatattcagcaattaaatcggatacttctggagactatgaaatcacactcttaaaaatctgtggtggagatgactgaaccaagaagataatctccaaaggtccacgatgggcttttccaacagctccaccttacttcttctcatactatttaagagaacaagcaaatataaacagcaacttgtgttcctaacaggaattttcattgttctataacaacaacaacaaaagcgattattattttagagcatctcatttataatgtagcagctcataaatgaaattgaaaatggtattaaagatctgcaactactatccaacttatatttctgctttcaaagttaagaatctttatagttctaatccattaaatataaagcaagataataaaaattgttgcttttgttaaaagtaaaaaaaaaaaaaaaaaaaaaaaaaaaatttggggggggcttgggcctcgagaaaagggttttgaacaaccccaaatcgtgtggaggcggccgcggccccccggtaagtatagtggacatgagtgcgcgaatgagccgtgtccacgagaagaaacaccgggactgagaacaaggatgcgtgaattactacaacccaatgtaagaagaagcgcggggggaagccacggaagcggtcgtggaacacattccagagggagatacgaaaggcccacagcgggctcacaccgaggcgtcacagggcagtcgaaataaaatagcgccgccgtgagn

SEQ ID NO: 275072 - DNA, 1784 bp, Homo sapiens
  misc_feature (1784)..(1784): n is a, c, g, or t
gcaatcaggtggagtcgagaggccggaggaggggcaggaggaaggggtgcggtcgcgatccggacccggagccagcgcggagcacctgcgcccgcggctgacaccttcgctcgcagtttgttcgcagtttactcgcacaccagtttcccccaccgcgctttggattagtgtgatctcagctcaaggcaaaggtgggatatcatggcatctatctgggttggacaccgaggaacagtaagagattatccagactttagcccatcagtggatgctgaagctattcagaaagcaatcagaggaattggaactgatgagaaaatgctcatcagcattctgactgagaggtcaaatgcacagcggcagctgattgttaaggaatatcaagcagcatatggaaaggagctgaaagatgacttgaagggtgatctctctggccactttgagcatctcatggtggccctagtgactccaccagcagtctttgatgcaaagcagctaaagaaatccatgaagggcgcgggaacaaacgaagatgccttgattgaaatcttaactaccaggacaagcaggcaaatgaaggatatctctcaagcctattatacagtatacaagaagagtcttggagatgacattagttccgaaacatctggtgacttccggaaagctctgttgactttggcagatggcagaagagatgaaagtctgaaagtggatgagcatctggccaaacaagatgcccagattctctataaagctggtgagaacagatggggcacggatgaagacaaattcactgagatcctgtgtttaaggagctttcctcaattaaaactaacatttgatgaatacagaaatatcagccaaaaggacattgtggacagcataaaaggagaattatctgggcattttgaagacttactgttggccatagttaattgtgtgaggaacacgccggcctttttagccgaaagactgcatcgagccttgaagggtattggaactgatgagtttactctgaaccgaataatggtgtccagatcagaaattgaccttttggacattcgaacagagttcaagaagcattatggctattccctatattcagcaattaaatcggatacttctggagactatgaaatcacactcttgatgggcttttccaacagctccaccttacttcttctcatactatttaagagaacaagcaaatataaacagcaacttgtgttcctaacaggaattttcattgttctataacaacaacaacaaaagcgattattattttagagcatctcatttataatgtagcagctcataaatgaaattgaaaatggtattaaagatctgcaactactatccaacttatatttctgctttcaaagttaagaatctttatagttctaatccattaaatataaagcaagataataaaaattgttgcttttgttaaaagtaaaaaaaaaaaaaaaaaaaaaaaaaaaatttggggggggcttgggcctcgagaaaagggttttgaacaaccccaaatcgtgtggaggcggccgcggccccccggtaagtatagtggacatgagtgcgcgaatgagccgtgtccacgagaagaaacaccgggactgagaacaaggatgcgtgaattactacaacccaatgtaagaagaagcgcggggggaagccacggaagcggtcgtggaacacattccagagggagatacgaaaggcccacagcgggctcacaccgaggcgtcacagggcagtcgaaataaaatagcgccgccgtgagn

SEQ ID NO: 275073 - DNA, 1472 bp, Homo sapiens
cctcctcaaagagcagatgtgtctttataacagactgtaggcttggagccttgtaaaatgtacatggagtttcacaatcaagcacaaggaatccaactgaaggcagctaaactttgtgttgatttgattagtgtgatctcagctcaaggcaaaggtgggatatcatggcatctatctgggttggacaccgaggaacagtaagagattatccagactttagcccatcagtggatgctgaagctattcagaaagcaatcagaggaattggaactgatgagaaaatgctcatcagcattctgactgagaggtcaaatgcacagcggcagctgattgttaaggaatatcaagcagcatatggaaaggagctgaaagatgacttgaagggtgatctctctggccactttgagcatctcatggtggccctagtgactccaccagcagtctttgatgcaaagcagctaaagaaatccatgaagggcgcgggaacaaacgaagatgccttgattgaaatcttaactaccaggacaagcaggcaaatgaaggatatctctcaagcctattatacagtatacaagaagagtcttggagatgacattagttccgaaacatctggtgacttccggaaagctctgttgactttggcagatggcagaagagatgaaagtctgaaagtggatgagcatctggccaaacaagatgcccagattctctataaagctggtgagaacagatggggcacggatgaagacaaattcactgagatcctgtgtttaaggagctttcctcaattaaaactaacatttgatgaatacagaaatatcagccaaaaggacattgtggacagcataaaaggagaattatctgggcattttgaagacttactgttggccatagttaattgtgtgaggaacacgccggcctttttagccgaaagactgcatcgagccttgaagggtattggaactgatgagtttactctgaaccgaataatggtgtccagatcagaaattgaccttttggacattcgaacagagttcaagaagcattatggctattccctatattcagcaattaaatcggatacttctggagactatgaaatcacactcttaaaaatctgtggtggagatgactgaaccaagaagataatctccaaaggtccacgatgggcttttccaacagctccaccttacttcttctcatactatttaagagaacaagcaaatataaacagcaacttgtgttcctaacaggaattttcattgttctataacaacaacaacaaaagcgattattattttagagcatctcatttataatgtagcagctcataaatgaaattgaaaatggtattaaagatctgcaactactatccaacttatatttctgctttcaaagttaagaatctttatagttctaatccattaaatataaagcaagataataaaaattgttgcttttgttaaaagtaa

SEQ ID NO: 275074 - DNA, 1423 bp, Homo sapiens
gcaatcaggtggagtcgagaggccggaggaggggcaggaggaaggggtgcggtcgcgatccggacccggagccagcgcggagcacctgcgcccgcggctgacaccttcgctcgcagtttgttcgcagtttactcgcacaccagtttcccccaccgcgctttggattagtgtgatctcagctcaaggcaaaggtgggatatcatggcatctatctgggtgaactgatgagaaaatgctcatcagcattctgactgagaggtcaaatgcacagcggcagctgattgttaaggaatatcaagcagcatatggaaaggagctgaaagatgacttgaagggtgatctctctggccactttgagcatctcatggtggccctagtgactccaccagcagtctttgatgcaaagcagctaaagaaatccatgaagggcgcgggaacaaacgaagatgccttgattgaaatcttaactaccaggacaagcaggcaaatgaaggatatctctcaagcctattatacagtatacaagaagagtcttggagatgacattagttccgaaacatctggtgacttccggaaagctctgttgactttggcagatggcagaagagatgaaagtctgaaagtggatgagcatctggccaaacaagatgcccagattctctataaagctggtgagaacagatggggcacggatgaagacaaattcactgagatcctgtgtttaaggagctttcctcaattaaaactaacatttgatgaatacagaaatatcagccaaaaggacattgtggacagcataaaaggagaattatctgggcattttgaagacttactgttggccatagttaattgtgtgaggaacacgccggcctttttagccgaaagactgcatcgagccttgaagggtattggaactgatgagtttactctgaaccgaataatggtgtccagatcagaaattgaccttttggacattcgaacagagttcaagaagcattatggctattccctatattcagcaattaaatcggatacttctggagactatgaaatcacactcttaaaaatctgtggtggagatgactgaaccaagaagataatctccaaaggtccacgatgggcttttccaacagctccaccttacttcttctcatactatttaagagaacaagcaaatataaacagcaacttgtgttcctaacaggaattttcattgttctataacaacaacaacaaaagcgattattattttagagcatctcatttataatgtagcagctcataaatgaaattgaaaatggtattaaagatctgcaactactatccaacttatatttctgctttcaaagttaagaatctttatagttctaatccattaaatataaagcaagataataaaaattgttgcttttgttaaaagtaa

SEQ ID NO: 275075 - DNA, 427 bp, Homo sapiens
tctcctttcctttctttcttctacaattcctactagttgggtaccatattctctggaataattctccaactttcttttctctcattttttcatctctttgactttttgttctagtatttgtgaaatgtcctcaactttatcttccaaaacttctatttgaagtttcttacttcaaataactgtttcctgaaactttaaattttattttctatgtacaatcaatattgagacatttcttagacctatgatgtcattcatctgtgacaaaatgtgcttcttcagaaaaaattttaccaacacaaataatttttgttatatagggtttaatcaggccaaaacaaaaatgtgcctttcagttcccatgttaattaaatttagtgcaaaataatttctttgaaacttgtcaaatatcacaaaatattggcca

SEQ ID NO: 275076 - DNA, 560 bp, Homo sapiens
ctggagaggatgtggagaaataggaacacttttatactgttggtgggactgtaaactagttcaaccattgtggaagtcagtggggcgattcctcagggatctagaactagaaataccatttgacccagccatcccattactgggtatatacccaaaggactataaatcatgctgctataaagacacatgcacacgtatgtttattgcggcactattcacaatagcatttactgtttttctttccttgtatcctatttactactcaatcttctgccttccagtttcccttcccaccagtctaccaaaactgttcaggcaaaattcaccaaggaactcactggccaattgccaaatcctgtggccactttcagttcccatcttctgccacctctcggtggagcacagtgaatacttcctaaacttccttccccagttgtcaattcactgttctcaccactcttgctgcctcttcacaagttcctttgctgcccacctcttcctactggtgtgtcacagggcaccatccggcatgcctggtctcccctttctctttcctccac

SEQ ID NO: 275077 - DNA, 443 bp, Homo sapiens
agctctgtctgctagccctcatggggctcgggctccaggctctttgccaccctgtatgcctcttttcaaataaatgtgagtttgcccatgttccttttaggagtggtgtcagaaatgaagcctactttgaatgtggtctggtcaacattttggtacagctgtcatctccattaaataggataccctacaaatggtgtctctattaaaacacattagcatttttgtgcagctggttcatattcttggtccaaaactatgacctctaggtcatttaaacagaagctgttttaaaggcagttcaccctcctcattttgcacttggagaattaacatttctaatctaaacatacagagatttatatggcctgttcagtttcattttgttaattttagcccaatattgagcttaagatgctctggagttcttatataatattagccat

SEQ ID NO: 275078 - DNA, 272 bp, Homo sapiens
tcttgctcttcacccatgttagagtgaagtggcgtgatcacttttcactgtagcctcgactcccaagtgattctcgcacttcagcttcctgagtagctgggactacaagcacaagccaccagacccaagtaattattttttgtagagacaggatctcactgtgtagcccaggctggtttcaaaactccttggctcatgtgatcctcctgtctcagactccagaagtgctggggaccatcatgccccggcagaaaatcactttgccacaaagg

SEQ ID NO: 275079 - DNA, 524 bp, Homo sapiens
ataaaggaaacctactaatttgacagtggagaaaccaatggatatcacattaacaaagtgatcatagttaccaccaccaatattgtaataaactttcatttcctgtgtctcctgatatgatgcatggagaaggacacagcatcgcctctgtaatattcccactaaaatgcgtgacctcaattgaattatgaggaaacatcagacaaattcaacatgtggtaaaaatttttaacaaaatgaccggcctacattcttcaaaagtgccaaagtcatgaaaaagaaagactaagtagtggttccatttttcaaaaaacttaaaaaaaaaaaaagtaggaaactgaagacacttaacaactaaatgtcatgtgataattgattggttcttggcctagggttttttttcaatctataaaatcccacaaagggcattgttgggacaattacaaaaattgaatagcgtatgtagattagatacattacttttttaatttgataagttgtattgtaattatgcaagagaatat

SEQ ID NO: 275080 - DNA, 433 bp, Homo sapiens
taaaacaaccaacaacataatcaaattcccagttctgtgctaaacctatggaatcagatcctccaagagagagctgaatggtgcctgcaacttctgtgaccattttgccatgttgggaccaagtgtgaatgcaaagtttgcacatagaggagaactgaccaatcggagaatggaaaacttcttgatcattgatgacagcagtcaaccagtgaagccatcaagcctggagtttttcctactgctggaattcttgtcattgcagaaaatcaatgttgtgttctgatttggggcattctagcttgcaaatagaggcatcttagctgacaccaaatgctccctaaggatattccaaagataaaattgatgtcttcattttgaagggcattgataaagttttacatttgtctttattgtagtgaagatttttaaattt

SEQ ID NO: 275081 - DNA, 326 bp, Homo sapiens
ctatgggaataaaaaattaaaatttttttaaaaaacaacttagactgtagtgatggttgtacaactttgtgagtataccaaaactactgaattggacattttaatgggtgatttttatggtatgtgatttatatttcagcaaaaatgttttttaaaaacttttttaaaaagaaaagacaccagaaaaagaaaaaccaacaactaaaatcatacttaatgatgacagaccatattattttttcccaagattggtaacaaggaaaagacatctactgttaccacttctattcactttatactggaggtcgtaggaagtgcaacaaggc

SEQ ID NO: 275082 - DNA, 206 bp, Homo sapiens
gcgtgaaccaccgtacccggcccccaaatgagttttattctggtctgggtatcctggcaggaacccttgtagagcagtcaaagtgaaagttactcaaaactagaaatacctgaaaggccaccaagcacagaaaaaaaaccttaagttggaagcgggggcaaggtgccattttgtagcctcattcattctttagggatctggagttt

SEQ ID NO: 275083 - DNA, 424 bp, Homo sapiens
tagaatagaagtgaatgtggttataaaagggcaacataagggatatttagggagatggaactgttctgtgtgttggctgtggtgggagatacatgaaactgcacgtcataaactagcatagacctaactacacacagacacacacacacacaaagtaaatttgggaaaacccgaataagactgatggcttgtatcaaggtcaacatcctggctgtgatattgtactctagttctgcaagatgttggtattgagttaacatagaatttctttgtttttttttttttttataactgcatgtgaatttacaattgtctcaaaggcaaaggctaacttttttttttaaaaggaaagaaaatggccctctgatttggaggacagagaaatcccagccacattctgacactaaatctaattttttttttt

SEQ ID NO: 275084 - DNA, 360 bp, Homo sapiens
tttaatacaatgttacttggcacacagaattttgtaagttttccattttccttttgcatatctctttaatagtataaaattatcacatttatctcattcagcatcttttgccttgaattctgtttttatattggtttgaatttgcttgatgtatgtttgctttttttttcataaataagaggttggattttgttgtttgatcatttgtcttttaatagaggagtttaacctgtttaaaattcttacaattgatgtgtttgggtttttatgctttctatttttgtacttctttattgttttctttattttttatttagtgtgacacttattttagctgtggaatccaaaatgtaaaatgca

SEQ ID NO: 275085 - DNA, 596 bp, Homo sapiens
ataactgtgccacatacttatataaaatataagctctcacttatgttttgaagaattatgattatttttacagaggagattcagagaggttaagaaatatgcccaaagtgatactgctcctaagtagctatgctgatatataaactcaggacacaggactctcagatatgttcatttccccaaatcaactcccttgggtcaaggacaagccactgtgttattacgagtcaatggctctgtgactgtaggtttccatttttaaactgaaaactgccactaagatctactaactaatggctcccattggtttaattaccactaccctttatccaagtttccctgtcacaaagcccaggcctctcaggcccctctcatcccagcgtgaatgtcctataggcagtcttccgtcgctgccctgctctatctacccaggatcacggactgacacgctaccaacttcacttatttaactagtcctgcgaggggcatcatccgctccatgtccacggccagtccccagagcccaggagggctcgcacacaggcgctcggcagatactgagaaacaggaaagtggccgttcaccgggctgcttcc

SEQ ID NO: 275086 - DNA, 390 bp, Homo sapiens
ataactgtgccacatacttatataaaatataagctctcacttatgttttgaagaattatgattatttttacagaggagattcagagaggttaagaaatatgcccaaagtgatactgctcctaagtagctatgctgatatataaactcaggacacaggactctcagatatgttcatttccccaaatcaactcccttgggtcaaggacaagccactgtgttattacgagtcaatggctctgtgactgtaggtttccatttttaaactgaaaactgccactaagatctactaactaatggctcccattggtttaattaccactaccctttaaaagccaagtaaaccaaaatgacacaaggttaagtgacttagtcagattcctttgaaagact

SEQ ID NO: 275087 - DNA, 598 bp, Homo sapiens
cttctctggaacactgggagaatgatccgaggtgtgactccattgagcatatgttaattgaacattccctgtgcgctgggcactgtgccaagacttgcagggacatatccctccaccaattcttgcaaaaggactgggaagtattagattaatatcatgccattttcaagataaggaaatgaggtcagaaaggtcaagtaagttgctcaaagccacagagcgatcagcacagccagattcaaacctgtgcaatggactttctgaattccactttttcacctctgacccacagcagagcaagtgctgagatcataggctctgttagcagctagagaggatttttttttttaaactgtggatccagaagatacattaatgagctgagctcaacatttaaaaataaaatagattacaatagaaaatatcagagtaggggccgggtgtggtggctcatgcctgtaatcccagcactttgggaggccgaggtgggcagatcacgagatcaggagttcgagaccagcctggccaacatggtgaaaccccatctctactataaaatacaaaaattagccaagcatggtggtgtgcacctataatc

SEQ ID NO: 275088 - DNA, 402 bp, Homo sapiens
taggacagggaacccccgtggacggctggccattgagacacagtggagaggaaggagaccatggtgtgaagtctacgaatgagagtgaggaaaaggaagaggtgggaagaagtggtacccaaggataaggctttatggaatctaagcatcccacatttactgtttttaaaaatgagcttgaaaaattagggtgtccgtcctgtgaaatggaatcccacagccacagatctgctaacatttgtttatatttgttgtcaaagaatagcttgatttttttttttttggttattaacataacttaagtggaataaaagtataaaggagcaagcaccatggttttctgtcatctcctctcctcttttcttttttcttttctgagacagagtgttgctctgtcaccca

SEQ ID NO: 275089 - DNA, 184 bp, Homo sapiens
cccacagcccatttcatctggtacctaacaggtcttgtgcagctttctgggtcattaaagattcttctagatccctctgagtagcgagttgatagtcggttgtctggacacgcttatctggccaaatcccctatcattggtttttgtttgtttgtttgttttgagacagagtctcgctctgttg

SEQ ID NO: 275090 - DNA, 510 bp, Homo sapiens
ccttttttgtccttcagatttggagaaggggaaagcagtttctctttgaaaagaagcagcgaatcgtggcttaagcaaaatttgtaatccttaaaactggccaggctctggagctgagttcaatttgacatgtctaaactttcttcttgagtaaccagattttcccttacagtcttttgtcacttaagagaactcataggcaatcgtccatccaaaacaagtctttctccttcagggaggacccatctttggaaactccagctggtttcctgtgcagtgcttatggtgccacctctcgttatatttagaaaaatggtctcacgtaacttgagaaaaaacatttcagtgaccaaagccgggtaccattggaacaccaaggtaatttacttgtttgctcaattggaaaacgctggctctaggataaaacggaatctttgggagagttattttttatggtagttggaagcatccaaaagaagttctaataaaggtatttatgagagaaaaaca

SEQ ID NO: 275091 - DNA, 366 bp, Homo sapiens
tgaagggctaggcagggctttggcggtgtgaggggaggaaaggtggtgagctccggaaaggctgctagagggaaagcaggatgggtcctccgagcccagccccaggagccgggtgtctccgtttccgtcacttcccagcactaggtagggaggtgggtaaaagtaggctgcgttcctcagcccaccccttggctccccgggagcctgaggcggggagcttcgggttaggtgaggtttgggggaggcggagtttgctggtaattgcccatccctcccctccaaaaaaccccacacaacttaaagattttaatattaactgtaaggatgttggttattcaataaataggcacaagttgaaaagtatga

SEQ ID NO: 275092 - DNA, 406 bp, Homo sapiens
acatttaggccgctcgacttggattcacctggattttctgcaacggacatgtatcgataaaatacatggtgcttttaagaaattgccccatcatcatgttgctgttgttgttattgatattgttgtttctgatggatagagatctaggcctgacactccaagcagtgtgaacagcatttaccttgataagcattcttacatcttaactctcgggaattttaaatagaagtgttccgtgtgattaaattaacaggtttagagatgagtgtcctggttatttcctttgttctcctcctggtagctgcctgcactcacagcatgttgggaatggtgattataaatgtaaccatgctctcttcttgtaagtggagagcccaggtacctcttatccagcatgtgaccctct

SEQ ID NO: 275093 - DNA, 445 bp, Homo sapiens
aaaaagttcagttttctgtgaaattaagttagttcctttctaaggttgttggaggattaagtgaattactatttacaacaatatctgacatgagtaagtattccataaatgatagctattattgttgttcattttgagggaagagagagaccctctcatattgttctatactcagaaaaggaaagagaagagaaactaaaggcaggtagcccagtgcctaggaaccacacctgaaaccaggcctaggcctgcctgacctaagcctggtagttaaaattcgacccgtgacttagcaactgatgttatctatagattccatatattgtatggaaagacattgtgaaacctccagttctgttctgtttcgctctgaccactggtgcttgcagcccctgtcatgtaccccctagcttgctcaatcgatcatgaccctctcatgtggatc

SEQ ID NO: 275094 - DNA, 206 bp, Homo sapiens
attggtgtggctgactcaggatgtcagccaactcttggtttgggaatcataggacttattaatggaacccacgctcctcaggactaagatgctgtgatgaaaattcaggcagatgcctaaccctcgtgatccgcccgcctcggcctcccaaagtactgggattacaggcgtgacgacccgtgcccggcctacagtatattcttatg

SEQ ID NO: 275095 - DNA, 386 bp, Homo sapiens
tcttacattttaattagcgctttatctaaaatattgaatctgaaatcacatattttccatctctcttttctttcaaaaatataatttattttaaaatctaagtcaaacattggtctttgacttatcaattggccttcattattactaatgaaaatatattgaccagccttgcatgctgagagaaaattagaatgtaaagggattaaaagtcagtgcatgtcacttccttggtccagaaccttttttagcatattaaaaaattttttttaatttttaatttttgtgggtatatagtaggtgtatatatttacagggcagggtccagaatctttaaaaccactggaatattctgagatcgggttgcctatcaaaatatatatgcatca

SEQ ID NO: 275096 - DNA, 385 bp, Homo sapiens
tctcctttctctctctttcgcttccccctcttgcctttttcctttctcccccctccccttttctccctcagttaagatgctacttcttccatgacaaatgatgctataggaggaagtcatttctttctctgcgtttgctttgaacctctcctattgctttgtcttttttttcttaccatggattaaaatatctgtgtacatgttttctgttgaattaggagcatctaattcagtgttagacacggttctacgtgttagcagtatcatctggaataagacagcctctgttcttggggagggagggtccttgtctttttcattcttggaactttttagaggtgatttgacaaataaataaatgtctatttaaaagttactaaaaaaa

SEQ ID NO: 275097 - DNA, 459 bp, Homo sapiens
tatatggtacttttcaagtctagaatttctatttctatttggttcttgtttagagtttccacttctttgctgtgattttccctctattcattcattataaacatttttgttctttaagtccttgagcatatttataaagtctgctttaaattccctgtgctaattctaacatctttgacatgagtggttctattgcacttcccctgagaattgggacaaggatgcccatttttaccacttctattcaacatagtactggaagtcctggccagagcaaccagacaagaggaagaaataaagggcatccagattgaaaaagaggaagtcaaactttcactattcactgatgatatgactgtatacctagaaaactctaaagacttatccaaaaagctcctagatctgataaacaaatccagtagagcctcaggatacaaaatcaatgtgattttttgtaaa

SEQ ID NO: 275098 - DNA, 162 bp, Homo sapiens
caactcttggcctcaagcactcctcctctcttagcctcccaaagtgctaagattataggctgggaggcacccaaaaccctgtcaatttacatcaagggtaatgagaatgtccattcaccatgtctcacagtaatcttacttctggggagataattcaatcta

SEQ ID NO: 275099 - DNA, 323 bp, Homo sapiens
gttcttaggagatctgaccattttaaagtgtgtggcacctccccctgccccagccctttgcttgtacctgctttcaccatgtgacatgcctgtcccccattttgcctttgtccatgagtaaaagctcactaaggcctccccagaggcaaagcagatgccagcaccatgctttctgtaaagtttgcagtacgatgagtcaattaaacttctttcctttataaattaccagtctgagctatttatttatagcaatacaagaatgacttaacacagatactaagggactactatgaacaattctacctacataaatttgacaacat

SEQ ID NO: 275100 - DNA, 344 bp, Homo sapiens
ccaaagccctgggaacttcagctcttccttcctgcctattggcatttctgttacactccgctagataatagaaagccaggagcagaagcttgagaaacatttaagaatcactcaagcagatctttggactccaggcaagactcaactaaatcatccaagaagagtcaccgttatagcagcaggtgaactcaggagtggtttcgaaacccgggagtggaataatggcctcttgggccctttccccactttcccacacctaagttaagggaaagccccagcccaggctctcaggagacagtaataaccaccaagggccatattccctcctcattagcctaccagat

SEQ ID NO: 275101 - DNA, 181 bp, Homo sapiens
tgtgaattctttaataattatataacctacaaagatctttcagtgaagacttaatttttgactcattttattgtgccttttgttgaatagagtttcttaattttaagttactcaaatttattattttattttatggcttctgctttttgtgtcttgttaaataaatccttactttgagtac

SEQ ID NO: 275102 - DNA, 230 bp, Homo sapiens
cgacctcctgcaggtccccgccagtgtgaagatcccagttccaggttgggtccgggggtcccagtctctgccctctccagcctgggaccctctcttgggcccctgttcccccctaaatatcactgaggccctccctcaaagcagcgaggcccggggtgatgtcagccaaggaaagcccccgtgagaggactgtggccgcgttttacagatgagaatgccggggcccagag

SEQ ID NO: 275103 - DNA, 311 bp, Homo sapiens
aagctcccagccagaagtaatatttctactcgtagagttccttatcactgggtgttcacattttcttatttttgtctctcattttatatagtgattatttggtatgtattttatacattttatttacattagaatatggttttgttcaatgtccattctttaaccaacaccacattgtcttgattactagtagctttatagtaagtcttttttatttatttatttattttttgagacagagtctcgctctgtcactgggctggagtgcagtggcaccatcttggttcactgcaaccaacctctgcctcccg

SEQ ID NO: 275104 - DNA, 816 bp, Homo sapiens
gctggagtgcattggcactatcttggctcactgcaacctccacctcccgggttcaagctattgtctgcctcagcctccagtagctgggattccaggtgcatgccaccacgcccagctaattttgtatttttagtagagacggggttttaccatgttggccaggctggtctttaactcttgacctccaataatccacccacttcagcctcccaaagtcctgggattataggcatgagccagtatgcccagctgttacttttttttaagccattgggaaaagtgttttaagttacatcttgtttgctgatatataaactacaagttttctgttttgactttgtattcacaatctttctaaacttaattaattctaatttatctatttctatctacataatatctgtgaatgagttttcttttagaatcttacagcttttttgttcttacaatattgcatttctaagattgccagtctagtacagtgttgaataaaagcaatggtagggggcatatttgtttcattgctgataataggtaaagttttcaacattttactattaaatataaggtttatagtttctttgtagataaatttctaatattaaggaagttcctctgtctattcctaggtttctaggaagctctcaaacatcttgaacagatactcagattttataaaaagtctttcttctatctttggagatgattttgatttttctttattgttaatatggcggttacattgttctttgaatgttaaagcaatctagcctccctgaactaaataaaccaaacccaatttggtcttgaagtttt

SEQ ID NO: 275105 - DNA, 427 bp, Homo sapiens
agagtgactctagattatcccgagtgtcttcaagaatctattgcttttttgttcttacaatattgcatttctaagattgccagtctagtacagtgttgaataaaagcaatggtagggggcatatttgtttcattgctgataataggtaaagttttcaacattttactattaaatataaggtttatagtttctttgtagataaatttctaatattaaggaagttcctctgtctattcctaggtttctaggaagctctcaaacatcttgaacagatactcagattttataaaaagtctttcttctatctttggagatgattttgatttttctttattgttaatatggcggttacattgttctttgaatgttaaagcaatctagcctccctgaactaaataaaccaaacccaatttggtcttgaagtttt

SEQ ID NO: 275106 - DNA, 521 bp, Homo sapiens
gaaatatattcacagagaagagggcaccaagaattaacaacctgaccagcacacacagtctatcagaaatacagaaaatcaccacaatgcagttgccaacaaaggaccaaagtaagtctgttcaattcaataataatgttactttatgataaagattattttgaatatttctaggacaaaaagatcataaggaaagggaattcactggaacagcttctaaaacaagaatccacccgatttttcaagtgctaaagctgtctatactttatgtcaacaaatacaaacattcagttatataactctattttccattttttaaactatttttaatatacccatcaccattatcacaaaattagcaaaatcattataaatttatctttccctctataatctagcttctttcaaatatacgaatatgaagggcggggtgagggggattccaaactcattaaataagtcatattggggccaggcatggtggctcatgcctgtaatcccagcactttgggaggacaagg

SEQ ID NO: 275107 - DNA, 542 bp, Homo sapiens
ttttgttagacgtaagaaactgcccactgacagaactttttcttgtttctaaatttaaccatttaagttgctaattcttctttccctctttgaggtgaacccagggcagcaagcaacagtgtgatcttctactcaccaaatccagaagtaagaccagggcagtccagtcaaggctgcccaacacctgccatttccatatggttcaccccactgctgaatttcccacatggctggaccagagacatgtatgggcactttggtttggacaaaccacacaccaaagcaaatgcatactgacatacatttaatttgagcatgttctgaatgttgtctgacaccatgaaatactgttcttccagggaggtcaaggaaacggctgtagcaaatgcaaggaaagggcttcccattgccctccttagagagaacaggaggcactgataactcccagcaacaagacactgtctacaagggattatttcctctgtgatatcctagcactgcaccacagaggttaacttctgaagcagtataagaggaagtag

SEQ ID NO: 275108 - DNA, 623 bp, Homo sapiens
catgagctgctcgctctgacttagagccctgcccttgcacggtgtacttgaacctccaagctaatattctgcttttccacgtgccccattcaggtttagccactcagctgtgcaaaatcttattcccaatttagggtcaccatgtgctctgacctctacctggagtgctttgcccctgcccttagctcagtgtcacatatgccctcttgtctctcttagcactccgatgttttctctgttacctgcctcccctagagaagccaacttgccctgagatgaaggaccccacctgtcatggccatggcagtagccttggtgcttagagcacagcctggcacatggtggtgctcaataaatagctggcaagagagtcactaaagaacgaggaacagagaaaatggcacaggcgtggggagtaaaaatgatgcatctgattgcgcttgaagtgcctgtgggatgcctggtctcaggcttagaaaggtctgagctgacctcacaccgtggctcatgtctgtaatcccagcactttgggagactgaggcaggcagatcacttgaggttaggagctcgagaccagcctggccgacatagtgaaaccttgtctctaccaaaaatacaaaaaa

SEQ ID NO: 275109 - DNA, 5668 bp, Homo sapiens
atacatgttcaatttgatgtttataccgagtccaccaccacacgtgaaatttaataggggtaaataatctcgaccacctctaaaggggtgggtgataaaagctttctgtgatctcaccggctcaagtgtcctctttaatctgaattcatctggagaataactgccctatgatgttcttataaaattacttgtttcctgtgcttagaacttgtctctgggtagagtgtacgcgtctcaagggcaaagactcagtcttgttcgttgacttcacacactgccagcaaataatgtgaatcaatagacctttaacggatgaagaaaaattagcagtttgggagaaggtccttgaaggtagcaaagcgaaaagaagaagggggcgcttgcgcataaacagctgcttctgagaacgaaaactacgtagcatttccgagtcccggtggccgctcaggctgccctttaaagagacgtgtaggaagcccaccctggggcggccgtgggcggagccgcgacctgaacgccgggagacctcaccaggcggaggcggtgtctacctcaccaggcggaggcggtgtctgcctcgcgctgtcctctgaccgccagggggagccctgccgcgcgctgcgctccgggccgcgccgccacgctctctcgacccgcgcgcccgccgcgcaccacccgtcgccacgcccgccgcaggccaagggccagtcacttgcgggccggcgtcccgcagcccattcgcgccccgcccctgccccgccgcgggatgagtaacggttacgaagcactttctcggctacgatttctgcttagtcattgtcttccaggaaacagctccctcagtttggaatcagctctcccgctgcggccgcagtagccggagccggagccgcagccaccggtgccttcctttcccgccgccgcccagccgccgtccggcctccctcgggcccgagcgcagaccaggctccagccgcgcggcgccggcagcctcgcgctccctctcgggtctctctcgggcctcgggcaccgcgtcctgtggggcggccgcctgcctgcccgcccgcccgcagccccttcgctgcgcggcccctgggcggccgctgccatgggcaccgacagccgcgcggccaaggcgctcctggcgcgggcccgcaccctgcacctgcagacggggaacctgctgaactggggccgcctgcggaagaagtgcccgtccacgcacagcgaggagcttcatgattgtatccaaaaaaccttgaatgaatggagttcccaaatcaacccagatttggtcagggagtttccagatgtcttggaatgcactgtatctcatgcagtagaaaagataaatcctgatgaaagagaagaaatgaaagtttctgcaaaactgttcattgtagaatcaaactcttcatcatcaactagaagtgcagttgacatggcctgttcagtccttggagttgcacagctggattctgtgatcattgcttcacctcctattgaagatggagttaatctttccttggagcatttacagccttactgggaggaattagaaaacttagttcagagcaaaaagattgttgccataggtacctctgatctagacaaaacacagttggaacagctgtatcagtgggcacaggtaaaaccaaatagtaaccaagttaatcttgcctcctgctgtgtgatgccaccagatttgactgcatttgctaaacaatttgacatacagctgttgactcacaatgatccaaaagaactgctttctgaagcaagtttccaagaagctcttcaggaaagcattcctgacattcaagcgcacgagtgggtgccgctgtggctactgcggtattcggtcattgtgaaaagtagaggaattatcaaatcaaaaggctacattttacaagctaaaagaaggggttcttaactgacttaggagcataacttacctgtaatttccttcaatatgagagaaaattgagatgtgtaaaaatctagttactgcctgtaaatggtgtcattgaggcagatattctttcgtcatatttgacagtatgttgtctgtcaagttttaaatacttatcttgcctccatatcaatccattctcatgaacctctgtattgctttccttaaactattgttttctaattgaaattgtctataaagaaaatacttgcaatatatttttcctttatttttatgactaatataaatcaagaaaatttgttgttagatatattttggcctaggtatcagggtaatgtatatacatattttttatttccaaaaaaaattcattaattgcttcttaactcttattataaccaagcaatttaattacaattgttaaaactgaaatactggaagaagatatttttcctgtcattgatgagatatatcagagtaactggagtagctgggatttactagtagtgtaaataaaattcactcttcaatacatgaatggaaacttaaatttttttttatgtgtccttgcttatagtttagctgtaataatttaaccttgtattcttgtgccatattctgtctttttattacttataaagacaaaccaaagtaaatctgaaaggagactagaagctttgaaattattgttgggggttttataaaagcaactactgtcacctccatccagattcttttaaattattgatccatccatagtatatattgctactcattcaagaatcctcaataagtattgagtatttaccatatgttgggatactgtgggctctggagagaggagggggcaatagagctaggaattaagaatcagttgagtaaaatgtgtaatatttattccccattaataactgactaggaaggactaaaagccagaaaggggatgaaaaaaaaatccttaattcagggccgacattatctacttaaacaactttgagatatggtcttaattattttaaagcagaataatataattgaaagtttatagctaaaagagactatataggtcatttagtataattcttcattagtttacgaaccacaaaattgcaaataaataagctatgaactttgatgtacactataaatctccttaattctataaatttgtgtctgtaacctgaatagtttgaaaacttctttaaaaatctcttgtatttcatccgggcgcagtggctcacacctgtaatcccagcactttgggaggccgaggtgggcagatcacgaggtcaggagtttgagaccagcctgaccaacatggtaaaaccccatctctactaaaatacaaaaattggctgggcgtggtggcactcgcctgtaatctcagctacttgggaggctgaggcaggagaatcgcttgaacccgggaggcggaggttacagtgagccgagatcacatcactgcactccagcctgggcgacagagcgagactccatctcaaaaaaaaaaaaaaactcttgtatctcaatatttttaaaccacaggcctaaataaaactaattttgctcaagttttctcaacctagggaaaaagaactatggttccatattcaaaataaatattatagacccttttcctaagtaggattttgtggtttactgattgggtaatttgatcattaaaattatgtgaaatctgcccgggcacacctcatgcctgtaatcccagcactctgggaggccaaggcagatgatcacctgaggtcaggagttctagaccagcctggctaacatggtgaaaccctgtatctgctaaaaatacaaaaattagccaggcgtggtggcgggctcctgtaatcccagctactttggaggcgaggcacgagaatcgcttgaacctgggaggcggagtttgcagtgagccgagatcacgccattgcactccagcctgggcgacagagcgagactgcgtctcaaaaaaaaaaaaaaaagaaaaattatgtgaaatcatgtgatttgcctgggaaaacttgtttagatattgagctacttatgccttctagcctttatattaattgtatgtaatgttattaaatatatatatagttcatctttacatttggaaatgcccaacatttttttcatataagtccttaaacaagcgttcattttattttaaatctatacagtgaactggccaagatattttaagagggaactttaatatcccatttattgtttttataaccctggacttataaaaatgggttgtttgaagggttattttgaaagtgggggaaaaaaaaacttagttgctaatgtatctaaacttcagcagagctttttggtgatctcctacctgcaccctcaactcttgacaaagaagcaagactatagattcattttctgaaggggatcatgtatggaatttttgatgagtttttacttttacctctctactcttgattttctattattgaatactcttttttttttcatgaactatcagaatatagtgaacacttttcaaatatttaaggacttaatgtttaaaaagccataaaatagagagtggtaatactaccaaataattacttaaaactgaaagctaagttatcaatagtttatataagagatgttttctgaggagatgtgcatccagtgagaccaaggtagaaagtttatataattgttttttttccagtaaatatgaaaaaaaaagctgtagcttgtttattacatgtccaaaatacagtggagccttactttaacacaatgtactgtaacttggaatttgttctgttatgagtctatcttgaattcccatccatgaaactgtagtcaccaaaagcaacaagtattttcacatgatgtaaaagaccatactatgatggccattgctagaaattgaatcacaaataatagctaataatttttcatttttcaaaaaagatcatttggatagcagctatgtataaaatggaaaataaaaaattattctattttgcatgaatagttcagactttcccataccacagccaagcagtaactaaaattaggatcttaattttcaatgataaaaggtctaaggttcatttaattatgctcctttaacactgtctttctagatttttcacccagtattttcaaaatttgggaatgtaaacaattgatatatttattgtatgttggctagcagttcatccttctgcaaaatatgcattcagagaaatgtgaagcttgttttaatgaagacttaaaccatttgtgtcatttgtgttttcatattcaaatacaccaaattaaaattctgaacctatatttttcatcattaacttcctaatataccagaacatatacctttttcatgtaaagttggcaatgggatatggcagttttatttttgaaaaatatgtaacatgactttaatatttttatagttttcagaattagaaacataggaagggaaaatgttttaattagataagtcaactttttatgtgtctgtagtggtgtactataatagcaaattataaagcattattaaatgtttataataatttttaatattacctacattatgaatttaactaaaataaagtgtgagttgtatattttttaattgggttgtttcaatagctggaagcatcctgaagcattatattgatttttgaactatttgaactcaaactgagtatgatttgaaaataaattaataatttaaaaacatccaaa

SEQ ID NO: 275110 - DNA, 5682 bp, Homo sapiens
atacatgttcaatttgatgtttataccgagtccaccaccacacgtgaaatttaataggggtaaataatctcgaccacctctaaaggggtgggtgataaaagctttctgtgatctcaccggctcaagtgtcctctttaatctgaattcatctggagaataactgccctatgatgttcttataaaattacttgtttcctgtgcttagaacttgtctctgggtagagtgtacgcgtctcaagggcaaagactcagtcttgttcgttgacttcacacactgccagcaaataatgtgaatcaatagacctttaacggatgaagaaaaattagcagtttgggagaaggtccttgaaggtagcaaagcgaaaagaagaagggggcgcttgcgcataaacagctgcttctgagaacgaaaactacgtagcatttccgagtcccggtggccgctcaggctgccctttaaagagacgtgtaggaagcccaccctggggcggccgtgggcggagccgcgacctgaacgccgggagacctcaccaggcggaggcggtgtctacctcaccaggcggaggcggtgtctgcctcgcgctgtcctctgaccgccagggggagccctgccgcgcgctgcgctccgggccgcgccgccacgctctctcgacccgcgcgcccgccgcgcaccacccgtcgccacgcccgccgcaggccaagggccagtcacttgcgggccggcgtcccgcagcccattcgcgccccgcccctgccccgccgcgggatgagtaacggttacgaagcactttctcggctacgatttctgcttagtcattgtcttccaggaaacagctccctcagtttggaatcagctctcccgctgcggccgcagtagccggagccggagccgcagccaccggtgccttcctttcccgccgccgcccagccgccgtccggcctccctcgggcccgagcgcagaccaggctccagccgcgcggcgccggcagcctcgcgctccctctcgggtctctctcgggcctcgggcaccgcgtcctgtggggcggccgcctgcctgcccgcccgcccgcagccccttcgctgcgcggcccctgggcggccgctgccatgggcaccgacagccgcgcggccaaggcgctcctggcgcgggcccgcaccctgcacctgcagacggggaacctgctgaactggggccgcctgcggaagaagtgcccgtccacgcacagcgaggagcttcatgattgtatccaaaaaaccttgaatgaatggagttcccaaatcaacccagatttggtcagggagtttccagatgtcttggaatgcactgtatctcatgcagtagaaaagataaatcctgatgaaagagaagaaatgaaagtttctgcaaaactgttcattgtagaatcaaactcttcatcatcaactagaagtgcagttgacatggcctgttcagtccttggagttgcacagctggattctgtgatcattgcttcacctcctattgaagatggagttaatctttccttggagcatttacagccttactgggaggaattagaaaacttagttcagagcaaaaagattgttgccataggtacctctgatctagacaaaacacagttggaacagctgtatcagtgggcacaggtaaaaccaaatagtaaccaagttaatcttgcctcctgctgtgtgatgccaccagatttgactgcatttgctaaacaatttgacatacagctgttgactcacaatgatccaaaagaactgctttctgaagcaagtttccaagaagctcttcaggaaagcattcctgacattcaagcgcacgagtgggtgccgctgtggctactgcggtattcggtcattgtgaaaagtagaggaattatcaaatcaaaaggctacattttacaagctaaaagaaggggttcttaactgacttaggagcataacttacctgtaatttccttcaatatgagagaaaattgagatgtgtaaaaatctagttactgcctgtaaatggtgtcattgaggcagatattctttcgtcatatttgacagtatgttgtctgtcaagttttaaatacttatcttgcctccatatcaatccattctcatgaacctctgtattgctttccttaaactattgttttctaattgaaattgtctataaagaaaatacttgcaatatatttttcctttatttttatgactaatataaatcaagaaaatttgttgttagatatattttggcctaggtatcagggtaatgtatatacatattttttatttccaaaaaaaattcattaattgcttcttaactcttattataaccaagcaatttaattacaattgttaaaactgaaatactggaagaagatatttttcctgtcattgatgagatatatcagagtaactggagtagctgggatttactagtagtgtaaataaaattcactcttcaatacatgaatggaaacttaaatttttttttatgtgtccttgcttatagtttagctgtaataatttaaccttgtattcttgtgccatattctgtctttttattacttataaagacaaaccaaagtaaatctgaaaggagactagaagctttgaaattattgttgggggttttataaaagcaactactgtcacctccatccagattcttttaaattattgatccatccatagtatatattgcatatgttgggatactgtgggctctggagagaggagggggcaatagagctaggaattaagaatcagttgagtaaaatgtgtaatatttattccccattaataactgactaggaaggactaaaagccagaaaggggatgaaaaaaaaatccttaattcagggccgacattatctacttaaacaactttgagatatggtcttaattattttaaagcagaataatataattgaaagtttatagctaaaagagactatataggtcatttagtataattcttcattagtttacgaaccacaaaattgcaaataaataagctatgaactttgatgtacactataaatctccttaattctataaatttgtgtctgtaacctgaatagtttgaaaacttctttaaaaatctcttgtatttcatccgggcgcagtggctcacacctgtaatcccagcactttgggaggccgaggtgggcagatcacgaggtcaggagtttgagaccagcctgaccaacatggtaaaaccccatctctactaaaatacaaaaattggctgggcgtggtggcactcgcctgtaatctcagctacttgggaggctgaggcaggagaatcgcttgaacccgggaggcggaggttacagtgagccgagatcacatcactgcactccagcctgggcgacagagcgagactccatctcaaaaaaaaaaaaaaactcttgtatctcaatatttttaaaccacaggcctaaataaaactaattttgctcaagttttctcaacctagggaaaaagaactatggttccatattcaaaataaatattatagacccttttcctaagtaggattttgtggtttactgattgggtaatttgatcattaaaattatgtgaaatctgcccgggcacacctcatgcctgtaatcccagcactctgggaggccaaggcagatgatcacctgaggtcaggagttctagaccagcctggctaacatggtgaaaccctgtatctgctaaaaatacaaaaattagccaggcgtggtggcgggctcctgtaatcccagctactttggaggcgaggcacgagaatcgcttgaacctgggaggcggagtttgcagtgagccgagatcacgccattgcactccagcctgggcgacagagcgagactgcgtctcaaaaaaaaaaaaaaaagaaaaattatgtgaaatcatgtgatttgcctgggaaaacttgtttagatattgagctacttatgccttctagcctttatattaattgtatgtaatgttattaaatatatatatagttcatctttacatttggaaatgcccaacatttttttcatataagtccttaaacaagcgttcattttattttaaatctatacagtgaactggccaagatattttaagagggaactttaatatcccatttattgtttttataaccctggacttataaaaatgggttgtttgaagggttattttgaaagtgggggaaaaaaaaacttagttgctaatgtatctaaacttcagcagagctttttggtgatctcctacctgcaccctcaactcttgacaaagaagcaagactatagattcattttctgaaggggatcatgtatggaatttttgatgagtttttacttttacctctctactcttgattttctattattgaatactcttttaaaacactgatttttaaggctttatatatgttttccaggctgatgttcacatctttttttcatgaactatcagaatatagtgaacacttttcaaatatttaaggacttaatgtttaaaaagccataaaatagagagtggtaatactaccaaataattacttaaaactgaaagctaagttatcaatagtttatataagagatgttttctgaggagatgtgcatccagtgagaccaaggtagaaagtttatataattgttttttttccagtaaatatgaaaaaaaaagctgtagcttgtttattacatgtccaaaatacagtggagccttactttaacacaatgtactgtaacttggaatttgttctgttatgagtctatcttgaattcccatccatgaaactgtagtcaccaaaagcaacaagtattttcacatgatgtaaaagaccatactatgatggccattgctagaaattgaatcacaaataatagctaataatttttcatttttcaaaaaagatcatttggatagcagctatgtataaaatggaaaataaaaaattattctattttgcatgaatagttcagactttcccataccacagccaagcagtaactaaaattaggatcttaattttcaatgataaaaggtctaaggttcatttaattatgctcctttaacactgtctttctagatttttcacccagtattttcaaaatttgggaatgtaaacaattgatatatttattgtatgttggctagcagttcatccttctgcaaaatatgcattcagagaaatgtgaagcttgttttaatgaagacttaaaccatttgtgtcatttgtgttttcatattcaaatacaccaaattaaaattctgaacctatatttttcatcattaacttcctaatataccagaacatatacctttttcatgtaaagttggcaatgggatatggcagttttatttttgaaaaatatgtaacatgactttaatatttttatagttttcagaattagaaacataggaagggaaaatgttttaattagataagtcaactttttatgtgtctgtagtggtgtactataatagcaaattataaagcattattaaatgtttataataatttttaatattacctacattatgaatttaactaaaataaagtgtgagttgtatattttttaattgggttgtttcaatagctggaagcatcctgaagcattatattgatttttgaactatttgaactcaaactgagtatgatttgaaaataaattaataatttaaaaacatccaaa

SEQ ID NO: 275111 - DNA, 4186 bp, Homo sapiens
tgggcaagctaaaagaaggggttcttaactgacttaggagcataacttacctgtaaaatgtacctctgatctagacaaaacacagttggaacagctgtatcagtgggcacaggtaaaaccaaatagtaaccaagttaatcttgcctcctgctgtgtgatgccaccagatttgactgcatttgctaaacaatttgacatacagctgttgactcacaatgatccaaaagaactgctttctgaagcaagtttccaagaagctcttcaggaaagcattcctgacattcaagcgcacgagtgggtgccgctgtggctactgcggtattcggtcattgtgaaaagtagaggaattatcaaatcaaaaggctacattttacaagctaaaagaaggggttcttaactgacttaggagcataacttacctgtaatttccttcaatatgagagaaaattgagatgtgtaaaaatctagttactgcctgtaaatggtgtcattgaggcagatattctttcgtcatatttgacagtatgttgtctgtcaagttttaaatacttatcttgcctccatatcaatccattctcatgaacctctgtattgctttccttaaactattgttttctaattgaaattgtctataaagaaaatacttgcaatatatttttcctttatttttatgactaatataaatcaagaaaatttgttgttagatatattttggcctaggtatcagggtaatgtatatacatattttttatttccaaaaaaaattcattaattgcttcttaactcttattataaccaagcaatttaattacaattgttaaaactgaaatactggaagaagatatttttcctgtcattgatgagatatatcagagtaactggagtagctgggatttactagtagtgtaaataaaattcactcttcaatacatgaatggaaacttaaatttttttttatgtgtccttgcttatagtttagctgtaataatttaaccttgtattcttgtgccatattctgtctttttattacttataaagacaaaccaaagtaaatctgaaaggagactagaagctttgaaattattgttgggggttttataaaagcaactactgtcacctccatccagattcttttaaattattgatccatccatagtatatattgctactcattcaagaatcctcaataagtattgagtatttaccatatgttgggatactgtgggctctggagagaggagggggcaatagagctaggaattaagaatcagttgagtaaaatgtgtaatatttattccccattaataactgactaggaaggactaaaagccagaaaggggatgaaaaaaaaatccttaattcagggccgacattatctacttaaacaactttgagatatggtcttaattattttaaagcagaataatataattgaaagtttatagctaaaagagactatataggtcatttagtataattcttcattagtttacgaaccacaaaattgcaaataaataagctatgaactttgatgtacactataaatctccttaattctataaatttgtgtctgtaacctgaatagtttgaaaacttctttaaaaatctcttgtatttcatccgggcgcagtggctcacacctgtaatcccagcactttgggaggccgaggtgggcagatcacgaggtcaggagtttgagaccagcctgaccaacatggtaaaaccccatctctactaaaatacaaaaattggctgggcgtggtggcactcgcctgtaatctcagctacttgggaggctgaggcaggagaatcgcttgaacccgggaggcggaggttacagtgagccgagatcacatcactgcactccagcctgggcgacagagcgagactccatctcaaaaaaaaaaaaaaactcttgtatctcaatatttttaaaccacaggcctaaataaaactaattttgctcaagttttctcaacctagggaaaaagaactatggttccatattcaaaataaatattatagacccttttcctaagtaggattttgtggtttactgattgggtaatttgatcattaaaattatgtgaaatctgcccgggcacacctcatgcctgtaatcccagcactctgggaggccaaggcagatgatcacctgaggtcaggagttctagaccagcctggctaacatggtgaaaccctgtatctgctaaaaatacaaaaattagccaggcgtggtggcgggctcctgtaatcccagctactttggaggcgaggcacgagaatcgcttgaacctgggaggcggagtttgcagtgagccgagatcacgccattgcactccagcctgggcgacagagcgagactgcgtctcaaaaaaaaaaaaaaaagaaaaattatgtgaaatcatgtgatttgcctgggaaaacttgtttagatattgagctacttatgccttctagcctttatattaattgtatgtaatgttattaaatatatatatagttcatctttacatttggaaatgcccaacatttttttcatataagtccttaaacaagcgttcattttattttaaatctatacagtgaactggccaagatattttaagagggaactttaatatcccatttattgtttttataaccctggacttataaaaatgggttgtttgaagggttattttgaaagtgggggaaaaaaaaacttagttgctaatgtatctaaacttcagcagagctttttggtgatctcctacctgcaccctcaactcttgacaaagaagcaagactatagattcattttctgaaggggatcatgtatggaatttttgatgagtttttacttttacctctctactcttgattttctattattgaatactcttttaaaacactgatttttaaggctttatatatgttttccaggctgatgttcacatctttttttcatgaactatcagaatatagtgaacacttttcaaatatttaaggacttaatgtttaaaaagccataaaatagagagtggtaatactaccaaataattacttaaaactgaaagctaagttatcaatagtttatataagagatgttttctgaggagatgtgcatccagtgagaccaaggtagaaagtttatataattgttttttttccagtaaatatgaaaaaaaaagctgtagcttgtttattacatgtccaaaatacagtggagccttactttaacacaatgtactgtaacttggaatttgttctgttatgagtctatcttgaattcccatccatgaaactgtagtcaccaaaagcaacaagtattttcacatgatgtaaaagaccatactatgatggccattgctagaaattgaatcacaaataatagctaataatttttcatttttcaaaaaagatcatttggatagcagctatgtataaaatggaaaataaaaaattattctattttgcatgaatagttcagactttcccataccacagccaagcagtaactaaaattaggatcttaattttcaatgataaaaggtctaaggttcatttaattatgctcctttaacactgtctttctagatttttcacccagtattttcaaaatttgggaatgtaaacaattgatatatttattgtatgttggctagcagttcatccttctgcaaaatatgcattcagagaaatgtgaagcttgttttaatgaagacttaaaccatttgtgtcatttgtgttttcatattcaaatacaccaaattaaaattctgaacctatatttttcatcattaacttcctaatataccagaacatatacctttttcatgtaaagttggcaatgggatatggcagttttatttttgaaaaatatgtaacatgactttaatatttttatagttttcagaattagaaacataggaagggaaaatgttttaattagataagtcaactttttatgtgtctgtagtggtgtactataatagcaaattataaagcattattaaatgtttataataatttttaatattacctacattatgaatttaactaaaataaagtgtgagttgtatattttttaattgggttgtttcaatagctggaagcatcctgaagcattatattgatttttgaactatttgaactcaaactgagtatgatttgaaaataaattaataatttaaaaacatccaaa

SEQ ID NO: 275112 - DNA, 2902 bp, Homo sapiens
tgttctacaacctattgaatgtccaatattaggagaaaactcaacggatccgaggagttgtttattctatcttaattcagggccgacattatctacttaaacaactttgagatatggtcttaattattttaaagcagaataatataattgaaagtttatagctaaaagagactatataggtcatttagtataattcttcattagtttacgaaccacaaaattgcaaataaataagctatgaactttgatgtacactataaatctccttaattctataaatttgtgtctgtaacctgaatagtttgaaaacttctttaaaaatctcttgtatttcatccgggcgcagtggctcacacctgtaatcccagcactttgggaggccgaggtgggcagatcacgaggtcaggagtttgagaccagcctgaccaacatggtaaaaccccatctctactaaaatacaaaaattggctgggcgtggtggcactcgcctgtaatctcagctacttgggaggctgaggcaggagaatcgcttgaacccgggaggcggaggttacagtgagccgagatcacatcactgcactccagcctgggcgacagagcgagactccatctcaaaaaaaaaaaaaaactcttgtatctcaatatttttaaaccacaggcctaaataaaactaattttgctcaagttttctcaacctagggaaaaagaactatggttccatattcaaaataaatattatagacccttttcctaagtaggattttgtggtttactgattgggtaatttgatcattaaaattatgtgaaatctgcccgggcacacctcatgcctgtaatcccagcactctgggaggccaaggcagatgatcacctgaggtcaggagttctagaccagcctggctaacatggtgaaaccctgtatctgctaaaaatacaaaaattagccaggcgtggtggcgggctcctgtaatcccagctactttggaggcgaggcacgagaatcgcttgaacctgggaggcggagtttgcagtgagccgagatcacgccattgcactccagcctgggcgacagagcgagactgcgtctcaaaaaaaaaaaaaaaagaaaaattatgtgaaatcatgtgatttgcctgggaaaacttgtttagatattgagctacttatgccttctagcctttatattaattgtatgtaatgttattaaatatatatatagttcatctttacatttggaaatgcccaacatttttttcatataagtccttaaacaagcgttcattttattttaaatctatacagtgaactggccaagatattttaagagggaactttaatatcccatttattgtttttataaccctggacttataaaaatgggttgtttgaagggttattttgaaagtgggggaaaaaaaaacttagttgctaatgtatctaaacttcagcagagctttttggtgatctcctacctgcaccctcaactcttgacaaagaagcaagactatagattcattttctgaaggggatcatgtatggaatttttgatgagtttttacttttacctctctactcttgattttctattattgaatactcttttaaaacactgatttttaaggctttatatatgttttccaggctgatgttcacatctttttttcatgaactatcagaatatagtgaacacttttcaaatatttaaggacttaatgtttaaaaagccataaaatagagagtggtaatactaccaaataattacttaaaactgaaagctaagttatcaatagtttatataagagatgttttctgaggagatgtgcatccagtgagaccaaggtagaaagtttatataattgttttttttccagtaaatatgaaaaaaaaagctgtagcttgtttattacatgtccaaaatacagtggagccttactttaacacaatgtactgtaacttggaatttgttctgttatgagtctatcttgaattcccatccatgaaactgtagtcaccaaaagcaacaagtattttcacatgatgtaaaagaccatactatgatggccattgctagaaattgaatcacaaataatagctaataatttttcatttttcaaaaaagatcatttggatagcagctatgtataaaatggaaaataaaaaattattctattttgcatgaatagttcagactttcccataccacagccaagcagtaactaaaattaggatcttaattttcaatgataaaaggtctaaggttcatttaattatgctcctttaacactgtctttctagatttttcacccagtattttcaaaatttgggaatgtaaacaattgatatatttattgtatgttggctagcagttcatccttctgcaaaatatgcattcagagaaatgtgaagcttgttttaatgaagacttaaaccatttgtgtcatttgtgttttcatattcaaatacaccaaattaaaattctgaacctatatttttcatcattaacttcctaatataccagaacatatacctttttcatgtaaagttggcaatgggatatggcagttttatttttgaaaaatatgtaacatgactttaatatttttatagttttcagaattagaaacataggaagggaaaatgttttaattagataagtcaactttttatgtgtctgtagtggtgtactataatagcaaattataaagcattattaaatgtttataataatttttaatattacctacattatgaatttaactaaaataaagtgtgagttgtatattttttaattgggttgtttcaatagctggaagcatcctgaagcattatattgatttttgaactatttgaactcaaactgagtatgatttgaaaataaattaataatttaaaaacatccaaa

SEQ ID NO: 275113 - DNA, 414 bp, Homo sapiens
atgtgtatccaaatgtagtaatcagttttgttttctttgttacccagcaaaactgttcattgtagaatcaaactcttcatcatcaactagaagtgcagttgacatgggtaagcaaaaactgaattttttatcttaatagtggactttaaattagtataggtgtattagttataacttgtgcttaggtccaggtaaaaagaaaatgagttgattccaattttaccttttaaagttctagcttagtttcttaaggcttctgtaaaatcatactgacttatgtagggtcatattttgatatgcaagaggaatgtaaaaggtgtaatgtacttaaatgttcactatccgtttggagatagaagttcttattcttagcccttttagtactagaggtgaaatatcaaaaccaaacaacgg

SEQ ID NO: 275114 - DNA, 5722 bp, Homo sapiens
atacatgttcaatttgatgtttataccgagtccaccaccacacgtgaaatttaataggggtaaataatctcgaccacctctaaaggggtgggtgataaaagctttctgtgatctcaccggctcaagtgtcctctttaatctgaattcatctggagaataactgccctatgatgttcttataaaattacttgtttcctgtgcttagaacttgtctctgggtagagtgtacgcgtctcaagggcaaagactcagtcttgttcgttgacttcacacactgccagcaaataatgtgaatcaatagacctttaacggatgaagaaaaattagcagtttgggagaaggtccttgaaggtagcaaagcgaaaagaagaagggggcgcttgcgcataaacagctgcttctgagaacgaaaactacgtagcatttccgagtcccggtggccgctcaggctgccctttaaagagacgtgtaggaagcccaccctggggcggccgtgggcggagccgcgacctgaacgccgggagacctcaccaggcggaggcggtgtctacctcaccaggcggaggcggtgtctgcctcgcgctgtcctctgaccgccagggggagccctgccgcgcgctgcgctccgggccgcgccgccacgctctctcgacccgcgcgcccgccgcgcaccacccgtcgccacgcccgccgcaggccaagggccagtcacttgcgggccggcgtcccgcagcccattcgcgccccgcccctgccccgccgcgggatgagtaacggttacgaagcactttctcggctacgatttctgcttagtcattgtcttccaggaaacagctccctcagtttggaatcagctctcccgctgcggccgcagtagccggagccggagccgcagccaccggtgccttcctttcccgccgccgcccagccgccgtccggcctccctcgggcccgagcgcagaccaggctccagccgcgcggcgccggcagcctcgcgctccctctcgggtctctctcgggcctcgggcaccgcgtcctgtggggcggccgcctgcctgcccgcccgcccgcagccccttcgctgcgcggcccctgggcggccgctgccatgggcaccgacagccgcgcggccaaggcgctcctggcgcgggcccgcaccctgcacctgcagacggggaacctgctgaactggggccgcctgcggaagaagtgcccgtccacgcacagcgaggagcttcatgattgtatccaaaaaaccttgaatgaatggagttcccaaatcaacccagatttggtcagggagtttccagatgtcttggaatgcactgtatctcatgcagtagaaaagataaatcctgatgaaagagaagaaatgaaagtttctgcaaaactgttcattgtagaatcaaactcttcatcatcaactagaagtgcagttgacatggcctgttcagtccttggagttgcacagctggattctgtgatcattgcttcacctcctattgaagatggagttaatctttccttggagcatttacagccttactgggaggaattagaaaacttagttcagagcaaaaagattgttgccataggtacctctgatctagacaaaacacagttggaacagctgtatcagtgggcacaggtaaaaccaaatagtaaccaagttaatcttgcctcctgctgtgtgatgccaccagatttgactgcatttgctaaacaatttgacatacagctgttgactcacaatgatccaaaagaactgctttctgaagcaagtttccaagaagctcttcaggaaagcattcctgacattcaagcgcacgagtgggtgccgctgtggctactgcggtattcggtcattgtgaaaagtagaggaattatcaaatcaaaaggctacattttacaagctaaaagaaggggttcttaactgacttaggagcataacttacctgtaatttccttcaatatgagagaaaattgagatgtgtaaaaatctagttactgcctgtaaatggtgtcattgaggcagatattctttcgtcatatttgacagtatgttgtctgtcaagttttaaatacttatcttgcctccatatcaatccattctcatgaacctctgtattgctttccttaaactattgttttctaattgaaattgtctataaagaaaatacttgcaatatatttttcctttatttttatgactaatataaatcaagaaaatttgttgttagatatattttggcctaggtatcagggtaatgtatatacatattttttatttccaaaaaaaattcattaattgcttcttaactcttattataaccaagcaatttaattacaattgttaaaactgaaatactggaagaagatatttttcctgtcattgatgagatatatcagagtaactggagtagctgggatttactagtagtgtaaataaaattcactcttcaatacatgaatggaaacttaaatttttttttatgtgtccttgcttatagtttagctgtaataatttaaccttgtattcttgtgccatattctgtctttttattacttataaagacaaaccaaagtaaatctgaaaggagactagaagctttgaaattattgttgggggttttataaaagcaactactgtcacctccatccagattcttttaaattattgatccatccatagtatatattgctactcattcaagaatcctcaataagtattgagtatttaccatatgttgggatactgtgggctctggagagaggagggggcaatagagctaggaattaagaatcagttgagtaaaatgtgtaatatttattccccattaataactgactaggaaggactaaaagccagaaaggggatgaaaaaaaaatccttaattcagggccgacattatctacttaaacaactttgagatatggtcttaattattttaaagcagaataatataattgaaagtttatagctaaaagagactatataggtcatttagtataattcttcattagtttacgaaccacaaaattgcaaataaataagctatgaactttgatgtacactataaatctccttaattctataaatttgtgtctgtaacctgaatagtttgaaaacttctttaaaaatctcttgtatttcatccgggcgcagtggctcacacctgtaatcccagcactttgggaggccgaggtgggcagatcacgaggtcaggagtttgagaccagcctgaccaacatggtaaaaccccatctctactaaaatacaaaaattggctgggcgtggtggcactcgcctgtaatctcagctacttgggaggctgaggcaggagaatcgcttgaacccgggaggcggaggttacagtgagccgagatcacatcactgcactccagcctgggcgacagagcgagactccatctcaaaaaaaaaaaaaaactcttgtatctcaatatttttaaaccacaggcctaaataaaactaattttgctcaagttttctcaacctagggaaaaagaactatggttccatattcaaaataaatattatagacccttttcctaagtaggattttgtggtttactgattgggtaatttgatcattaaaattatgtgaaatctgcccgggcacacctcatgcctgtaatcccagcactctgggaggccaaggcagatgatcacctgaggtcaggagttctagaccagcctggctaacatggtgaaaccctgtatctgctaaaaatacaaaaattagccaggcgtggtggcgggctcctgtaatcccagctactttggaggcgaggcacgagaatcgcttgaacctgggaggcggagtttgcagtgagccgagatcacgccattgcactccagcctgggcgacagagcgagactgcgtctcaaaaaaaaaaaaaaaagaaaaattatgtgaaatcatgtgatttgcctgggaaaacttgtttagatattgagctacttatgccttctagcctttatattaattgtatgtaatgttattaaatatatatatagttcatctttacatttggaaatgcccaacatttttttcatataagtccttaaacaagcgttcattttattttaaatctatacagtgaactggccaagatattttaagagggaactttaatatcccatttattgtttttataaccctggacttataaaaatgggttgtttgaagggttattttgaaagtgggggaaaaaaaaacttagttgctaatgtatctaaacttcagcagagctttttggtgatctcctacctgcaccctcaactcttgacaaagaagcaagactatagattcattttctgaaggggatcatgtatggaatttttgatgagtttttacttttacctctctactcttgattttctattattgaatactcttttaaaacactgatttttaaggctttatatatgttttccaggctgatgttcacatctttttttcatgaactatcagaatatagtgaacacttttcaaatatttaaggacttaatgtttaaaaagccataaaatagagagtggtaatactaccaaataattacttaaaactgaaagctaagttatcaatagtttatataagagatgttttctgaggagatgtgcatccagtgagaccaaggtagaaagtttatataattgttttttttccagtaaatatgaaaaaaaaagctgtagcttgtttattacatgtccaaaatacagtggagccttactttaacacaatgtactgtaacttggaatttgttctgttatgagtctatcttgaattcccatccatgaaactgtagtcaccaaaagcaacaagtattttcacatgatgtaaaagaccatactatgatggccattgctagaaattgaatcacaaataatagctaataatttttcatttttcaaaaaagatcatttggatagcagctatgtataaaatggaaaataaaaaattattctattttgcatgaatagttcagactttcccataccacagccaagcagtaactaaaattaggatcttaattttcaatgataaaaggtctaaggttcatttaattatgctcctttaacactgtctttctagatttttcacccagtattttcaaaatttgggaatgtaaacaattgatatatttattgtatgttggctagcagttcatccttctgcaaaatatgcattcagagaaatgtgaagcttgttttaatgaagacttaaaccatttgtgtcatttgtgttttcatattcaaatacaccaaattaaaattctgaacctatatttttcatcattaacttcctaatataccagaacatatacctttttcatgtaaagttggcaatgggatatggcagttttatttttgaaaaatatgtaacatgactttaatatttttatagttttcagaattagaaacataggaagggaaaatgttttaattagataagtcaactttttatgtgtctgtagtggtgtactataatagcaaattataaagcattattaaatgtttataataatttttaatattacctacattatgaatttaactaaaataaagtgtgagttgtatattttttaattgggttgtttcaatagctggaagcatcctgaagcattatattgatttttgaactatttgaactcaaactgagtatgatttgaaaataaattaataatttaaaaacatccaaa

SEQ ID NO: 275115 - DNA, 2296 bp, Homo sapiens
atacatgttcaatttgatgtttataccgagtccaccaccacacgtgaaatttaataggggtaaataatctcgaccacctctaaaggggtgggtgataaaagctttctgtgatctcaccggctcaagtgtcctctttaatctgaattcatctggagaataactgccctatgatgttcttataaaattacttgtttcctgtgcttagaacttgtctctgggtagagtgtacgcgtctcaagggcaaagactcagtcttgttcgttgacttcacacactgccagcaaataatgtgaatcaatagacctttaacggatgaagaaaaattagcagtttgggagaaggtccttgaaggtagcaaagcgaaaagaagaagggggcgcttgcgcataaacagctgcttctgagaacgaaaactacgtagcatttccgagtcccggtggccgctcaggctgccctttaaagagacgtgtaggaagcccaccctggggcggccgtgggcggagccgcgacctgaacgccgggagacctcaccaggcggaggcggtgtctacctcaccaggcggaggcggtgtctgcctcgcgctgtcctctgaccgccagggggagccctgccgcgcgctgcgctccgggccgcgccgccacgctctctcgacccgcgcgcccgccgcgcaccacccgtcgccacgcccgccgcaggccaagggccagtcacttgcgggccggcgtcccgcagcccattcgcgccccgcccctgccccgccgcgggatgagtaacggttacgaagcactttctcggctacgatttctgcttagtcattgtcttccaggaaacagctccctcagtttggaatcagctctcccgctgcggccgcagtagccggagccggagccgcagccaccggtgccttcctttcccgccgccgcccagccgccgtccggcctccctcgggcccgagcgcagaccaggctccagccgcgcggcgccggcagcctcgcgctccctctcgggtctctctcgggcctcgggcaccgcgtcctgtggggcggccgcctgcctgcccgcccgcccgcagccccttcgctgcgcggcccctgggcggccgctgccatgggcaccgacagccgcgcggccaaggcgctcctggcgcgggcccgcaccctgcacctgcagacggggaacctgctgaactggggccgcctgcggaagaagtgcccgtccacgcacagcgaggagcttcatgattgtatccaaaaaaccttgaatgaatggagttcccaaatcaacccagatttggtcagggagtttccagatgtcttggaatgcactgtatctcatgcagtagaaaagataaatcctgatgaaagagaagaaatgaaagtttctgcaaaactgttcattgtagaatcaaactcttcatcatcaactagaagtgcagttgacatggcctgttcagtccttggagttgcacagctggattctgtgatcattgcttcacctcctattgaagatggagttaatctttccttggagcatttacagccttactgggaggaattagaaaacttagttcagagcaaaaagattgttgccataggtacctctgatctagacaaaacacagttggaacagctgtatcagtgggcacaggcgtggggagtaaaaatgatgcatctgattgcgcttgaagtgcctgtgggatgcctggtctcaggcttagaaaggtctgagctgacctcacaccgtggctcatgtctgtaatcccagcactttgggagactgaggcaggcagatcacttgaggttaggagctcgagtgatcagtctgcctcggctgcccaaagtgctgcgattacaagtgtgagccaccgcgctggcctataatgtgttctttactcatgtatatgttttttaatttccataataaagttttttttaaccaaacgctaaaaaaaataaaaaacagaaaaggaaaacacagaacagagaacacaacaaacacacgagaaaacagaacaacaagaacaggacaagaaaaagaagacaagaaagaagaaacaaaaaaaataagaaacacaaagacacaaagaaacacagaaaacaaaaaagatcatcaaaaagaaaaaaaaaaaaagaaaaaatagatagtgcaggggggcggcggcgcagtcgataagttaatatcatatacgcagaggggcgggcgagcaaaattgagcatcattacccacgcgcgtggttttttttatggataggggagggcttggatattatagtgagcagtggctttgtatttacc

SEQ ID NO: 275116 - DNA, 1590 bp, Homo sapiens
gcaagagaaccaaatttcttttgaagctggagaaactgcattatgctttcctggccttcaagaatattttcttaggtatttggaaaggttaagtgttgatttttgaggattaggatagcagaaaaatttgaatgcttttttcccactgagtacctgctgaatacggtctatttgcgtacaactctgccatgtgaactttgagaaaggcatttttataaattaaagcctttatttggttattataattttgtcactctaagtggtctccttttgtatgatctctgcaagattcaaatgcatcagaatatagtatttcatattagattgtggtgagaaacttcttgctttgttttattgtatccttgaattcttttctgtagtgcaatagcatgttattcttttttactcccactgaaggttaaatatatttcttgctaatttttcccctgcatgggcgatagcgattttaaatcttgaacgtgtatgttgagttttcctagatgtggaagtaatcataatttgatatttttagaaagataaattaggtaatgtggctttgtgtatgcagtagagttaatatgcttttattcacctcatggtttctatgtcattaccacctgttggtttttattttttaatggaaaacttgaacttctccaaagtgactagttttaaaataacatttatgtaaggattgtttatacagagaaattgaaaaccagaaggtataaagacaattaaaattatctaaaattctactagttagaagtaactactattaatattttgttctatatccttccaatattttttcatatgtattttttttacatagttggaattgtgcatccatattattttgtaatatgttttattatttaatatattatgaaataaatgtttgtgatttaaaaaatcaatatagaatttcagtgtacaggtgtgctattatctgtttaccattctgtgttgaaggtcttttaggcagtttgcaattttgggatattgtaagttgatggacatccttatacattaaaaaaaattatatggctgattatttcattacaataaattcctagaagtagaattacttaaaagatataaacattttgaaagcttttgatacatatttccaaactgttctcttgaaagattttttaaaataatagttttattgagatataattcacatacccaaaatttatccatttaaagtatacaatgcagtggcttttagtatgttgacggggttatataaccatcaccacaatcaattttagaacatttccagaaaggtttgaaccagtttaaacccagcaatattataaagttttgttttaaaaacagcatttattcataacatttaaagtagtacagtatacaggaacacaacagcttgtgtgatatatactttatatgcatttgagagagattttagaaagtccttcatgagaagatgatgctcctacgtcccattttaagaaaacctgacatattaagcttaagctgattaaacaaaatatgaggtatatttttttgaattataaaattattctcctgagcctgggcgacagagcgagactctgtctc

SEQ ID NO: 275117 - DNA, 1342 bp, Homo sapiens
gacttggtgagcgcgcggcagctttattaaaccacgggataacggctgcccgcagcctccggatcggtgggcgcttgcggaaggggacccggctcagggcccaggctgggactcagccactctgacaggttggagacctcctgcagccacagcacgtcctgcgggaacaagggggcccggggtgaggacctctcagcagcggcccgtggcctgcacctcctgctgagcccttccctgcgcggccctcgcccagttacctccaggcggcttccgaggctcgccctgcccggcgccagggccctgccgtgagcctcgcggtgctcccttcctctaggagtgaggggggccgcggtggcttccgggcggcgcggggcggcctctgacgggctcggggccctggcagagcgcagagctcgcatctcctctatgcgggggctgcccctcttgagcctcttgttttctgcttgcccgctggtatctaggagaaaaacaagcctcttcatcttactttcatggccctgtgctaggagcacccttggccaaggggaagcctgggagaacgggcgccgaggggctcttcccaccgcatccctgtcagcaggtcccatccacaccaaaaccctgcagctgtgggcgcttctggagcagcccgaggctgcagagacgtttcagggtctccctattctctcacccaggcgggagattgtcccgagccctcacttgggggactcaggccgctcagtaactttctgtatagattcttcctggagtctgcactgacaagctcccctccctgccagcctctgtcccccctcacctttctggcctcagttctgtctccctttgttgctcacgttgcattgagcagtgcccataggcagctttcctactcttaactgattcatttgtcaaattaaagcgagtttagatggatagattcttccccagcaggtcttggggatgcagatcaatgagcttttccctgagagaagctcacagatgctaggaggggatgcagacctgtgtacaaagcccagggttagaatagagaaggaagccgaccacctctggatgtgaagaagggtttccatgaggagatacctgagctgaccttttgtttttttgagacaaggtcttgctctgttgcccaggctggagtgcagtggctcagtcctggctcactgcagcctcgacctcctgagttcgagattctcctgtctcagccaccccagtaactgtgattatggccacctgccaccacgcccggctaatttttgtatttttagtagagacggggtgattcatgctcagccaagctgtactcgactcccaaactgtaagg

SEQ ID NO: 275118 - DNA, 282 bp, Homo sapiens
tctccctaattcaggcactgtgttcactgatcccttttgtcactgttttcttttctcctcattttgtctttttatttttttttggccagcctcttagaagttttgtcaatcaattctgactttttcctaaagttgatatttggtttgtcagtagcgtattggagaggcttacagtagtatccagaagaaatggaggtgaagctctgtgtgtactctctgtactccctttaacaaatagattcttaagtgtttctgaaagaaaaagtccttttgtagggctcc

SEQ ID NO: 275119 - DNA, 462 bp, Homo sapiens
ttatatatattggaaattggcatttattattctgtgaattgcctattcatcatatcatttcctcatttatttaattagattgttcattagcttcttattgatttgtaagagcacatttttaaggaaactagctcttatgtgctatgaatatttttcactttgttatgtctttcgatttttgcataaaatttttttctaaaatttccacatggaaattttatataatattatataattgggtcaatcagtcttcattcatttagcatttattgctcgcttaaaaaggttcaggtactgtaggtgtgagaataaagagatgaataaaagacagggagtttcttcgaagggctacactactgggttaaaaagatgagaaagttgcctattaccagatggtgtcatgtaaggctttacagatgcaatttgaaaaacctccaaaataatgagttgaagttccttaga

SEQ ID NO: 275120 - DNA, 535 bp, Homo sapiens
agacaagaaggcctagaattgtctttcagggattgggggcaacatggcaggtgcaaggctgtgaagaccacgtggtttgacccagacaccagcagagctacagctcacagaagtcccgctgaagcaggctgagcagcacctgaggatcccagcagaaggaacaggtgctgggatttattgggttcccaccccatgccagacgcttgattgatgagatgccattattagacccatttcagagaagaaaataaggctcaaagcaggagagtggtctgtgtagggtcatgtggccagaggtagggctgaagttcagctcagcctctcatggcacttcactgaggacacgtgctgggagatcaaggtcagtgaggaaccgagctctgtgggcaaaagagaaacaggatggtctggggagctgaaagatccagtggtgtgcagaagttggggagaggcatctggggccaccaaataagaggagggaagtcggcacctgcctgctgtgcgggggagagagttcctgggagagacagtggga

SEQ ID NO: 275121 - DNA, 485 bp, Homo sapiens
acacatctgtctccaaaaatgccctttctttctctataaaatctgagaggagacttcaggtggcctccactaaccatcttgcttttgtgtctttattctgtctacaattaaaataagttgcatagaattgttttaaaaataatagagaaattctaagcctccgtggtagtcacctgagtgtcttcttttttttttttttgagatggagtctcactctgtcacccaggctggagtgcagtggcacaatctcggttcactgcaacctccgccccccggggttcaagtgattctcctgcctcagcctcccggatagctgggattacaggcacccatcaccacgcccagctaatttttgtatttttattattattattattttttgagatggagtcttgctctgtcgccaggctggagtgcaagtggtgccatcttggctcactgcaacctccgcctcccaggttcaagcaattcccctgcctcagcct

SEQ ID NO: 275122 - DNA, 538 bp, Homo sapiens
gcacttttaaactctgtatcagaattttatattttatcatctacattaatacatacaaaaattacacaaatgtacaaaaatgtaatatttctttatatgagagcattcaagagtcctgtgaagtacattattaatagaactcataggaccaatagcactaattaaaacagatatgacctatattcaagaaaaaaataacaatgacgtgtttctacctgtcccatattacagtaggatatttttattctttttgtttctttttctaataatacttctctaaacttcctgcagccttcaggacaccttacatttatttaatgtgatggaaaactaaatgtagccatgtaaaatttactttatcctacagatctgcttttatataaagtccacatttcagtgatacctggtgtctttctattgtgatgatatcaagctaaatatactctctaaaaaagtatttgagcatgggatagttaggacttttacttacctccaacagtggacttttagacttatgggaacttgtttcctgatttcc

SEQ ID NO: 275123 - DNA, 442 bp, Homo sapiens
gcttataatgagtattaccctgggtcctttattttctctggggagggaataggggaaccctcctgtcccagggcccactaagctgctatgcagctttctccccgccccccaccaacccccagagttatcgctactgctctgtaggaagacagtactcaaaaagtacatttttgcatttccattttgattcttgattctttcgatcatcatttattcatgtagtcaaatattcgttcattcactcaataaatagtgtgtgtctggcaaagagtaaacaagagatcctttaattcacaaatgttattatttgcttaaaaaatcaccatccctttgggttatttttctatgccagtacctttctgtattatctgaattctttctcagacaagcactccttatttgtatagggaaagaaaacaataaaatgtatttccacctagga

SEQ ID NO: 275124 - DNA, 459 bp, Homo sapiens
aaatttctttggttcatgaaatgctgcaaatattacacaattccatgtttcttctttttctaaagagggcagcaactgagtaggcattgaggttgagtgtaagaaaattctcccctactccataggtgctttcaggcatcatggctaatcagctagaggccacatttcccagtctcccttgaagcttgttgtggccatgtgatcagcttcttgtgaatgggagcttgagtagaacacatgactggttaactcttaaatcgtgctagacaaacctctccactgaagtactaatcaacttaaaatatcaacgtacccatggagccaaagcagcttggggagtcagaggaggtctcagggaaatagcgatgcttcaagagagttaaaggctataccagcctcttcccagagccacctttgcacaccttcatttgtgcacaaataaatctattatgattatat

SEQ ID NO: 275125 - DNA, 362 bp, Homo sapiens
aggacccctgctgctccccagcattctttcactgcccaactagcatgtttttgatgtttcagctacactccattacttaatattttttcaacgagccatgcctttacctgagctattctttatctttgttttcctccattgcattaatgcgcattattccttcaagagctagtccacacatctcctctgaaaaagcttcccgggctgtctcttccagagactagttagctgtcaggcaaggcccccaccagtgaagttggtgaacccctcacagagcgggactgggttcttgttttgcaggtccagaaacgtgtgttgccagtgccctcagtgattatcagtattctcaggactgacatgaa

SEQ ID NO: 275126 - DNA, 441 bp, Homo sapiens
atctaggctgcggactaacaataaccgaagatggaaatgtgacagcttttcctccacacccccacccaaggaaaaaatcctaacgcagacaattaacactgggaaaaaagccccaacaaaatactgcatgtttcagacagttttaattgtctgcgttaggatttttcccctggaccggtgatgcttgggaatctaggctgcggactaacaataaccgaagatggaaatgtgacagcttctcctccacacccccacccaaggaaaaaaaaaaaaaaagccatacaatctggagtgggggtggggtctctcttccttgtcagactggggtaaatcaaaagctggtcacgctgggtttttcaaaagcttctcatttaacaagtcctatttgcttttatctttttgttatggaaaaatatattatacaaatgatttcttccttta

SEQ ID NO: 275127 - DNA, 650 bp, Homo sapiens
tcaacctttcactcaggtccaccactgctctttcctccactgaccctctaccccaatttctttttgtttgaagagtgaatagatctctcttcttcactctttctattccccacaccaaggcaaagagaatggggaggtatgactttttggatgtaataatttcagaaatgtgttgtcctaatttaagtttggagaggagaggattgttagtaaatctggaacaagcggttttagagggagcgtttgagggacagactgtcagaggcaatctatagccctagccgattgagtctcgatgaaattaacactgggaaaaaagccccaacaaaatactgcatgtttcagacagttttaattgtctgcgttaggatttttcccctggaccggtgatgcttgggaatctaggctgcggactaacaataaccgaagatggaaatgtgacagcttctcctccacacccccacccaaggaaaaaaaaaaaaaaagccatacaatctggagtgggggtggggtctctcttccttgtcagactggggtaaatcaaaagctggtcacgctgggtttttcaaaagcttctcatttaacaagtcctatttgcttttatctttttgttatggaaaaatatattatacaaatgatttcttccttta

SEQ ID NO: 275128 - DNA, 385 bp, Homo sapiens
atcttctaaacttcaaattacttaatcttccaatacactctgaaacaggtactatttagtaccccatttgacagatgagaaaattaagtcatagggaaatacacatgactgcaggggcagggtttatatatcgcatgaaaatgaaaaagtttgagaaagcctataaaaagttcagtcattgtgtacactgttaaaggtcttggttacttggatttctccttaatttccctgcttgattcttctttatacacaaaattataacagcagtctcttcttcataatatagagcttctggtgagaaccttggaatcttaaaactgtatgttatttttcatattacctggtgagataagtgttatctttattaaagctacgaaatctagga

SEQ ID NO: 275129 - DNA, 339 bp, Homo sapiens
caaatccaaaacttcagtagttactgattccagtaccatatctaattttccttcaacatttttctttaatgacactacctcccatccacctatttacaacaaaaaattgagcaaagctccttcctccctcaagcgttcacatcttagtataactctcattgattctaagttctaaatatttcttaaatttgttctctccttcattctagctacaattgccttcacaattcattatttcttttctgggtcactaaaataatctgtttccatgcttacctcccacaaatccattctttacatagctgtcagcaaaacctatttaaaataaaaattggatca

SEQ ID NO: 275130 - DNA, 799 bp, Homo sapiens
agaaaggcaatgaggttttcaacgacctcatgaaaagcttgttagggccagcatagtttttatttgtactctgagcttgtgtgttttccactacactggtgatagaaacgcctttctttaatgcaaagatggtaaggcagtgttctttgtgttggaaagttattgtgtcgattccttgaaattttttttaatctgatctgtgaaatccagaagtctgggaatgtcaggagacgtctggtggcattctgtaggtgggagtgtcacggtgtcgtaggaagttcaggaatctgaagtctgtgtcccagccatcctctgttccagacatgctgggtgacagtaggcaaggaatttctatttctgggtttcacttttctagtctctaaaattgagagagcagctttaaagaatcctgaaccgacgagggcatgaaggacatggaaagcctgagaggaaagtcaaggagtcaggcaggtggacttcccggaggaggggacctggggagctgctctgggcaggctctttgtgaagggagagcagccctgctcagtttctccgtggaaagtctcagggttaccatctccgcctcaaattttcaaaaagaaacagaaatcatggtttttatgttaaatctctccgttcataaatattagcaaccgctttaattaaaaactaaacaaggccaggcattgtggctcacacctgtgatcccagcactttggaagaccgaggcagacggatagattgagcccaggagtttgagaccagcctgggcaacatagcaagaccccatctctacaaa

SEQ ID NO: 275131 - DNA, 404 bp, Homo sapiens
cagcatcaggtcagatgtgtttccattttcttggcctttccctcatgatcacaagatggctgctgcagctccttaagtcatcaatcacatctgtgttccaggcagaaggaaggtagcaaagactttcccagaaatccccagcaggtttctgattgtgttattggcaagagctgtgtcttaattacccccagctgcaagggagtttaagatggtgagagtttttcttttttttagcttttcagcctgtatagtagaaagtcaagataaaggaggttgggatgggtgtcaagtggtcagtatccaccatggtccccgttccctgtcccacctctccttatcctgagttctcactctcctgaagtaattctcttcctccatttttctaaataaaatgtttattctgt

SEQ ID NO: 275132 - DNA, 423 bp, Homo sapiens
gggcggaaggggcagcctgagatggagccaggcctgtgcctccactagaaggtgcagggtatggacggtacagggaggctgtgttcacacccagccgtgtagttgccaagggaccatactcagatttgtattaaaaacaaacaggccaggcacagtggctcacgcctgtaatcccagcactttgggaggccgaggcaggcagatcacctgaggtcaggagttcgagaccagcctggccaacatggtgaacccgtctctactaaaaatacaaaaattagccaggtttggtggctcatggctgtagtcacagctactcaggaggctgaggcaggagaattgcttgaatccaggaggcagaggttgcagtgggccaagatggcaccattgtactccagcctgggcgacagagccagactctggctc

SEQ ID NO: 275133 - DNA, 583 bp, Homo sapiens
gaggccccgtgttaggaaggcagggctgggctacaccaaaaagagtctttgggccgggcgccgtggctcacacctgtaatcccagcactttgggaggccgaggcgggtggatcacgaggtcaggagttcgagaccagccttaccaacatggtgaaaccctgtctctacttaaaaaaattaaaaaattagccgggcgtggtggcgcatgcctgtaatcccagccactcaggaggctaaggcaggagaatcacttgaacccgggaggcagaggttgtggtgagctgagactgcgccactgcactccagcctgggcaacagagcgagactccatctcaaaaaaaaaaaaaaaaagaggctttgaaaccaaccaagaggccagaggcagtgggcagagcgggagggttatggggacaccttcagaatcagagctgagaacttccagagggtaccacgtattatgacacacaaacacctccaggatcccaggtggcacctgcacaatcacttgtggcgtgtgcgattactcacaggaaaagatgacgattatgcgtaatctcatggtgactcctagcaggtggggagt

SEQ ID NO: 275134 - DNA, 382 bp, Homo sapiens
ggttttgtgaaggcagtctaatttctgcaaaagaaatcttatagtatttcacatctttcaaaaatctcccaagccctgatgcaaataaaagctacagaaattaaaattacagtacttaggcatgacatcaaccccaaagtgtgaaccattttcattgttgaattttggatccaattgaaatggagatcttacagactactgcaacaaaataaacattgagaaaattcatattaaggaattgttaattgttaatcttgttgaatgtgatactgtattgtggctatgttgataaagtctttattatataactataatgaagttcttatgagtggaatgatatgacttctaagatgttttaaataaacaaatatttttacttatt

SEQ ID NO: 275135 - DNA, 494 bp, Homo sapiens
aaagagataacaatttttttgtcacaggggcttctccataggatagctcactacatggcagctggctgcctctcaaaaggaacaagtaagaaagcaagagaggatattgaagacagaagtcacatgttctttgtaacttcatcttggaaattatatcctaaaacttttgctgttttctgtttgttagaagcacatcattggttcattccacactcagaattgcacaagggtttgaatactaagaggcggggatctttggaggccatcttagaacttgcctattaacagcgtttgttagttatatatatttaaatgaacatgttagtcttccttcatggtcagattaaacaaaagggtgttgggttccatgtaaaagccagtcttctctgtgcaaatttgtaccagcatttgaatgattcccttctgtttcatttgatttaattttaaaatgtacttttggaaatttttgatacctattaaatttactgtaatat

SEQ ID NO: 275136 - DNA, 292 bp, Homo sapiens
attttttgagagatccaaaatgcttccaaaatacagtgatctttaaactaagacctcaagtataaaggagggaagagcattccaggcagaagaaagatcaagcacaaaagatgaagaggccagagagagcagggtgagtggaggactcgaaagacactcagtcttcaagatgagaggtgaggagaatctgaacagggttaatgaccatggggagaagaggggatacatgcgcatgccattgtggagataatggtacagtgttagaaaatgtgctgacacactgggcatgcag

SEQ ID NO: 275137 - DNA, 1439 bp, Homo sapiens
cttttacaggaatgttcataaacagcaggttctcctaggctttgaacaaaatttagcttctccaaggccaaaagcctcattgtgaagagaaagaaaggtatagcagtcttggcagttgctgaactgaattcctggctgatttccttactgcataaactcaactgctctcactgaggtcgtcattaagtcctgtgtgtgtttgggcaggccgacttgatttacagccagcactccactgcggaaacggcttacaaaatatacagatcttggtagacaacgtggctgcaggctgttgaattggaattccctgtggctgtccgaaggcagggtgtccggagagcggtgggctgacctgttcctacaccttgcatcatgccagctttgtcaacgggatctgggagtgacactggtctgtatgagctgttggctgctctgccagcccagctgcagccacatgtggatagccaggaagacctgaccttcctctgggatatgtttggtgaaaaaagcctgcattcattggtaaagattcatgaaaaactacactactatgagaagcagagtccggtgcccattctccatggtgcggcggccttggccgatgatctggccgaagagcttcagaacaagccattaaacagtgagatcagagagctgttgaaactactgtcaaaacccaatgtgaaggctttgctctctgtacatgatactgtggctcagaagaattacgacccagtgttgcctcctatgcctgaagatattgacgatgaggaagactcagtaaaaataatccgtctggtcaaaaatagagaaccactgggagctaccattaagaaggatgaacagaccggggcgatcattgtggccagaatcatgagaggaggagctgcagatagaagtggtcttattcatgttggtgatgaacttagggaagtcaacgggataccagtggaggataaaaggcctgaggaaataatacagattttggctcagtctcagggagcaattacatttaagattatacccggcagcaaagaggagacaccatcaaaagaaggcaagatgtttatcaaagccctctttgactataatcctaatgaggataaggcaattccatgtaaggaagctgggctttctttcaaaaagggagatattcttcagattatgagccaagatgatgcaacttggtggcaagcgaaacacgaagctgatgccaaccccagggcaggcttgatcccctcaaagcatttccaggaaaggagattggctttgagacgaccagaaatattggttcagcccctgaaagtttccaacaggaaatcatctggttttagaaaaagttttcgtcttagtagaaaagataagaaaacaaataaatccatgtatgaatgcaagaagagtgatcagtacgacacagctgacgtacccacatacgaaga

SEQ ID NO: 275138 - DNA, 744 bp, Homo sapiens
cttttacaggaatgttcataaacagcaggttctcctaggctttgaacaaaatttagcttctccaaggccaaaagcctcattgtgaagagaaagaaaggtatagcagtcttggcagttgctgaactgaattcctggctgatttccttactgcataaactcaactgctctcactgaggtcgtcattaagtcctgtgtgtgtttgggcaggccgacttgatttacagccagcactccactgcggaaacggcttacaaaatatacagatcttggtagacaacgtggctgcaggctgttgaattggaattccctgtggctgtccgaaggcagggtgtccggagagcggtgggctgacctgttcctacaccttgcatcatgccagctttgtcaacgggatctgggagtgacactggtttgagcaaagcacagaagacaagagtctctgcatttacagaagccgcaaagtacggcgtatgcatcagatgtttgcaactggccagtcgggtcatttttcccataagcagcgttgcttagcagtgtcgctgacgtcgtcccattagttccaggggaacagagttgaagtcagacccttgtgccacaggagcaaggcacccgactcacagcagcctagatgcatggattgctcatttgggaaaatacgttctgtgtaaaacttttaccacttcttctttcccttcttgcttatttcacgaagaaaaaaaaaactaattatacaagtaatacata

SEQ ID NO: 275139 - DNA, 1336 bp, Homo sapiens
cttttacaggaatgttcataaacagcaggttctcctaggctttgaacaaaatttagcttctccaaggccaaaagcctcattgtgaagagaaagaaaggtatagcagtcttggcagttgctgaactgaattcctggctgaaacggcttacaaaatatacagatcttggtagacaacgtggctgcaggctgttgaattggaattccctgtggctgtccgaaggcagggtgtccggagagcggtgggctgacctgttcctacaccttgcatcatgccagctttgtcaacgggatctgggagtgacactggtctgtatgagctgttggctgctctgccagcccagctgcagccacatgtggatagccaggaagacctgaccttcctctgggatatgtttggtgaaaaaagcctgcattcattggtaaagattcatgaaaaactacactactatgagaagcagagtccggtgcccattctccatggtgcggcggccttggccgatgatctggccgaagagcttcagaacaagccattaaacagtgagatcagagagctgttgaaactactgtcaaaacccaatgtgaaggctttgctctctgtacatgatactgtggctcagaagaattacgacccagtgttgcctcctatgcctgaagatattgacgatgaggaagactcagtaaaaataatccgtctggtcaaaaatagagaaccactgggagctaccattaagaaggatgaacagaccggggcgatcattgtggccagaatcatgagaggaggagctgcagatagaagtggtcttattcatgttggtgatgaacttagggaagtcaacgggataccagtggaggataaaaggcctgaggaaataatacagattttggctcagtctcagggagcaattacatttaagattatacccggcagcaaagaggagacaccatcaaaagaaggcaagatgtttatcaaagccctctttgactataatcctaatgaggataaggcaattccatgtaaggaagctgggctttctttcaaaaagggagatattcttcagattatgagccaagatgatgcaacttggtggcaagcgaaacacgaagctgatgccaaccccagggcaggcttgatcccctcaaagcatttccaggaaaggagattggctttgagacgaccagaaatattggttcagcccctgaaagtttccaacaggaaatcatctggttttagaaaaagttttcgtcttagtagaaaagataagaaaacaaataaatccatgtatgaatgcaagaagagtgatcagtacgacacagctgacgtacccacatacgaaga

SEQ ID NO: 275140 - DNA, 326 bp, Homo sapiens
ctgaaattctcagtaatttcactgggttttgttttgggaagaagctggtatatcgctgctgtttttgttcgtatgctgtcaaggagattgaagtttatttgaaatgttccttttatttttaaatggcacttgggacttttcatccttagaagccctgtttttcttcccctttaaattagggactaaggttagaggaggagttggatttattttctgacactttctgaataattagttattatgtctcagaaagaatcacaatatcaatagtatatgttctggaattacgaagtattatattagagggctttacctctctaccttct

SEQ ID NO: 275141 - DNA, 633 bp, Homo sapiens
gctaggaaaagaatttagtgatgtctctcctacttgcaggtccatttatagcctctctgcaagaagaaaaatatggctgtttttgccagatcccacaggcggtcagaccttatgtatgtcttcccttgttccataaaaatcgctgttatactgttctttttcaaggtgcactgatttcatattgttcaaacacacatgttttactatcaatttgtagagttaacacaattatcacagtggtcctgaggtaatgtacatcctcagcttatgaagatataagtgattaaagtaaacacaggcataagaaattataaaactatgatttgggaactgataaatgtccatgaaatcttcacaatttatgtccctctgctgctgatccagctggtccctctgttcagggtccctgacttcacacaacaaatatgcatgtgaatccttcactggcaaccaaggtatccaggttctctcaccagaactgattaggacgctggtttgacccactgagagaaggaagaacagtgtagtatggtggcccacctgagagccacatggggctggggagccccctctgcctagccaaggggggcggtgagcgtattacccagctgggaaaactgtgcttttcccatg

SEQ ID NO: 275142 - DNA, 356 bp, Homo sapiens
atgtgtgacgttccccatcctttgtccaagtgttctcattgtgcatgttctcactcataagtgggagctgaacaatgagaacacatgaacacagggagggggacatcacacatcggggcctgtcagggggtgtgggactaggggagggatagcattaggagaaatacctaatgtagatgatgggttgatgggtgcagcaaaccaccagggcacgtgtatacctatgtaacaaagctgcatgttgtgcacatgtatcccagaacttaaagtataataatgaaaaaaagtgttatcacccatcaccaccacaatactctagccttctcccataaatatgtagcatttatcactaaaaa

SEQ ID NO: 275143 - DNA, 387 bp, Homo sapiens
ggattcacaatgtatataagcagttaatggtgtgctcagaaatcctataacatagaatattgtatgactttatacagtactagcattaacaaacttcttgatcttgggggcctctcatttgagccaagtctgttaatatcctgaggagcgcattcagggaaacattctattggcttgacttactcagatgacagcggtctcagctgagcatttgataggggccagtagaatcaattcagagttgttttctaacttttactaaatctatgttatagattttcttggaggaaaagtagaccttgtcagagagccttaattaaagtccagaacctagaaacatatgcatcaccagatcaacaactgaaatgggaatagcagacaaaggtg

SEQ ID NO: 275144 - DNA, 389 bp, Homo sapiens
tgaaaactcagtgagagtgcacctgtacacagcctttctggaacatttgggggtgactgcgtccccaagggaggtgtgccctccaggttcaggcttgcaagaggggtggagttccactccccctctacatgaatatcagtattcctgcagatggaccgaggtgcctatctgatctgaatataaaaaatcctgggatgggggcatgataggaaggtaggtcacttttgtgctggcctcatagtggagctgaggtgactccctccctcccctgtaaagatttcaatgtatttcgctgggagctcctccagcccgcctctatcagagctgggacttttgcccactattgggttttgcatttacccagctgcttcagccacaggcagttctta

SEQ ID NO: 275145 - DNA, 343 bp, Homo sapiens
gaaagccagctgcccggtgatccctcactacctctccaggcagctcagagatgccctctgagcttcttcctcctgggttcatctggaagcaatctaacattgtttaaaagctagccttgacaggcagatcaattgaggtcaggagtttgagaccagcctggccaacatggagaaaccctgcctctactgaaaaatacaataattagccgggtgtggtggtgcatgcctgtaatcccagctactctggaggctaaggcacgagaatcacttgaacccaggaggcggaggttgcagtgagccaagatagcaccactgcactccagcctgggtgatagagtgagac

SEQ ID NO: 275146 - DNA, 615 bp, Homo sapiens
gctatctgtgtgaacaatgtgctgtggaaacaggagcaagcagctgattgccccagtggatatctaagaaaggcttcattaaggagtgacttatgaaataggtcatatggaatgaatgagaatatcccaggcataagagagaagggcattcctgacagaatgaactgcatatgcaaagtcagggaggtttgaaagcgttgaacttgttccagcaacagtaagaaagaagtttagtgtagcaagagtataggtatatatagagaagtgaggtggagcccattgaagacctatgcaccttgctaaggaggttagactttcttcttatatggtgagaagcccagagaggttccgaatctaggatatgtaagataggatatatgtgctttaggatgaccattctgtcggctgtttaaaggatggtgtgaagaaaagagagattagagttaggaaatcctttgcattgcttcaaatgggaaataaggacttcaactaagacaggagtgatgggtatggaaaagatggtctagattccagagctcaattccattcagtttgtggaacatttactgacatttaccatatagcaggctgctaaacactgtgatacaaaaaaaa

SEQ ID NO: 275147 - DNA, 612 bp, Homo sapiens
cactcaagtgggacagtaagattttctctgaggctggcactggtgcctgcctctgctccggggaatccagacgtggcacccggagttgggcctcatccatcctcagctttcatttgtgaccaagcctgactcagaatgggctggcagttttcctgagtacatgggagttagggcagagaacatgatgtggtgctggtagtcaacgcaagctggcacggcctcagccagaagactggagctaggagcaagcaaagcaccaagtaaatgaatcaaattaaaaaacaactacaacaacaacaacaaaggaggaaactagagaacatcttgggaactatccgcttttggaacttatcccatgctggaacattgccctgagacagacatccatgaagaagcctgggatgaaagaccacatggagagaaaggcccaccatcattctgcaccaactaccaacggcgtaagggaggttgacttggatctcccaccccagttgactctccagctgaaagcaactgcctgagcccaaacaaaacctgctgaggaacctccctgctagcaaatggaatcaggagaaataataaatagttctgttgttttaagtcaccaactca

SEQ ID NO: 275148 - DNA, 505 bp, Homo sapiens
cactcaagtgggacagtaagattttctctgaggctggcactggtgcctgcctctgctccggggaatccagacgtggcacccggagttgggcctcatccatcctcagctttcatttgtgaccaagcctgactcagaatgggctggcagttttcctgagtacatgggagttagggcagagaacatgatgtggtgctggtagtcaacgcaagctggcacggcctcagccagaagactggagctaggagcaagcaaaggaacattgccctgagacagacatccatgaagaagcctgggatgaaagaccacatggagagaaaggcccaccatcattctgcaccaactaccaacggcgtaagggaggttgacttggatctcccaccccagttgactctccagctgaaagcaactgcctgagcccaaacaaaacctgctgaggaacctccctgctagcaaatggaatcaggagaaataataaatagttctgttgttttaagtcaccaactca

SEQ ID NO: 275149 - DNA, 381 bp, Homo sapiens
cagttttcctgagtacatgggagttagggcagagaacatgatgtggtgctggtagtcaacgcaagctggcacggcctcagccagaagactggagctaggagcaagcaaaggtgagtggaggaggggatggggaaggctgagacttcctggtctctatgttctgagctcaattctagaatagccaaaaggtgggagcctgactcgggctaagttagtcatgcgttctgagcctttgaccgtgctgggtgagatgagggatggctgagcaggttcagtgagcaacttggtcgaggtcaccttggctggcagaggaagggcacctgccctcctgtggaaaagacgggaaatggctttcctgtcactcctagggtagcgctcaat

SEQ ID NO: 275150 - DNA, 678 bp, Homo sapiens
tgattctgttgggttttccagatggaaaattatattacttacaaatcagggtgatttttggctctatttttatatgacttttttctatttttatatgactttttttcctgttgtaatattttgcttgtaatttctagaatgatactgaatagcacttttggtgagcatctttggcttaatcctccctttagcctttagcactgttggctttagtcactttctgcatattgccaaattgctttttggaaagctgcactagaattggagagtgcttgtcacccatgtccacacccaagcttagtgaccagagcattgtgaagggtctttccaatttgtggctcttgtcattttaaaattaaatttgggtttgccatttattatttttttctagaaattctcgagtctgagaatatgagaatagagttggcctaggttcatacattgttttgttctcaccagataattacacaactttttcttcctattccaaagtaacagtgttgtggagtggaaattactgttgttaattttagcaccatagtttggtggaaaaaagtatgggtcttggagccagatatcagaactaagctatgtcactaatagcctagtgacttttcataaccttacttaaactctttgaactttagtttcagcatttgtaaaaaaaaaaaaaaaaaa

SEQ ID NO: 275151 - DNA, 1141 bp, Homo sapiens
agcgggcttcgcggcggaggcccgggcaactcttttgaatggaatcgggctgattcatcgccggtttgcagactgagccgcgtcgggtgtgcgccgctgctgctgttgcctctgtcttcgcgtcaccacagaggcaagacaagggtccatatcgcggcatccggctcccgcccgtcttcaggagagaaagaaaaaataaaatatacttggggaagttgtacctgccagaattagcaagagctttctttaagaagacatttgtcaaactcaacaaattgaaggttaacaccttaagagttgtagttactgaccagaaatatggacagacttcttagacttggaggaggtatgcctggactgggccagggccacctacagatgctcctgcagtggacacagcagaacaagtctatatctcttccctggcactgttaaaaatgttaaaacatggccgtgctggagttccaatggaagttatgggtttgatgcttggagaatttgttgatgattataccgtcagagtgattgatgtgtttgctatgccacagtcaggaacaggtgtcagtgtggaggcagttgatccagtgttccaagctaaaatgttggatatgttgaagcagacaggaaggccggagatggttgtggttggtatcacagtcaccctggctttggttgttggctttctggtgtggatatcaacactcagcagagctttgaagccttgtcggagagagctgtggcagtggttgtggatcccattcagagtgtaaacggaaaggttgttattgatgccttcagattgatcaatgctaatatgatggtcttaggacatgaaccaagacaaacaacttcgaatctgggtcacttaaacaagccatctatccaggcattaattcatggactaaacagacattattactccattactattaactatcggaaaaatgaactggaacagaagatgttgctaaatttgcataagaagagttggatggaaggtttgacacttcaggactacagtgaacattgtaaacacaatgaatcagtggtaaaagagatgttggaattagccaagaattacaataaggctgtagaagaagaagatcagatgacacctgaacagttggcaataaaagaatgt

SEQ ID NO: 275152 - DNA, 990 bp, Homo sapiens
atgagttttatgagttctttatatgttctgagatagaagttctttatgcgatatataattcgcagatatggtctcccagtacatgggcttggctttggtatgttcttgacggttttttgaagaccagaggtttgaatgttggtagtgtaatttgtaaaaatttgggccgggcacggtggctcacgcctgtaatgccatcatgttgtgggggcgagggccacctacagatgctcctgcagtggacacagcagaacaagtctatatctcttccctggcactgttaaaaatgttaaaacatggccgtgctggagttccaatggaagttatgggtttgatgcttggagaatttgttgatgattataccgtcagagtgattgatgtgtttgctatgccacagtcaggaacaggtgtcagtgtggaggcagttgatccagtgttccaagctaaaatgttggatatgttgaagcagacaggaaggccggagatggttgtggttggtatcacagtcaccctggctttggttgttggctttctggtgtggatatcaacactcagcagagctttgaagccttgtcggagagagctgtggcagtggttgtggatcccattcagagtgtaaacggaaaggttgttattgatgccttcagattgatcaatgctaatatgatggtcttaggacatgaaccaagacaaacaacttcgaatctgggtcacttaaacaagccatctatccaggcattaattcatggactaaacagacattattactccattactattaactatcggaaaaatgaactggaacagaagatgttgctaaatttgcataagaagagttggatggaaggtttgacacttcaggactacagtgaacattgtaaacacaatgaatcagtggtaaaagagatgttggaattagccaagaattacaataaggctgtagaagaagaagatcagatgacacctgaacagttggcaataaaagaatgt

SEQ ID NO: 275153 - DNA, 640 bp, Homo sapiens
cggacgcgtgggtcgacccacgcgtccggacccacgcgtccgcacagtcaggaacaggtgtcagtgtggaggcagttgatccagtgttccaagctaaaatgttggatatgttgaagcagacaggaaggccggagatggttgtggttggtatcacagtcaccctggctttggttgttggctttctggtgtggatatcaacactcagcagagctttgaagccttgtcggagagagctgtggcagtggttgtggatcccattcagagtgtaaacggaaaggttgttattgatgccttcagattgatcaatgctaatatgatggtcttaggacatgaaccaagacaaacaacttcgaatctgggtcacttaaacaagccatctatccaggcattaattcatggactaaacagacattattactccattactattaactatcggaaaaatgaactggaacagaagatgttgctaaatttgcataagaagagttggatggaaggtttgacacttcaggactacagtgaacattgtaaacacaatgaatcagtggtaaaagagatgttggaattagccaagaattacaataaggctgtagaagaagaagatcagatgacacctgaacagttggcaataaaagaatgt

SEQ ID NO: 275154 - DNA, 1120 bp, Homo sapiens
tctcggtgccaagtttatttaagatggagtcttgctctgtcgcccaggctggagtgcagtggcaccatcttggctcactgtaacctctgcctctggggttcaagcaattcttctgcctcagcctcctgagtagctgggattacaggtgacccgcccacctcggcctcccgaagtgctgggattgcaggtgtgagccactgcgtccagtctcggcgccaagtttaagaagagcatattgtcatggccttacatcagttatatgctcctgggtaacaaactaccccaaaatgaagcgacttaaaacagtaagtccttgttcatcatcatgtgggagtatggatgtgggcagggctcatctctgttcactgtgctggccacgctagcaagggcaattaacagttggcaggtaggctggcttgtgcttcccattgccctcacccacatgggctttcagccagggtgcctctgatctcctcagcctgcctctccaacagtctagctcaggcttcctcccatagtggctgaattccaaaagggcaggagcagagtttgacaggctacttgaggacatgtttagaagtcacagtgtcacctctgttgcattcccttgcttattgcaagttatgaggcctagcataggccaggagtgctgcctcatgcctgtaatcccagccctttgggaggccaaggtgggaggatggcttgaggccaggagtttgaaaccagcctggacaacatagtgagaccgcatctctaccgaaaatgaagaaaaaaaaaaaaacaaggcttagcacaggcttggagagtaggagatagactctggtccttaatggtgggacttgcagaaaccgtggccatttttcatcacagcctttcctatactgtgtgacctcaagaacttcctgctttaggatgcccagttaataatatggtatctgtgggatggagtgaactctttaacaaatatttaccaatacttactttgagcaagacactgtgcttggtgatggttgagtaccgagaagttgcaactggtggttcattctctgtggggagatggcgaactggaagaagcgaagtttgggcctgtggtaggtgctgtgagctgttgggtggagag

SEQ ID NO: 275155 - DNA, 401 bp, Homo sapiens
ccctgtctcaaaaataacaattaaaagattaaaaaaaaaaaacaacaaaaaacgagtgagagttatctgatgcttctcattctcctggtattaaatctgggaaaagttcatgtgaatttatgtgggaaacaggatcagtgaaagaactagggagagttgcctccgcatgagcacagaggctgcattatcatttacatagagcctctccattgtgccaggcaccgtgccagcctccaggtatgcaaaggtgaacaagcagacattgttctagcctttggtacttatgatttggaccctaataaatatttagttccaaattgtggatagtgttgcgaagggaaaagctcaagttcttagaataacagggaggcctggctgttgtgatctggaggatgagaaga

SEQ ID NO: 275156 - DNA, 145 bp, Homo sapiens
ggaataaggggtccagggagagaaagaaagaagggggaatagtcgatcagtggagcaatcagaacacacacaacatttatatattaagtttactatcttataatagtgtggctggtggtgccccaaaataattatattagtaaca

SEQ ID NO: 275157 - DNA, 417 bp, Homo sapiens
aaaataaggtaatgaagtttgccacatcactggactcttcctttcacaaaagattttgctgtagcatgagatgctgcttgataccattttacccacggtagaacttctttcaaaattggaatcaagcagcagtgcattcctgtactcccagctatttgggaggttgaggaaggaggattgcttgagtccaagagttctgggctgtagcacactacactgactggttgtctgcactaagttcggcatcagtatggtgacttcctgggagtagggaccaccaggttgcctaaggaagggtgaactagcccaagtcagaaatggagcaagtcaaaactccaacgctgatcagtactaggatagtgcctgtaaatagccactgcactccaacctggacaatagagcaagaccctgtctctt

SEQ ID NO: 275158 - DNA, 448 bp, Homo sapiens
cttgtgcaaactggcccttgtcccataactcttctctgggagaagcacagtgattgaggaggttggaaattgtactaggatggctgatgcagtttggatgtttgtcccctccaaatctcgtgttgaaatgtgatccccagtgttggaggaggacctcatgggaggtgattggatcatggagatggatctttcacgaatggcttaatgccatccacttggtgatgagtgagttttcactctagcagttcacgtgatatctggttgtttaaaagagcacgatatctcctccctctgtcttgttccctgtcttgccatgtggcatgcctgctcccccttcaccttctaccataattggaaatttactgaggtttcccagaagcagaagccggcactatgcctcctgtacagccaacagaatcatgagccaaaatagacctgttttctccat

SEQ ID NO: 275159 - DNA, 452 bp, Homo sapiens
tctgtaaatatatgtgctttcctgaccagcctctatcccagagttaccatggctactggtaagttttatcttctttgcaaccattttaacagtttttcttaagaaccaattgttttccttacaatagaagagtgtcttccaaaatagaccctgcgcatatccatgatgacagatcagtagataaactgtataattggcagcaggtaatgttttttctcactccactgtccacactcccctgtaaacaaacaatccacccccatagagagggggcacattttcttaagttctcaaatgtcacaagtatttttcctcccttttcaaagtcactatttagaaaatctctaatgggattttaaatgcttattttagtatatttggccaaggatattggcacttttcttccataaagtatttaaggtttgatcaagaccctcacagtgagcactgtg

SEQ ID NO: 275160 - DNA, 257 bp, Homo sapiens
attttaaatgtacaattcagagttatgataaatgcatattccaagtaaccaactactacctccccctactttaggtaaaatgcatatacagtgaagtacagatttttaatgtacaagtcaatgagtttttataaatgtatatacccgagtaatggctattcctctcccaaaaagatatagaacactgtcatcacatcaactctgtgttttggcccaactctataaatgccctttcacttttctactgcctttccaca

SEQ ID NO: 275161 - DNA, 514 bp, Homo sapiens
ctggcttgtgctgaactggacttgcaagtatttgtgtctgtgatttagcattatttctggggagagagtctccctgtttaatactaatagtcttcccaggaagtttcattagagtgaactacaatttttattgcccaggatttaacaaactccaatctaaagtctcagtgccactttcgtccaggctcccagtctcagatgaaattctaaattctaacaatgtcagcccaggactcagtgcatcacccaagtttctttgctgaatctcatacaccagagacctcacgcctcttctcttctcatgtgcacctttctcctgaaatttctctgctcaacactcctgacagcaacctgtctgcagatgcaccaacagctgctgctgctgaaaaatgggcttgtctctctcacgggggctatgatttctggcatatgcatgcctcctactgtctgtttggttttaaagcaattttcggcacacctgcttgcttgaactttactgagaagccctctcaag

SEQ ID NO: 275162 - DNA, 438 bp, Homo sapiens
ttgcctcctacctttttgcagtccacccctctgcgctccagacagacataggaaccctcgccctccttggtagtacatcggaggcagcaccctcgcacgtcagcgggtcctctccggggctcctccctcagaagcgggaaagtttgtcgtcctcaaactcctacccggctgcgcttatctgaggcgcacctggcgcccaggagaggcgagatggcgaatcccggccgcctagtgcccattctggctacggattaataaaagggcagtggggctgctgctgtgtcctttaatgctgaagacactggatgacattttttacagaattcacaaaaataagtttgtgaacctttggtgcctcttcctaatatcacttattgggatttttttttaaaccatttcattcattcgtgtaataaacgcacattgcaagatagtacg

SEQ ID NO: 275163 - DNA, 523 bp, Homo sapiens
aatactcacagaacattgtaggattatgaattagcttaatttcaatactgttgtgtcgcaggaagtaggaaggccaaagaggagggagagagacagagtacaggtcagtggagcagtcagaacacacacagcatgtatcaactaaactcactgtcttatatgagcacagttcttagaaccccaaaacaattaccatattatcagcaacgatcactcatcacagatcactataatcacagatatacaatgaaaacttctgaaatacttcaagaattaccaaactaacacagagacacaggctcttcaaaaaaaaaaaaaaaatggcacaaacagatttgcaagatgtagttgtcacaaaatttccatttgtattaaaaaaaaaacagcctggacaacatggtgcaagcctgtttctataaaacaaacaaacaaacaaaaaatatatataaaaaattagccaggcatggtggcacacacctgtggtcccagctactacccagaaggctgaggtaggaggatcact

SEQ ID NO: 275164 - DNA, 304 bp, Homo sapiens
catctttccattctgtgaggtcagtggtaagtaactcatggaccaagtccagttctgttaccattttgatttctatgaagaatcttcgttgtaaattttgaattaatggagttgaactgcatataatatgggactgtttttttgtttttcttgatgttatgtggccttacccacttatgtgttgaaggcttttcataaaggcaaggagataggttgttaggaacctacgaaacaaagttgaataggggaagccaacaagggatgccagcatctttcaatatgtagtaccacaagttttctgcca

SEQ ID NO: 275165 - DNA, 1831 bp, Homo sapiens
gccactgcactctagcctgggcgaaagagtgaaactccatctcaaaaaaaaaagtgaggaaagaaatggaaaaatggtccctcccattatgaagcctgttgtcctaaccgagtatgcatttatggaatccctgaaaaagacgaatcagtgtatatctgcatatctgtctatctcaactgtcacagccaaactccacaccaaaaatcataaccaggggcattgtaagcagtggtccttgtggatttttctcctgctgggccagttttttcccctataataattacaaacttcatacatgagtttggtactactctagaggaggctctagcaaaactaccctgctgtagaggagcaattataggaactctgcaattctgatgacagttctaaaaacataatgtgaaggtacgaactcattaatatacagttctctgtgccaggttctgtgctaagaccttcatgtagcttttcttatttagtgttcactacctatgatgtcgatattctgagcaccattttccagatgaggaagctcaaactcttctgccaatgaggccaacaccatagagtggtgtttgtttataaaatgtatattttattgcactcaaacgatgtacctggcactggtctagatgctggtgctataaagttaaataagacatgatccttgtcttgaagaagctcatagcctaatgaagctcatttccagttacatttgagaacttctgctctttggggctagtctaatagcacacaagagatttactcaggaacacgtatcttgaaggttgggaagggttggagaagaaatacgaggataggaaaagatatggctgaggttaaaactgaagggaaaaatcgaagatggacagaaagttggcactcacggtgtgtagaatacaatgggcacaagcatggatgagagagtgctgggttgtgcaaaagtgtcagccagcctggtgtttctctcttggatgaaggagttccacactgaggcacaatataaacaatgaacttggtgatataggacaatagtagaaaatcctaaaaaccaagcaaaggagtttggatgtagtgaacagataacgaagaactggtacaaaatctgctgatgcaaacactgctggctttttaatatcaccagattgtgaacacctattatgtaaaaagtgccagaggaaaagatttttgtcaaagtaacattgaccctgatggggggataatatgaactagaagatcagtctttggaaatccttggactaatcaatcaaagagtggcagtagccacagaggatacagcctgacctcagactaattcagagaaaacaatgggcttgactcagtgagtagatatgggagaagagaagaaggaaagaaaaccaaaaggatggtgggatccctagaactaaagagaagtctaaggcttagctacctggttaggtagaactgtggtggagctagtttgtcaacaaggtttagatcttgtaaattgtccacccaagtgagagtattccttggagatgttaaatatgtcacccaaactataaatcaagacacgttgggtctcagaaaagatgtactcttctgagagtacaggaagacaggggaacgatctggaaaacatcatttggatgctaaactattagaaatttcaaggtgttataattttttatggatacattagggttaactgggtagtcagaactttaggtgactcgcaggcctggttagaggggtattgctcccacaggtgcttgaaagagcatctctaagaatgagagagggacagaacagaagatctggagaccacagactgtatgacctgggtgat

SEQ ID NO: 275166 - DNA, 275 bp, Homo sapiens
cccacctgctcattactagcgaaatcagtcacatgtgaactgcacaaactggccagtgataaaaatgagccccatgtgagtatggaaccccaggaaataaatggtcgtaagttattctggagctaatataacaaagaactgatgataaatatagaatgctcaatatagttacagttataggaaaaaaatgaagaacccaaaacaggcatttcttttttttttttttttttttgagaaacgcgcatattataagcaggtggggatcccgagctcaa

SEQ ID NO: 275167 - DNA, 701 bp, Homo sapiens
cggcattgagtggcatgtgactgatttagccaatgaaatctgagcaaagtaatgtgtaataccccagatggacactttgagtgagtttgtatagacagtactttgccactgtttatcctcttgccatagtagcagctccttcagcctagatccttgaagacttggagcagagcctccagtcagtgctcagtggatgtataacatgaaagagaataaaatctttgttattataacctagtcaaatctgactgctacagttggtattaattaatgtcttctttaaaggaacatttatcaaataaacacatctcagataaaaacagttgttctcacatggccactcaataccggtattgagcggcaattgtgattgggagttcattcatgatttggctctctgcttgtctattgttggtttattcgaatgcttgtgatttttgcatattgattttgtatcctaagtaaatgtctccaaattgtatgccattaatttgcccttaaaccaaatttctattaattcctacatctgcttgcttgaagatatctgtggtagcagtggtaatagtgacagcagtagcagtggtaattaataagaccaaagaaattatattttacagactagaagtgcttttaaaataatgattaaatggattataatcagtttaaaataatgtggtatgtttacaaataataatagctga

SEQ ID NO: 275168 - DNA, 269 bp, Homo sapiens
ctttaatcacacataatctctccatccagagttcggtgtacccccacctccattatttgtcaagtttttcttaatttttcttagtggtgatgtgaaaattttgtcagatggaacaaagaaattctcaaagaaatggggttgtatgatttttgccattacttgtatttctagtgcctgtgtctctcatttagtaatcatttctcaaaaagcaaaagtcttcatattactataaagactttttatttttagagatcaagaatcaggaagcc

SEQ ID NO: 275169 - DNA, 431 bp, Homo sapiens
agagcagcagactccctgacttcatgccccagcccttccagggtcctgtaagcttctggctcccttctgtggcatgcatcgagggtctcaaatgtcatctgtttatttgatacactgatatggtttggctgtgtccccacccaaatctcatcttgaattcccacatgttgtgggagggacccggtggaaggaaattgaatcatgggggcaggtcctttcagtgttgttctcgtgatagtgaataagtctcatgagatctgatggttttaaaacgggggagtttccctgcacaagctctctttttgcctgctgccatccatgtaagacgggacttgttcctccttgccttctgccatgattgtgggctttcccagccacatagaactgtaagtaagtaagtccattataaacctcttttgcaaattgcctgg

SEQ ID NO: 275170 - DNA, 419 bp, Homo sapiens
acccacgcagaggtgtgccagctttctgggcatcccttgacagtcaaattgacacataaaagaaccattataccttcttgtccagaagtctttgcagataaccgtccatgaattctaatgaagcctgggaacctatccagagctggggcaagaaaggatccatgcaagtaggaaactagcaaaacctgcaggctccagcatcctgccagtcatctgcagaccccagaggggtccacaagcaagtgctcaacaacaccgtcctagttacattcgggtcatgtggcttcttgaccaggaagagagaaacctctcaaacaaaagctaaagagaatccacagctgccttctccaaacctgttacagctggaaaagcaagtgatgaggaaatcacatgagctcatgcttgtgaagcactctgta

SEQ ID NO: 275171 - DNA, 473 bp, Homo sapiens
acctaacactgaagttcccaaatcagcatgtgaaactttctctaagatagaccatatgataggacacaaaacaactcttaataaatttaagaaaatcaaaattatatcaagtagtctctcaaactacagggggataaaatcgaaaatcaactccaaaaggaaccttcaaaacaatgtaaatacatgaaaattgaataacatgctcctgagtgatcattgggtcaacaataaaatcaagatggaaatttaaaaattatttgaactgaacaataatagtgacacaacctatcaaaacatctgggatatggcaaaggtgaagctaagtggaaagtacatagccttaaatgcctacatcaaaaaatctgaaagagcacaaatagacaatctaaggtcacatctcaaggaacttgagaaacaaaaacaaaccaaacccaaacccagcagaagtaaagaaataaccaagatcagaaagg

SEQ ID NO: 275172 - DNA, 399 bp, Homo sapiens
ccatacttcttgattactgtaatttaatagtaacacttgaaattggatagtgaaagtttttctaactttgttctttttttcttttttattcctgtttatcattatctctactttttttcttctttccagcctcaggataagctattctttctccctcatagactatcctttaacagcccgaatcctagacttcagagtctatattcaccactttaatttctcattacctacttcctctttggtccttataggttggccttcttttgccctccccctcaagaaactcctttctcacagcatttgcttgtcaaaaatgtttccctttttcaaatccttgttttactgtatggctcaagcataggcactattgaccatctctgatgcttaaactcttctcct

SEQ ID NO: 275173 - DNA, 468 bp, Homo sapiens
agtaggagaggggccaaggactcatgctggcatcccgccagccttttgacacgagtcacccttccgccactttataaaaaaaggtaggcctcttatcagtggtaggcaatagcagggtagtgaaaaccgtttccccaccaccgccaaggcagggaatagaggctgcattgtccttagagaattgtaaatgagtaagcaaccgaaagttctttgttatcccctgggccagcaatcctaaacaatgtcagtgataaaacattcctccctgaaaaagtattttattggtctaagttctaaatctaaataaatgctgtcattaccactgagttttaattatatgtgaacttcggccgggcacagtggctcacgcctgtaatcccaaaatgttggtattacagttgtgagccgccacgcctggccctaaatgttttcttaaattaaacacttataaatcttccagaaataaaa

SEQ ID NO: 275174 - DNA, 875 bp, Homo sapiens
gaagtcaagttctcatgagttctcccaaaatccaccgctcttcctctttccctaagcagcctgaggtgatctgtgaaaatggttcgctattcacttgacccggagaaccccacgaaatcatgcaaatcaagaggttccaatcttcgtgttcactttaagaacactcgtgaaactgctcaggccatcaagggtatgcatatacgaaaagccacgaagtatctgaaagatgtcactttacagaaacagtgtgtaccattccgacgttacaatggtggagttggcaggtgtgcgcagggcaagcaatggggctggacacacaggtcggtggcccaaaaagagtgctgaattattgctgcatcatgcttaaaaacgcagagagtaatgctgaacttaagggtttagatgtagattctctggtcattgagcatatccaagtgaacaaaggagctaagatgcgccggcggacctacagagctcatggtcggattaacccatacatgagctctccctggcagattgagatgatccttacggaaaaggaacagattgttcctaaaccagaagaggaggttgcccagaagaaaagatcttccctgaaggaacttgcagaaaccagacctgtggccgggagtaaatccgactaacacctctgttctcagatgacaaagcaacaaagaaccgttaggacacccgcccgaaaggtctaaacgcacagggggcgacacacagaggacagcgatgcctccaacaaaccgggcgacggggcgttaccaaaaccggggccaggctgaccaagtccgaccagcaccaagcccgcacatcccacggagaagacacgagccgggacagcagagaaacaaaactgcacaacacat

SEQ ID NO: 275175 - DNA, 288 bp, Homo sapiens
gaagtcaagttctcatgagttctcccaaaatccaccgctcttcctctttccctaagcagcctgaggtgatctgtgaaaatggttcgctattcacttgacccggagaaccccacgaaatcatgcaaatcaagaggttccaatcttcgtgttcactttaagaacactcgtgaaactgctcaggccatcaagggtatgcatatacgaaaaagatatcccagaagaaactgaagaaacaaaaacttatggcacgggagtaaattcagcattaaaataaatgtaattaacagg

SEQ ID NO: 275176 - DNA, 1042 bp, Homo sapiens
aggcccgtgtggctacttctgtggaagcagtgctgtagttactggaagataaaagggaaagcaagcccttggtgggggaaagtatggctgcgatgatggcatttcttaggacacctttggattaataatgaaaacaactactctctgagcagctgttcgaatcatctgatatttatactgaatgagttactgtaagtacgtattgacagaattacactgtactttcctctaggtgatctgtgaaaatggttcgctattcacttgacccggagaaccccacgaaatcatgcaaatcaagaggttccaatcttcgtgttcactttaagaacactcgtgaaactgctcaggccatcaagggtatgcatatacgaaaagccacgaagtatctgaaagatgtcactttacagaaacagtgtgtaccattccgacgttacaatggtggagttggcaggtgtgcgcagggcaagcaatggggctggacacacaggtcggtggcccaaaaagagtgctgaattattgctgcatcatgcttaaaaacgcagagagtaatgctgaacttaagggtttagatgtagattctctggtcattgagcatatccaagtgaacaaaggagctaagatgcgccggcggacctacagagctcatggtcggattaacccatacatgagctctccctggcagattgagatgatccttacggaaaaggaacagattgttcctaaaccagaagaggaggttgcccagaagaaaagatcttccctgaaggaacttgcagaaaccagacctgtggccgggagtaaatccgactaacacctctgttctcagatgacaaagcaacaaagaaccgttaggacacccgcccgaaaggtctaaacgcacagggggcgacacacagaggacagcgatgcctccaacaaaccgggcgacggggcgttaccaaaaccggggccaggctgaccaagtccgaccagcaccaagcccgcacatcccacggagaagacacgagccgggacagcagagaaacaaaactgcacaacacat

SEQ ID NO: 275177 - DNA, 546 bp, Homo sapiens
gtagtaagggttaagttcccagttaaccctccaatgccaactaactcccctgcatcccaagacatagtgatcacagaactcaagcagtgctggcagctgtgtccagtgctgtttctagggacccaaattggcccccaccttagccagaggagctttgggttctgaagtgaagggtcattttaggtgcccccagaaggtgggcactgatggagacacatggctctccactctgccttctaacagacactgttcaccaccaggcatgagcaaaacacttaacagagcgcaatacctcacttaatctacaaaaccacttttggagcttccagatagctacatgcatggaggttcctggagggtggtgtgtccagggagggcatggaatctccgtgccccttccccactaaattaaaaggtaaataacggccgggcgcagtggctcacgcctgtaatcccagcactttgggaggccaaggcgggcggatcacctgaggtcaggagtttgagaccagcctgaccaacatggtgaaatccaatctctactaa

SEQ ID NO: 275178 - DNA, 130 bp, Homo sapiens
ctgctgagtgctccctgtcattcctatgttctaggttcttttctcttttctttatcctcaaaaattttataggtcttgtggtggcctttttttgagaaatcatatttgaataagtcatgctcaaaaggga

SEQ ID NO: 275179 - DNA, 495 bp, Homo sapiens
gaggttgcagtgagtcgagattgcaccactacactccagcctgggcaacagagagcgactctctcaaaaaaaaaaaaaaaaaaaaaaaaaaaagctaactttatgtcttgagagtttgtaccatttttctttgtagtggtcaccttgctaatgcattagttctgagatatttatctccctcacatgtgtgcaaggaagtccctgttatcgaatacagatactttaacaagcagacaaagcagaaacccaaagtccatactaggaacaccctaaattttccaaaagcaaaagttctcccgaaatggagacatacaagggacttttattattctgttactagtttctataacatttcttctttcaacagagtatatgtttcccatttaacccagagcaacattaacttccttagcaagtccagttctaacttccaacaagtccaaccactgtttttgaagagcatatcagtaactatattaagatgaaggtaaccac

SEQ ID NO: 275180 - DNA, 388 bp, Homo sapiens
tggaagcaagccaagtgttcatcagctggtgaatggatgagcaaaatgtggtccatccatcccacgccccagtggaatattactcagccttaaaaaggaaggagggctgggtgtgatggctcatgcctgtaatcccaacactttgggaggctgaggcaggtgaatcacaaggtcaggagatcgagacccgcctggccaacatggtgaaaccccatttctactaaaaattagttgggtgtggtggcatgcacccgtaatcccaactactcgggaggctgaggcagaagaattgattgaaccagggaggtggaggttgcagtgagctgagatcacgccattgcactgtagcctgggggacagagtgagacttcatctcgaaaaaaaaaaa

SEQ ID NO: 275181 - DNA, 355 bp, Homo sapiens
ggagcggcagcggcaaggcagcccagtttcgcgaaggctctcggcgcgccgcggcccgcaggcacccggcacgcgccttccccgcaggcacccggcacgcgccttccccgcaggcacccggcacgcgccttccccgccgccaggatgcccaagaggaaggtcagctccgccgaaggcgccgccaaggaagagcccaagaggagatcggcgcggttgtcagctaaacctcctgcaaaagtggaagcgaagccgaaaaaggcagcagcgaaggataaatcttcagacaaaaaagcgcaaacaaaagggaaaaggggagcaaagggaaaacaggccgaagtggctaaccaagaaacta

SEQ ID NO: 275182 - DNA, 347 bp, Homo sapiens
  misc_feature (224)..(224): n is a, c, g, or t
ggagcggcagcggcaaggcagcccagtttcgcgaaggctctcggcgcgccgcggcccgcaggcacccggcacgcgccttccccgccgccaggatgcccaagaggaaggtcagctccgccgaaggcgccgccaaggaagagcccaagaggagatcggcgcggttgtcagctaaacctcctgcaaaagtggaagcgaagccgaaaaaggcagcagcgaagtttagngtgagaagtttgagcactcacagttcatacagaagaggacaagattaattcccctgacattagaggagttgttggataatcactaaatttgctccttgttaaataaaggataaatcttcagac

SEQ ID NO: 275183 - DNA, 131 bp, Homo sapiens
cttgataaggacacgtcagccctcgaggctgctgacgggtgactgtgcttcggaggggaaaagtgatactacgctgatgtggttctcgtagaaggaacggggcgggtcgtaaccgtagctacaacgtcgcg

SEQ ID NO: 275184 - DNA, 853 bp, Homo sapiens
ggtctgagcagtaaagtgctagtcccaaagaaatgatataactgttactaacattagaataaggttcccatttcactttttgaagggcgtgaaaatcttactgctcctctgcaactgtgctcacttagtataatctaacagttaatattcttgtttaattggaaggatatatccagtgatttttaaacaacttttggaggtgtaattgacatacaataaactgccatatttaaattgaccaatctcacgagtttgataaatgtatatacccacaaagtcattaccacaatcaagagagtaaatgtttccatcagttctaaaattttccacgtcttcctttgataccctcccttgtctccctcctgcctcacattcctaacttcacagcaaaccttgctctgcattgatactttagattggtttgcattttctagttttatacaaatgaaaacatattgctatacactctttattggttggattaatttattgagagattcatccatgttctttgtatcagtagttcattttttttttggctgagtagtattccgttgtgtggatataccactatttatttatccttccatctgttagtggacatttgatttgtttctagttttctcatctacctcttgtcttttaacttctctttctttttcttccctttatccctcggtgatgcgttcttgcttactgccttagatcaggaattgtcaacatttgaccatttttgacctacaaaaactacagtttcatacagtagtgtttaataagtgtttttaattgaatattacttatttttacattcaagagtctctgcatgatacagaattgtttacatattgcttga

SEQ ID NO: 275185 - DNA, 433 bp, Homo sapiens
cataaaaaggaatgagatcatgtcctttgcagggacattgatgaagctggaagccattatcctcagcaaactaacacaggaacaaaaaaccaaacaccgcatgttctcacttataagtgggagctgaacagtgagaacacatggacacagggaggggaacaacactcactgaggcctgtaggaggagggtggggcaggagagagcattagggtaaaaagctaatgcatgctgggcttaatacctaggtgatgggttgatctgtgcagcaaaccaccatggcacgtttaactatgtaacaaacctgcacatcctgcacatgtaccccagaacttaaaaaaacaagcaataaaataattttaaaaaaacaaaagaagtgatcgtggacatggaaaactatttaccaagatggtcagtgcagccaggcaaaaaaaa

SEQ ID NO: 275186 - DNA, 1886 bp, Homo sapiens
atcatcaaaatcaagataattaacacattatcacctctccgtagttactattttgtggatgcatgtgtttttattttatttctgaaataattttagacttacagaaaatttgaagaaatagtacagagttcacatatttctaccactttgcttccctgatgttaaaaacttatataactgtagttcagtaatcaaaatgaggaaattaactttgatacaatactatgaattaaactatagccctttgattttcaccatctcctcccacccctaccatgcctttttaatattccaggatataatctaagatgccacgttgcattcattcgtgtcccctcagtttcctccaatctgtgacagttgttccgtatttccttgtctttcatggactcttgatgagtactggccagcttttttgtagaatgatcctcagtttggttttgtccacgttttcctcatgattagactaaggtgatgtgttgggggaagaagatcacaaggtgaaatgcccttgttatttcctatcggggtacaggatgccaacgtggcttattagtgatatttaccacgatcacttggttaaggtggaatctcccaggtttcattactgtaagttacttttctccctttgtaaatgataaacatcttggagagatgctttagactgtgctagcatcctgtttcttctcaaacttttgcctgctggttttctcattcattggtggatcttgtcaacagttactactgtggtggtctagtggggattttgtattttactcattccttctacattgattaattggaattctgtaaggaagaagtgtctcttctctcatacatttatttattgaattatttatttatgtccctatggatttatggatatttattttgtcctatgggattatgttatttcttgccttgctgtaaaggaatacctgacactgggtaattcctaaagaaaagagggccaggcatggtggctcactcctgtaatcccagcactttgggaggccaaagcgggccaatcgcttgaggtcaggagttcaagaccagcctggccaacatggtcaaaccccatctctaccacaaatacaaaaattagcagggcatagtagcacatgcctgtagtcccagctactcgtgaggcggaggcaggagaattgcttgaacctgggaggtggagggtgctgtgagctgagattgttccactgcactccagcctgggtgacagagtgagactccatcagaaaaaaaaaagaaaaatttattttggctcatggttctgcaggctgtacaggaagtgcttttttaactcctcaagctgcaacattaaatgcagagtccctacttagtgggcccaagtcaataaattcagcctgatctaaggaaggagaccacctctcttattgtctcatacctcagaaaaagaatgaggaagtaaaagttaaagaaaggcaaaaatgagatcaatagacagcccagcactgcacttcaggcctggtctggtagttaaaaatcaacccctgacctaaccacttgtattagctatagattccagacattgtatgaggaagcattgtgaaactttctgctctgttctgttctgtcttgattaccgatgcatgcagccccagccacgtaccccatgtttgctcaatcgatcacgaccttttcatgtggacctccttggaattgtaagcccttaaaaggggcaggaatttctctctcagggagcttggtttttgagacacaagtctgctgatgctcctggccgaataaagctacttcctttctcaacctggtgtctgaggggttttgtccacagcttgtcctgctacatttcttggttctctgactgggaagcgaggtgattagcagacagt

SEQ ID NO: 275187 - DNA, 638 bp, Homo sapiens
aggccacatagctacctacagtgacagaatcaaaattcaaactcaggtttatctagttccaaaacccatgttctttctgccacaccatgttagtagaaatggaaactattggatgaaatgaggaaaaacaggaaaagaattcactttttaaatgaagaaattagtgaaaaaattgacctaatgaaggaaacatttgtgctttcctatatttttaattttaagaataggatttcggaaggcgacagaaaatttagttcttagacatttaaatagaaagttgtgtgcccctatagaaaatatttgagaatttcttatactatcaagaaaaaattctgtgaattaagatgtaatttataaaataacatttcaatgggggtaaacaggccagaagagtgtgccaagttgtttgtgaatcattccaagcacctcagatgaaaactcacttttattaaaaaaaaaaaagacaagggtttatattcatatacactagtatatatgtacacagcagcatcctgcatgccaaagtagcttcaccgttagtaatccctcactttaatacctcttaggaaccaaagaatgcctctacaagcaaaaagatagttgaaaatagttaagatccaaagtcagaataggccaaa

SEQ ID NO: 275188 - DNA, 344 bp, Homo sapiens
cccaggctagagtgtagtggcgtgatctcggctaactgcaacctccacctcccaggttcaagtgattctcccgccccagcctcccaaatagctgggactataggcatgtgccaccacacccagctaatttttgtatttttagtagagacggggtttcaccgtgttagccaggatggtctcgatctcctgacctcgtgatccacccgcctcgacctcccaaagtgctgggattacaggcgtgagccactgcgcccagccttatagacataagtgaatatttgctgttactatgtttatatggctttttaaagtgatgttttaaaaggcttgtttataatgacaac

SEQ ID NO: 275189 - DNA, 520 bp, Homo sapiens
agctgcaaaaacatctgagcctccacttcacgcaggaattccctaccacttgtgagggagagcccataataagcggtgttcattaggattaatgcctgttgactgtgaaaacatgaaattgatcagaaagccagtttttgaaacaagactccaaggtgactgaggactaaggcaggaaggagggtgtctgctgggttcatcagaactgagtcctggtaactgcataaaagtgaaattgataatacaagagacatgattgctagaaagtgcaaacactgctgtggggggtgacaggcagcaaaatctgttttatttgctaccccagagaagtactgaagggcctagttctatccccagacactcccgtcctgttctaatgtggcatcttttatctacctactagggggagagggccacttcagacacctgagcatgttaataactggctgcctaccaaggtatgtgctatgaaagtgtaaagttgcatcttaacataagttttaaaattttcttggcatca

SEQ ID NO: 275190 - DNA, 492 bp, Homo sapiens
ttccatggcagaaggcccaaaccagagaactggccagacagttctgttgcacctaagcagcatgtgcacttttccaagcacatctcattcccttcctgactccaattatttcaacagcaccttctcatttgcaccagcccatttttgagccccaacaaactatgattttgaaatacctctgaagaccgcatgagctaaccactaagggtgacagtgctctagcctactcaatttcacctgagggcagaaacaaggcaggagagtcttgtcacctggattcggtgcttaggatactttacaatcttctttggatgcatggccaagtcagaagggtaacatcatctggggacagactcaagtaatatggcaccacgtctatggtagaaaaggttgaagaaaaacaggagaatcacatcacctaggtgttgggcttagcaatatgaaataatcccctcttttggccaactccagaataaagaagtgtgttgcatt

SEQ ID NO: 275191 - DNA, 453 bp, Homo sapiens
ccgagtagatcgcccaactgcactccagcctgggagcaagactctgtctcgaaaagaaaaaaaaaaagagagaaaaaaagaaaaaaaaagggcggccgcccatttttgagccccaacaaactatgattttgaaatacctctgaagaccgcatgagctaaccactaagggtgacagtgctctagcctactcaatttcacctgagggcagaaacaaggcaggagagtcttgtcacctggattcggtgcttaggatactttacaatcttctttggatgcatggccaagtcagaagggtaacatcatctggggacagactcaagtaatatggcaccacgtctatggtagaaaaggttgaagaaaaacaggagaatcacatcacctaggtgttgggcttagcaatatgaaataatcccctcttttggccaactccagaataaagaagtgtgttgcatt

SEQ ID NO: 275192 - DNA, 502 bp, Homo sapiens
aatgaaggataaaaaccatatgattttcttaatagatgcagaaaaagcatttgataaaattcaacaattcatgatgaaaactcaaactggacatagaacacacctaaaaacaataaaggccacatatgacaaacacatagctaacatcatacccaattggcaaaagttgaaagcctttactaagaactggaacaaggcaaaaatgaccacttttacccttttattcaacttcatactggaagtgttccctgagcaatcaggaaggagaaaaggcatccaaatttgcaaagaggaagtcaaattgttcttctttgctaatgggatgatcttatatctagacaaacctagagactccatgaaaaaaactcttagatcggacaaatgaattaaagttgcaggacacaaaattaggatacaaaaatcagtagcatttctattcactaatcatgtagctgagaaagaaatcccatttacaatagataagcgctccccctcccccacc

SEQ ID NO: 275193 - DNA, 117 bp, Homo sapiens
aaactatgccaggtgtgtagtgatatcctaaaatttggttttctcatgcctaatgtgcatttagatatcttcttatggaaaatatcttctcaaatttttatattcattgatatactg

SEQ ID NO: 275194 - DNA, 305 bp, Homo sapiens
tgcaggtggctggttccagatggagtccatgaccagaatgagaacttcatgcctgctctttcccaattggttatttctgaataatgcttttaaatcaatcaaatgttgcctttttcaaggctacctacagcccacacctccccagttctgagcctataaaaacctcacactcagccacatggggatactacctgcctttgggtggggacaatccaccttcaggttggggactacccacttctggtccatctctgctgagagctattctgtcactcaataaaacttctccacctttctcactctct

SEQ ID NO: 275195 - DNA, 323 bp, Homo sapiens
tattttttttaaattaccactatttaggcttggtcattcaattagctaagagtctggcaaaatccttgacatacagaagtctaaatagttgttgaaagaaggatgactaagatggacactattaattctatcctaactttcttgctacagtatatacaaattattacttgagcacctatgaaacatcaggcagtttcaatgctggagatacacagtaaattggcagacagacatccttagtatcatggaatttaggtatcggagtcaactcttaatcatattggaaagggaatacctgagttggtggtagtatgaaagcgggg

SEQ ID NO: 275196 - DNA, 571 bp, Homo sapiens
cacctcaattgtctttattatcatctgctgtcagatccttaatcagaaatgtgaacaggcttgatgatttattcaggagggaaaagaatctgtaggtcaagtgaaaaatttcacacacacacccatacacacactgcaccttcaaccttaggtactttcatttcattctgttctcagcagctctgggggcaactccagtgagatccaatattaaggctcaattaaaataagctccaattagtggagcttttttctctggggctagaaaagtcaggaaatggatattgggaaatgtaaaaagtcagctactgagaggaggctgcagacataaatgaacttatttgttgatttctacagttgctatgcagaggcctctgggagtaaaagcttaaccagtctaagctataaactaaaacccctgcagctaaacatgaactgtgtgaaacaagggctccattccagaacagaaaactgctgggcccagaaaattaaaagccagaggcattttccatttaaaactaaatcccagcaccgcctcccagccaaagaattataagcagtatcagattta

SEQ ID NO: 275197 - DNA, 1095 bp, Homo sapiens
gccatctttctccggttttcagcaatctcttctggtacctctccatctaaatctgtctttccagttcccaccaccaaagtacttggaattgttcaagccttagttcttgaggccccaaacactacatccacattgttcatggggcaatttttaaataaaaaatgtgtgaaagaattcctcttagaaatttaacatgtaacttttaatatgctactgaattgcagcaaacatgcggaaatactggcaaagacagctgtagatgaaacagccaagggagagccaacaattatggttggtgttaagttggatgaattgaaataagagacaaatacttcatagaattgtattaaggcatatgcatgaaaaaggagggaagcaattatttttgctttatttggcactgggcaggcttcagttggaacaaactatatttaattttacatgtcatactatataaagagaaaaaacttggagactgttcagagaacagcaactgatgaaaggtttgtgaaattagacctatgagaaattgtgaaaagaactgggcatgttcagtcaaatgcaggacatccaggtgtgatgaatggtgaacaattaactgtaagtatgtgaagagatggttaccaagtctcaggtataggggaaacagaaaggtaaatcatgggattaaaaaaacaaacaggccaggtgtggtggctcacacctacaatcccagcactttgggaggccgacgtggaaggattgcttgagcccaggagtttgagaccagcctaggcaacaaagcgagaccctatttctaccaaaaaataggaaaaattaactggtcatggtggtgcgcacctgtggtcccagctacttgagaggttgaagtagatggtcacttgggcctaggatgtcgagggggtagtgagctgtgattgcactactgcactccagagggacatcttgcctcaacaaaccgcatagcaatggaagtagagaccaaatattgtgaaaaggttaaactaaaaagctttgaagaaactgatggagttataatttagaattctgtatatactattattgaaacaattgaattcaattttatacttaatt

SEQ ID NO: 275198 - DNA, 218 bp, Homo sapiens
gagaaaagaaaactacctggtaattgaagcaggcaaattgctggaagcatgtaagcgatctgaaatctagttactttcacactgccattggatctcctctctactaaaaatacaaaaaattagccgggcgtggtggcgggcgcctgtaatcccagctacttgcggggctgaggcaggataatggcgtgaacccgggaggcagagctttcagtgagccg

SEQ ID NO: 275199 - DNA, 807 bp, Homo sapiens
aaatcaatgagcgttggccaggcacggtggctcacacctgtaatcccagctgtttgggaggctgaggcaggtggatcacctgaggtcaggagttcaagaccagcctggccaacatggagaaaccccatctctactaaaaatacaaaaattagcagggcatggtggtgcatgcctgtatcccagctacttgggaggctgaagcatgagaatcacttgaatcctggaggcagaggttgcagtgagctgagatcatgtcactgtactccagcctgggcaacagagtgagactgtctcaaaaagaagaagaagaaaaaaaatgcagtgagtttatgttgttacattgtaacatctcagcgtagctgtatgcattactctatagcatacctacttaagttttatgtcattcttgaactgtgatttttttttctatttgctttcatagtttggtgggccattgttatggactgaatgtttgtgtcccatcctcacccctaaattcccatgttgaagccccaaccttcactgtggagctggggctgctaaggaagtaattaaggttacacgaagtcacagtggagaatctgatctgctaagactggtgtccttatagggagagaccccagagagcttgttcccttcctccctgtgcacacaaacaagagggcatgggagcacacagagagatggcagccacctacaagccaagaggagaagcctcacaatgaacccccccccccaccctgctggcacctatgtcttcgacttccagcccccagactgtgagaaataaatttctgttggttcagc

SEQ ID NO: 275200 - DNA, 300 bp, Homo sapiens
actctgtttttcttttgttgcttgtactttgtgtgacatgtctaagcaggttttgtctaacccaaggtcacaaagatttactcccaggttttcttgtaagggttttctagttttagcactatgtaggtctatgatccattatgatttaatttttatgaatgttgtcaagtatgggtccaactttatttagagacagggtttcactctgtcactcaggttggaatgcagtagtgcaatctcaactcactgcagcctcagtttcctgggctcaagtgatccgcccaccccagtctcctgagt

SEQ ID NO: 275201 - DNA, 337 bp, Homo sapiens
gagcactgaggagcagtagtggctttgctggtggtggagatggtgatagtgattgtgaccatgaagataaaaagatgacaacgatgatgatggtaccgatggtgattgtagtggtgataatggtgatggttgtgatgatgaaaacgatgatcaggatggtaaggatgatgatggtaataatgatgaagatgatgatgatggtaatgtggtggtgacgatggtaatggtgataatgatgatgatgaagaggatgaagattatcacgatggtaatgatgatgatggtaatggtgatgaaggggttgatgatgatggtaatggtggtgaggatgatggtg

SEQ ID NO: 275202 - DNA, 483 bp, Homo sapiens
tcgtgcattggccactgagaaagaaaaatggaaaatagtttgttagttttttataaattgaagaatgaactttcaaaatgatccaccaatcccattattgggtattttttctatgggaataaaaacttgggtgcacatagctattataattgtttataatagcactatttataattgccaaaactggacacaagtcaaaagaccctcagtgggtgaaaggataaagaaactgtgttacatccatgcaatgaggtattaaccaacaaaaatgatgaatacatgacttatatgtgtacccagttggatgtatatcagaggattatgatgaacaaaatagaccagtttcaagagatttcatattctatgacgtcatttatatcctattttttaaaagataaaattatagtgtaggagaactatacagtgctcaagatcggtggtttccagaagttagagtaagagaatggtaaaactaaaaaggag

SEQ ID NO: 275203 - DNA, 403 bp, Homo sapiens
tgtaagggttgttttaagaggacctctggcctgggggtgagaggttgaacttggattagtggttctgtggctgagccaggtgccacagtgggtgccctgggccacaacagccatggagacctgaggcaccgccaaggggaagcctgagatcaacgaacctacctctccattttggcccagggctgcccctgatcccgggggtcccagacatgcacccaagtgctcggggcctgtgtgaactcacaggggtccctctggaggctttaaatactcaagggaaacacgacaatcctgaacccctgccacacaccacgcatgatttgctctggtaacagacatcccagcgtcagacagcactgccttatctttgcaaagctgggttttggtggctgctgtgattaaa

SEQ ID NO: 275204 - DNA, 214 bp, Homo sapiens
tgaaaaatgagggaaggaaattttggagagaatgaatgtttgtggcacagatggtggtggtgatggtttcctgggcttatccttatctcaaaacttattaagttgtatacattaagtaacagcttttgtcaattacactttgataaagtggtttaaaaacaaaaaacaaaaaacacagattttaataaacctattagattattcagcaacaaca

SEQ ID NO: 275205 - DNA, 507 bp, Homo sapiens
taatgactcataggtgaaatgaattgtaattgtgtaaatattaagtgctagaaataggctcaatttgaaaataaaatgatgcacagttgaaggaaaactcattttttaaagatggtggattctagatgaaaacaatggagggaaatggccaatatggctgtctagaagcagctactgtgtgtagctctcatggagagaaacgggaggggtgagtaaatacaacaccttcaactgaaacatcctagtattcacaaagggagtaatcaaggaaacaacttgactcatggagaacaaagaaaaccaagacaggacaaagcccatctgggagaaacacggagacaggggaccctcccccacctaaggaatccatgcttctttgacagatctttgcaacccttgggacaggagatatccttgtgaacgcagtctaccagggacttcagtctgacagagctacatggagtcttggcagagcaaccactcagacatgcgtggaatcactggagc

SEQ ID NO: 275206 - DNA, 678 bp, Homo sapiens
ggcaaaaagcaattgagattccaggaggcttgcgataaataaaaaggaaagttgggccagaggcgttggcaatcaagatcttaagggaggagcctctgatcaccccactaggtgaccgcagctttggtgaccactaatccaatgctctcacctccctacctctgtacgagggcccagcttacaaactaaatgtgccactgggtagaccgggaatgtcagtaacacctgaaggtcctttaaggagggataaagaacaataaaaacctttccctgaagaaaaacaaaacctttccctggacctcaagctctcccctgactattattctccaaatatttgctggccacaggtggctcaagactgcacccatgggaaggaccccacgatgacctatttctgtgatctaccacctgggcaactctccagacaatgtttcaaaagtggatttccccagcaccttgggaggctgaggagggaggactgcttgagcccaggagtttgagacccgcctgagcaacagcgtgagaccccgtctctactaatacaatatttagccaaggtgtggtagttatgcctgtaatacaccagcagcatcatgggaggctcgagcgaggtggatgagcattgaagtcaggtagattgaaaccagcctggaacatggcagaaacccggggatcctg

SEQ ID NO: 275207 - DNA, 146 bp, Homo sapiens
gacctcatcttcaccagttatatctgcaacagccctatttccaaataaggtcacgttaggaggcgccgagggttaggccttcagcatatcttttgtggggaggcacaattgaactcataacaaatgggaaaagtcatgctaagaag

SEQ ID NO: 275208 - DNA, 417 bp, Homo sapiens
cttgagcatttcacttatggtatgccagacactattcaaagcccttagcttaaatcatttaatcctcacaaacctgtgagttgggttgtcttattatccccattttgcagaagtgagttttgtgagagagaagctaaatacagcacagcaggagttgctcttggacctcaagcatcctggcccagagcccaggtgtcgccactgccctgggcttcctcttagtcataccagggacttgggcactgggcacaaaatctcctctttatataatgtagtggtaccaatagcttctattgattgagattcttttctgggcttggcactgtatgaggcacttggcttctggtttaatctttacatgatcactgtagttatagatgttattatcccagatttataaataaataaggaaacttc

SEQ ID NO: 275209 - DNA, 475 bp, Homo sapiens
  misc_feature (69)..(69): n is a, c, g, or t
cccacaccctcagcccacaccctatcaaacatgtagaatcagcagaggttgtggggaggggccccactncacacccagacagatgtgctctgttccccgcacagctgtccaggcggtagcccatctgcgctcacttcctgcctcccagctccagcccctcacacctcccacacaagggcggggaagtctggtcctgagattcatcccaaagccaatgttgaggcggccaccagcccggcaaagccccagaccctggctcccaccttcccctctcctccacaaggagtggtggaccaggaagggcttcagcaaggtggagactttgcctaagccactctggaggactctgccttgaagttcagcttcagtctcttggcagttgtgggagctgcctagctctgaagttctcccagcatcatgtgtccacatgaaacacgccaatatcactgatctgatttcattattttgtcaagat

SEQ ID NO: 275210 - DNA, 333 bp, Homo sapiens
aatagtttcatgcaggaactacttacatgaagtttgtatagactaaagtatttctgtttagtgccgaaattatgtctggattgtggaggcagattggccaccaccgttcaaaaacaacaacaacaaacaacaggcaacattttaaagcagggtagaaagtcagttgttcagtggttacaacacagactcctctatggttccagtcctggctctgacattcactatccatgagatcttggtctctggggataacaatgatagctatttccttgggttattttgaggataaagtgaaataaagcatgtgaagtgcttagcagggtgcacagtaag

SEQ ID NO: 275211 - DNA, 662 bp, Homo sapiens
atctttgatttgctctttgagagttcttgcttatagctgtgttagagttctgtagacaaaggactttctattcactacagtagtgagcataggatcaatatttgcaaatgctgttttacacttgggagctgtgttgtaggcagtttaaaccagcgttaagcatcctggccaaaagaaaatataagtgaaattagacatattttagcatgtagagatgacaatagtgtgacattggtttttaaagaccactggtagatgttcacatgcgtgatacactgcaattacctctgtcttccctcccatggtacctgattggagactcttactggagtaatagtttcagtttcagttatttaaacccagtgactattgtgatcagttatgggcagtaaaaaggtaaacacagaacctgtctataagtagcttgttctcgtgttggagagtaactaataagaattagtatgagaaagcattaagtcccctaagaggtgcacttatatgagttcagtcagggaatcaggaaaaccttcgtaaagaaggagatatttagctggctttaaaaaaatattggcaaggtttgaatggaggaatgattttttaggcagagagcagtcagtgtaagtcaatgctaagtcaaggatgtatgtagggaatggggagtg

SEQ ID NO: 275212 - DNA, 353 bp, Homo sapiens
tgtatttacgttggtcaaaagtaattgcgttttttaccattgcttttaatgtttaatccttagcttttcctttgagttgagagtgacccttatatccttccaacaaatttcttaagttaatctgttaaattaactgcttgtaaccagttgtagtatttatagcactgcctaaaaatccaggactcaaataacaggtaaactaaattgtggcatgattttgagagtttgttagagtttaagagaatgtattttactgactgtgatgcttagaacattctattttgaatagcatgagttggtgacagaggattaattttcttcctgtatctgtaataaataacatttccataata

SEQ ID NO: 275213 - DNA, 310 bp, Homo sapiens
tttttcatctttaaagctcctccttgctatgtcctaactgggaagtactcttactaactagatatcaaggtggtggggaaggggatgcaggggccatttcaacaaagcatctacagaaattagttgttctgttagaggtagcaaattttacccaactcagtctagcttcagtttctgaattgtttcttaaattagattgtaagctccctgagggcagctactaagtcatactgcttttgtattttcctgaagtattggacacatagtagattctcaataaatatttgttatttagttttttcagtgaaat

SEQ ID NO: 275214 - DNA, 642 bp, Homo sapiens
taccccctcacggattactcaaatatttattatttgttgtgttgggaacattcagaatcctctttgaaaatatacaatatttgaaaatatacaataatatacaataagtagacaataaataatcattaactgtagtcacctaccctgctttagaacactggaattcactcttcccatctttctagctgtaatttgtatccgttaactctcttttccctatgacccttgcccctctacccttcccagcctctagtagcctctattttactctctacttctatgagagtaactttttaaattttcccatatatgaaagaggacatgtggcatttgtgtttctgttcctgacttttttcacttaacgtaatgtcctccaggctcatccatgctgccatgaatgacaagatttcattctttttttttttatggctgtatagtattgtgttgcgtctatataccacattttctttatccattcatctgctaatgaacatttaggttgattccagattataatgtttatactgtgaatcatacatactttatgtacaatgtgtagcatagacaattcctcataatagaagctcaacaaatgttggtactataccattgcctttcctgctctccttttctcactcctcc

SEQ ID NO: 275215 - DNA, 272 bp, Homo sapiens
gttgttcaaggtcaactgtatatggttggctctcacgatctaatattttacataggaatcttatatctctgtctgtcataaataaaatgaacttaaaatttccttttcttttactttttgttttaccaatcaaggttatgctagcctcagaaatgactagagttgcttttattcttttctattttctggaacaatttacttagataaatcatctgaggtcaggagttcaagaccagactggccaacatggtgaaatgctgtctctactaaag

SEQ ID NO: 275216 - DNA, 428 bp, Homo sapiens
agagtaggtcttctggactgctaactttgactgacattactgatgaatcattttgacccattctttttgcctagcttgccaactggatgggtcctttggttatatatactttcattcaaagcattttataacattaacaacttggacaggcgcggtggatcacacctgtaatcccagcactctgggaggccaagggggcgtatccctgaggtcgggagtttgagaccagcctaaccaacatggagaaaccctgtctctactaaaaaatacaaaattagacgggcatggtggcgcatctggtgaatcccagctactcaggaggctgaggcaggagaatcgctcgaacccggaaggcggaggctgcggtgagccgagatcgtgccattgcctccatccagcctgggcaaaaaaagtgaaactccgtctca

SEQ ID NO: 275217 - DNA, 437 bp, Homo sapiens
gcaattcagtggaggggtaggtggctcgttcccccacgttgccccaggaagaggaccctgtccccggcatcctgacccacctcccttagagaccgagagcctctaaggataaacccattcacccgtgtttcagaggcttttttttcctcttataaaataacatttatacgttcgctgtagcaaggaaaacattataaaaaatagtgaagaaaatagaaattacccataattttgccacacagacttagttgtgtccatgtatcttgtgcaccttttttctgtttacggatcaaaatcgacttttagggtcaggcgcggtggctcacacctgtaatcccaacactttgggaggctggagttggggttggggggtggatcactgaagatcaggagtttgagaccagcctggccaacatggcgaaactccatctctacta

SEQ ID NO: 275218 - DNA, 422 bp, Homo sapiens
aacaggatacctggagaaaatttaacaaaggcaatatatacaaaggtgtgggcagcatcaaggaaaaccaacaggaatgatacaccatatacacataacctgaagaatcactgggaggaggattctcaagtaatacaccatggccatggcagtttgactacatcaaaaactttcatggaaagaggcacatgtgaagaagaagtgaggccctcagtttagccagcatcaacatgctagccatataaaccaccttggaaatgaagactcctgccccgatcaagccttcagatgagtgcagccctagccaacatatggttgcaactgactgagagtccaccaagtgagaactgtctagtggagcccttcctgaatttctaaccaacagagccctaagcgagaataaatagttattgttataagcc

SEQ ID NO: 275219 - DNA, 165 bp, Homo sapiens
gagcccaagcagcaaactgcaccttgaggtctcctcccgtgatgagaacatcacggcagaagccggcacttgggggaggcaggggaaccatgacaccagctctggacgtcccctcctgtctgggctggacaccgaacccaggcacttctcaccccgaagcacacc

SEQ ID NO: 275220 - DNA, 225 bp, Homo sapiens
tatgcacacaccaaaactacattaccttgttaaccttttgtgactatccttccaatctgtgtgtgtgtgtgagagagagagaaggagggaggggaagagggaagagagaaaaggactatattatgattattgttctgtaacctgctttaaagttcatctgtttaataaatgtttattgaaaagccgttttgtgcaaggcactgttctagttgctggaagagtgaa

SEQ ID NO: 275221 - DNA, 243 bp, Homo sapiens
ccggcgtgcgggaagccggaggggacgtgagattcaggggctctggaacacaggtgacgcctgggcttataatgcgggccagttaagaacaaatttggctatttaggctgaaaacacgagtagctgctctagcagactgaataagtaattatgaaaagaccttgaacttgggttataaattgaaaacctccccttcccaagccccctccagccccgcggccaactgcaggtgcgccacctggt

SEQ ID NO: 275222 - DNA, 1008 bp, Homo sapiens
aatcatacctaccagctcagatacactaccacagcccctatgcttcaggtggagagggcagtgattgcagaggcctgcggaagggacagcaggcgaagctcagcagaggtcctgcggaagggacagcgggtgaagctcagcacacaggagcaaagctgtagggcagaggtaggggtggaagccaggccttggccacacggcctcaggcaggtgccagaggcccagtttgcccaggacagtcttgatttataccaggtgagggtcctcgtgcagatggtgcattctctagtttccaaactggcagagagcttggatgttttccttgatgcagtgggaagccgttgaaaaattttaagcctcaagtgacaaaaggtgaattttaaaagattgttgaggctgggtgcagtggttcatgcttatagtcctaacagtttgggaggttgagacaggaagattgcttgagcccaggagttcaagactctgtctctacttaaaggaaaaaattagctgggcattgtagcatacacttgtagttccagctactggggaggctgaggagggagcatcgcttcagcccaggagttggagtttgcagtgagctatgatcacacaactgtactcgagtctgggcaacagagcgagaccctgtcttaagaaaaaaaaaaaagaaaaaagattgttcagattgctgaatgaaaaatggattgtcgggggcacagattgagacagaggtcattttaaggagactgttgatgagaaatggcgtggtttggctgaggatggagactaaggaaatgggaagaaatgggtggtagagtcagccaggttgctgatggaccgggtgtaggggagtagggaaaggacagaccccccgatcaactctaggggagcccccacacacccgtgggctgaccatgcggagccctgtggtgaggcaaatctattaagctatacagattcctcacattgcatgatatgaagcatggatatgtcgtagtacgcactagt

SEQ ID NO: 275223 - DNA, 132 bp, Homo sapiens
acatgtccgtgagtggacaagcaagtgtgatgtgtctgggtgggctggcaaacacaggacttttcaggtgggttttcaaatgcgcagcagggtcccttgggggagccagaaactgatcctggagtctgggtg

SEQ ID NO: 275224 - DNA, 364 bp, Homo sapiens
ctgtaactttcccagattgcttgtaagtacgtgcaacgctttaagacgtgacttagattctttcaaaaatgtagactcccccaggaaataactacttcatcttttagaattgcacataaatgatttttaagattcttgagtcttccagagtgggagaacgcacagaactggaaacctcggggagatgcgacaacctttgtgtccaccccactttgctgtgagccagttccctcaggaacaatgtagcccagtggtgtgccctgtgtttactgctgaaaattcaggagagaaacaaaccagccaacaatcagagtgagcaaatcacttctatcctacctctcatgaaataatagaattttttaaa

SEQ ID NO: 275225 - DNA, 225 bp, Homo sapiens
cagtacccagaattcccctccctcttggggaagaaatgtctcaattcagaaaggaatgaaaaatcagaactttctcctttaagaatcaaaggcagtttctcattaggaaaatacccaccatttaaggggaaaatctcaaagcaaacacattttaaagactacaacactataatcatggttccttaagccactaacattccaggaaaaggattttcctagctctaa

SEQ ID NO: 275226 - DNA, 114 bp, Homo sapiens
gggtgagattctaatcagataggatggtggctttattttattgtattttatttatttatgtttttgagacggagtctctctctgtcgcctaggctggagtgcatgatccacccg

SEQ ID NO: 275227 - DNA, 401 bp, Homo sapiens
ttaacgtatatgttcaatagacattgtctaaagtgctaaatctacaaaaagagtgttggggtgttttatggactgaatgcttgtgcctcctcctctctcaaatttgtatgttgaagccctaacttccagtgtggccgtatttaaaacaggaagtaattgaggttaaatgaggtcataagggtcaggcactgatctgataggagcagtgtccttagagacaccaaatatttttctataccctcacaatctccttccatgtgtgaacctggcaagagagccactgttttcaagccaggaagagatcctcccctataccagaaatcacctatgctggcaccttgatgtacttccagtctccggaactgtgagagaaagtaaatttctgttgtttaagtcaccca

SEQ ID NO: 275228 - DNA, 306 bp, Homo sapiens
ggactataagactccaagtgggcttcctggggtggagacacctcatacatgtgtctgtggttttgcattagtggaaaaatgcacgtccatgtgacccacacagggaaagggagggctggaaacctgtgtatgacctctcttgcctttgttagttcctactgttcctgagttacaaactttgctgtaaaccgtcaatacaactcgccaagtcatgtgactccttccggaaaatcgccaaaccagtgggtggttgtgggacccccaaaacagagacatgacaactaaatgctatgtgagattcctgaa

SEQ ID NO: 275229 - DNA, 420 bp, Homo sapiens
tactttgtactttgtacactccctttgtacttgaacttgaattcttgtttcacgatctacttttgggtgaaaccaacctaagacaggctttaacttatagttaaaagtcattaaaagtctcagtttcaggctgggcgcagtggctcatgcctgtaatcccagcactttgggaggccgaggtgggtggatcacctgaggtcaggagttcaagaccagcctgaccaacatggtgaaaccccgtctctactgaaaatacgaaaattatccgggcatggtggcgggcgcctgtaatcccacctactcaggagcctgaggcaggagaatcgcttgaacctggaaggcggaggttgcagtgagctgagatctcgccattgtgctccagccttggcaacaagaacaaaacttcctctcaaaaaaaag

SEQ ID NO: 275230 - DNA, 287 bp, Homo sapiens
gaagtgtgattaactgctcatttttataaatgtcatgaaagagtattggatttggagtttgaattgcatcttaccatttcctagctgtgggatactgaataatgtaatagatgctgtcagtctcctgcccatgttccactggtctcaaccaatgactgatgggagaaggtgtgcaaatactccagcttcctcgcctctcttttgagataagtttggggcatgttctgtgctgtctctaagaattcccttgcaggaccgaatctcaattgctcatagtgttagcttgc

SEQ ID NO: 275231 - DNA, 467 bp, Homo sapiens
ctggaattgtggcatgaaaagctttctcaaacctgactaagtgctgttttctttctctcaccaacagcattattccagttggagatataaagcagagaaccatcattctcaaaactgttctgagagtcagcatgtcacctctttcactcctcaagccttcagaattccaatgctaaacatttctctggcatctaaggaacaaaacgttcaggatagaaaggctgtgatactaccctgctagtatcaatccacatgcaccaggtcctgctgaagtgttaaataggttgatacagggatggaataaaacaataaagtgtctgagagaacttctgaggaaataatactgtgcaccgcttctagggaaggtggcccctagctctgcatgactaacagcagccatcacagacaccatggcacaagcagcccaaatactcagggagaccccacattgagtgagttgtatttta

SEQ ID NO: 275232 - DNA, 544 bp, Homo sapiens
agattttttttctaatagagcaatgagtgatccaaccaagatttatgtagaaggatgctaattgcaacaataagtgttacatttaaaagagaaaaactggaaacaactctaggatccaacaatggagaaaatggttaaataatgcattattccagttggagatataaagcagagaaccatcattctcaaaactgttctgagagtcagcatgtcacctctttcactcctcaagccttcagaattccaatgctaaacatttctctggcatctaaggaacaaaacgttcaggatagaaaggctgtgatactaccctgctagtatcaatccacatgcaccaggtcctgctgaagtgttaaataggttgatacagggatggaataaaacaataaagtgtctgagagaacttctgaggaaataatactgtgcaccgcttctagggaaggtggcccctagctctgcatgactaacagcagccatcacagacaccatggcacaagcagcccaaatactcagggagaccccacattgagtgagttgtatttta

SEQ ID NO: 275233 - DNA, 368 bp, Homo sapiens
tgtaatatataatgaaataattatacaactctccataatgtagaatcagtgggagccctgagcttgtttccctgcaactagatggtcccatctggggggatgggagacagtgacagatcatcaggcattaggttctcataaggagcgcacaacctacatcccttgcacgcgcagttcacaatagtgttcacgctcctatgagaatctaatgctgttgctgatctgacaggaggcagagctcaggcagtaataagagcaatggggaatggctgtaaatacagatgaagaagctttttgctcacttgcctgctactcacctcccgtgtgtggccccattcctaacaggtcacagaccagtaactgtccat

SEQ ID NO: 275234 - DNA, 204 bp, Homo sapiens
  misc_feature (148)..(148): n is a, c, g, or t
cctacgttagctaatgaatattgaaatttctaaaaagtgaaatttcggattcatttctatacatgacaaaagattcaagaaaattcgtttttcaatagaatgagactgtctcaaaaaacaaaaaaatcagtgttcatgtgaaaacctngtgcgtcaatgcttatatcaactttatttgtaaaaaataaaaataaaaaactggaa

SEQ ID NO: 275235 - DNA, 594 bp, Homo sapiens
tgcgaatcttggaagtgcccacgaaatgagatgttttccacccagtcacttctgcaaaggtttaaacctgtcagatctggtgcaggtgaggatggaaacggcccctccgcaccctggcaggtgtgtgactcagagcagccctctggacagatgatcagggtcctcagaacagaaccctcagactcaacaatcccactgctaggaactggctttcctaagaagcaatctcacacaagtgcacaaagacaaatttaaaaggattgaggcagcaatgcttatagcagcagagcattagaaacagacgggagtcggctaaatgatcaaacgttcacaaaacgcagcaccaagcagctgtgaaaaggatgagaccgcttcctatgtgcagcctgatacactgtgagattaaaaagcaaattgtgcttatggcctgatcccgtgttcgtaacatacaaagtcacatccacacgagagcatgcaggaaacctggaagggagcccataaaactcgccagtgtgaggaccagcactgagcagccggagactcatcttcacttacacttaagagcctccctcatgtgctttcagaggtgagctc

SEQ ID NO: 275236 - DNA, 4140 bp, Homo sapiens
  misc_feature (809)..(809): n is a, c, g, or t
tttaatagataagtaaattatatagtatattagaaggtgattattactaggaaaaaaaagttaaagcaggataaagggatggatttttaaaatatgaaataataatactatcttaatcataagtcaggtgaggattattgatcagttaaacaaaggatgatggccctctttgctgcttgttctctttctgccaaagacccaactcttcgtccttttcaatttcttcttcccattgtgttcacaggattgcaccatctttcccacagcctcttgattcaaagccattactcagccagcgggaggctgttcccccaggcaatataccacagcgtcctgaccggctgcccatgagtgatactttcactgacaactggactgatggctcgcattatgacaacacagggtttgttgctgaggaaaccacagccgagaatgccaacagtaatcctctcttaagttcgaaatctagaagcacatcttcgcatggacgcaggcctttgatcaggcaagacaggattgttggtgttcccctggaactcgagcagtctacacacagacacacaccagaaacagaagtgcctccttccaatccttggcagaattggaccagaacccctagtccgtttgaagacaggaccgcttttccttccaaattagagacaacccccactaccagcccattgcctgaaaggaaagaacatataaaggaatctactgaaatacctagtcctttttctccaggcgtaccatgggagtatcatgattccaatcccaacaggagtcttagtaatgtcttttctcaaatccantgccgcccggaatcttctaaaggtgttatttcaattagcaaaagcacagagaggctttcccccctaatgaaagatatcaagtctaataaattcaaaaagtcacagagtatcgatgagattgacattggtacatataaggtgtataacataccattagaaaactatgcttctgggagtgatcacttaggaagccacgaacgaccggataagatgctgggaccagagcatggtatgtccagtatgtctcgaagccagtcagtcccaatgctggatgatgagatgctcacctacggaagtagtaaggggccacaacaacaaaaagcttctatgacaaaaaaagtctatcagtttgaccaaagcttcaatcctcaaggatcagtggaagtgaaagccgaaaagaggataccacccccttttcaacacaatcccgagtacgtgcaacaggccagcaaaaacatcgccaaggatttgattagtcctagagcttacagaggatacccaccgatggagcaaatgttttcattttctcagccatctgtgaatgaggatgctgtggtgaatgcccagttcgcaagccaaggggccagggcgggcttcctgagaagggccgactccctggtgagcgccacagaaatggccatgtttagaagggtcaatgagcctcatgagctgcccccaactgataggtacggcagacccccatataggggagggctggatcgccaaagcagcgttacagtgactgagtcccagttcctgaaaaggaatggcaggtatgaagatgaacacccttcatatcaagaagtgaaagctcaggcgggaagttttccggttaaaaaccttacccaaaggaggccattgtctgcgagaagctacagtacagagagttacggtgcctcccaaaccaggccagtttcagctaggcctactatggcagctcttttggaaaaaataccatctgactataacttgggtaactatggtgacaagccatcagataacagtgatttaaagacgaggcctactcctgtgaagggagaggagagctgtggtaaaatgcctgcagactggagacaacagctgcttagacatatagaagctagacggttagacaggaccccgtcccagcaaagcaacattttagacaatggacaagaagatgtatctcctagtggccaatggaatccttatccacttgggaggcgggatgtacctccggacaccattactaagaaggcaggcagccacatccagacgttgatggggtcccaaagccttcagcatcgcagccgggagcagcagccgtatgaaggaaatataaacaaagtgaccatccagcaatttcagtcaccattgcctattcagatcccctcttcacaggccacccggggacctcagcctggacggtgcttaattcaaactaaagggcaaaggagtatggatggatatccagagcagttttgtgtgagaatagaaaagaatcctggccttggatttagtatcagtggtggaattagtggacaaggaaatccattcaaaccttctgacaagggtatctttgttactagggttcagcctgatgggccagcatcaaacctactgcagcctggtgataagatccttcaggcaaatggacacagttttgtacatatggaacatgaaaaagctgtattactactgaagagtttccagaacacagtagacctagttattcaacgtgagcttactgtctaaatattttttataaatagtgaagatacgtctagccagacctaatgttcaaaaataaatttatacatagaaacaaattttgccaattgctggaccaatggcaaacattagtgccaaatgtataatactatatgttagcactgaccatccttaaaaaatgttaactctataaatatgatgttcatgtggttatgtattagttttaattgtcagcctctggctgtgcattggtgcagttttgtttctgtttttgtttttgtttttaatcaaataagtttcttctcaaaatggatttcatataatttcggagcacggaagcacacacaagctctttatgaattctgctctccatcagaaacactgcctcaaagttgtatatgcctttatatagaaaatacaaatataaagaattgtaattcccataaaatatttctagcacaaggtatatgttggcatatatacaaaaagaatatagagaaaaacaatattttcataaactaaacatctcagatagagaaaaaatatatcttaaaataagactttactatatgatctttttcaataaaaattacatgataatgccttatgaaagtaactgtacatatggtataaagtgtttatatttggttccatattcatttgctaaattctcatgacacagagtgaaatatttcataaattagccatttatctctgggacccaaataaaaataggatgaactaatttgttcaatgcctttagctaattacaatacatgcagagtttagaaacagactaaaggtcattgtagttaagtctttttcaccacaaatttaagcagtggatgatgggtggcaggaaaggtattgctttatttctttcaagttcatgttgattataaactgtagcccctgtgatttctttacttgtaaatgtggaatttatttgtgtgttgcttaatctaatttgctgctttttaaattatttaaaacgaattttggaaattgataaaatttatcattacgaaagactgctgttagaaagttatggtaggtgattttaaatccttggtatttaaatatgaaacttcaaatataatttctcagagctgtggtctacctgtatcattaatttcaatggctgtttttctgggcagaaatagataaaatactttttttccaaaaacagtttcaaggtatgtaaaatcctgaatgctttttcactgaagagaaagacaagcatggttaatgtagaattatttacttttccattgaaactattttcctgcataaatgatcaaaatttattttataatcctttaaaatacttatctttcatattagtcattaatttaattacaatattaatttgaatttccaggataatttcccggagttggttgcatgcattatctttcataattttacatagttcttttgttatataatgaatttactttacatgctagtgtttcaagtattgtatgaggattttcacaatagtatcactgaatgatgtcaccagagctctgagaataatatttgtaagttaactgttttatggggacattgaaaatattgtatttttgtagggtctattaaaatgagtgtcacttattag

SEQ ID NO: 275237 - DNA, 489 bp, Homo sapiens
gccaaagcagcgttacagtgactgagtcccagttcctgaaaaggaatggcaggtatgaagatgaacacccttcatatcaagaagtgaaagctcaggcgggaagttttccggttaaaaaccttacccaaaggaggccattgtctgcgagaagctacagtacagagagttacggtgcctcccaaaccaggccagtttcagctaggcctactatggcagctcttttggaaaaaataccatctgactataacttgggtaactatggtgacaagccatcagataacagtgatttaaagacgaggcctactcctgtgaagggagaggagagctgtggtaaaatgcctgcagactggagacaacagctgcttagacatatagaagctagacggttagacagggtatgtctggtgtttctctgtaagaatatccctcctgcctttagtgttactttattggcatttctaagcacatgtagtgaagcatgaactacat

SEQ ID NO: 275238 - DNA, 4152 bp, Homo sapiens
  misc_feature (821)..(821): n is a, c, g, or t
gggaacttcacccttcattagctgagacccctctgtacccacccaaacttgttctgctagggaaggacaaaaaagaatcaactgatgagtctgaagttgacaaaactcactgtctgaataacagtgtttcctcaggcacttactcagactactcgccttcccaggcttcctcaggatcctctaatacccgggttaaagtggggtccttgcagacaacagctaaagatgcagtacataattctttgtggggtaacaggattgcaccatctttcccacagcctcttgattcaaagccattactcagccagcgggaggctgttcccccaggcaatataccacagcgtcctgaccggctgcccatgagtgatactttcactgacaactggactgatggctcgcattatgacaacacagggtttgttgctgaggaaaccacagccgagaatgccaacagtaatcctctcttaagttcgaaatctagaagcacatcttcgcatggacgcaggcctttgatcaggcaagacaggattgttggtgttcccctggaactcgagcagtctacacacagacacacaccagaaacagaagtgcctccttccaatccttggcagaattggaccagaacccctagtccgtttgaagacaggaccgcttttccttccaaattagagacaacccccactaccagcccattgcctgaaaggaaagaacatataaaggaatctactgaaatacctagtcctttttctccaggcgtaccatgggagtatcatgattccaatcccaacaggagtcttagtaatgtcttttctcaaatccantgccgcccggaatcttctaaaggtgttatttcaattagcaaaagcacagagaggctttcccccctaatgaaagatatcaagtctaataaattcaaaaagtcacagagtatcgatgagattgacattggtacatataaggtgtataacataccattagaaaactatgcttctgggagtgatcacttaggaagccacgaacgaccggataagatgctgggaccagagcatggtatgtccagtatgtctcgaagccagtcagtcccaatgctggatgatgagatgctcacctacggaagtagtaaggggccacaacaacaaaaagcttctatgacaaaaaaagtctatcagtttgaccaaagcttcaatcctcaaggatcagtggaagtgaaagccgaaaagaggataccacccccttttcaacacaatcccgagtacgtgcaacaggccagcaaaaacatcgccaaggatttgattagtcctagagcttacagaggatacccaccgatggagcaaatgttttcattttctcagccatctgtgaatgaggatgctgtggtgaatgcccagttcgcaagccaaggggccagggcgggcttcctgagaagggccgactccctggtgagcgccacagaaatggccatgtttagaagggtcaatgagcctcatgagctgcccccaactgataggtacggcagacccccatataggggagggctggatcgccaaagcagcgttacagtgactgagtcccagttcctgaaaaggaatggcaggtatgaagatgaacacccttcatatcaagaagtgaaagctcaggcgggaagttttccggttaaaaaccttacccaaaggaggccattgtctgcgagaagctacagtacagagagttacggtgcctcccaaaccaggccagtttcagctaggcctactatggcagctcttttggaaaaaataccatctgactataacttgggtaactatggtgacaagccatcagataacagtgatttaaagacgaggcctactcctgtgaagggagaggagagctgtggtaaaatgcctgcagactggagacaacagctgcttagacatatagaagctagacggttagacaggaccccgtcccagcaaagcaacattttagacaatggacaagaagatgtatctcctagtggccaatggaatccttatccacttgggaggcgggatgtacctccggacaccattactaagaaggcaggcagccacatccagacgttgatggggtcccaaagccttcagcatcgcagccgggagcagcagccgtatgaaggaaatataaacaaagtgaccatccagcaatttcagtcaccattgcctattcagatcccctcttcacaggccacccggggacctcagcctggacggtgcttaattcaaactaaagggcaaaggagtatggatggatatccagagcagttttgtgtgagaatagaaaagaatcctggccttggatttagtatcagtggtggaattagtggacaaggaaatccattcaaaccttctgacaagggtatctttgttactagggttcagcctgatgggccagcatcaaacctactgcagcctggtgataagatccttcaggcaaatggacacagttttgtacatatggaacatgaaaaagctgtattactactgaagagtttccagaacacagtagacctagttattcaacgtgagcttactgtctaaatattttttataaatagtgaagatacgtctagccagacctaatgttcaaaaataaatttatacatagaaacaaattttgccaattgctggaccaatggcaaacattagtgccaaatgtataatactatatgttagcactgaccatccttaaaaaatgttaactctataaatatgatgttcatgtggttatgtattagttttaattgtcagcctctggctgtgcattggtgcagttttgtttctgtttttgtttttgtttttaatcaaataagtttcttctcaaaatggatttcatataatttcggagcacggaagcacacacaagctctttatgaattctgctctccatcagaaacactgcctcaaagttgtatatgcctttatatagaaaatacaaatataaagaattgtaattcccataaaatatttctagcacaaggtatatgttggcatatatacaaaaagaatatagagaaaaacaatattttcataaactaaacatctcagatagagaaaaaatatatcttaaaataagactttactatatgatctttttcaataaaaattacatgataatgccttatgaaagtaactgtacatatggtataaagtgtttatatttggttccatattcatttgctaaattctcatgacacagagtgaaatatttcataaattagccatttatctctgggacccaaataaaaataggatgaactaatttgttcaatgcctttagctaattacaatacatgcagagtttagaaacagactaaaggtcattgtagttaagtctttttcaccacaaatttaagcagtggatgatgggtggcaggaaaggtattgctttatttctttcaagttcatgttgattataaactgtagcccctgtgatttctttacttgtaaatgtggaatttatttgtgtgttgcttaatctaatttgctgctttttaaattatttaaaacgaattttggaaattgataaaatttatcattacgaaagactgctgttagaaagttatggtaggtgattttaaatccttggtatttaaatatgaaacttcaaatataatttctcagagctgtggtctacctgtatcattaatttcaatggctgtttttctgggcagaaatagataaaatactttttttccaaaaacagtttcaaggtatgtaaaatcctgaatgctttttcactgaagagaaagacaagcatggttaatgtagaattatttacttttccattgaaactattttcctgcataaatgatcaaaatttattttataatcctttaaaatacttatctttcatattagtcattaatttaattacaatattaatttgaatttccaggataatttcccggagttggttgcatgcattatctttcataattttacatagttcttttgttatataatgaatttactttacatgctagtgtttcaagtattgtatgaggattttcacaatagtatcactgaatgatgtcaccagagctctgagaataatatttgtaagttaactgttttatggggacattgaaaatattgtatttttgtagggtctattaaaatgagtgtcacttattag

SEQ ID NO: 275239 - DNA, 317 bp, Homo sapiens
tatttttttctggtaaaaaccttatttgatttgaatgggcaggttaattatattactattcttaaaaaaaactaggtcatttgaattatttgaaaattaggatacatttcagaatatactcttattaatgttcgtagcaaacatttactgacactatgtactaaataatgttctaagtccttgacacaacaatgctataaagtaggtatttattaatactacctaactcaattttatagttgaagaaactgaggttatctaattgacccacagtcacacagtaataaataccaaagcccgacatctgaacaaaagca

SEQ ID NO: 275240 - DNA, 327 bp, Homo sapiens
gcagctacccgtggtcactgggatggctggattctagggaaggcccagcctgtgggtgagactgagactctagggctcacccagcagggaaaggagtgtgggcaggggggatacggtggcgggtggcggcggagcgggggcggtgcccaggatagacagagcatttcagaggcaatgctaatccatgggcccatgggccttgcccaaccatctcctgcacgactcagcagggagcctggcatgggcagggattaaggaatacgggagaggggccatttcttttcacaggaaaagaactgtggtccaagagcaaggtttcctttcaaa

SEQ ID NO: 275241 - DNA, 460 bp, Homo sapiens
caattattgaaattgctgcctagaatcttccgctaccacagtgtattttgattggactgtttattgccttagcaaacacaatgcagtgctgtgtctttggcatcttgccaggaaagatgagccaattttctcgtgttgcttctggatgtcaaaacattctcatctgaccatgccacagaagaagtttgttgagagtgtgactgactgacataatgactgattggctgataacggcagctgacagtgattgattgagtgtaaaattatctgttctcattacttctgaaattgaattcagattggttctattggagggtttccatggagaccataacctgctatagcaagtgtttgtggatgcaatgttttattgtgatcaatacctgtttcctctgctggtccaaagaaattattaatgattatagtcaagtagaaagaggcaaccatatataagaagaaa

SEQ ID NO: 275242 - DNA, 340 bp, Homo sapiens
ttaaaacaaaatgatatatagctttaatagcatttgaggaaggaaaccaagttcctccttttttctagatttggctcaacaaagctgaaaagtaaattttctttaaattttaagggtggctttggtctggatggtgtgtgtatgtgcatgtgtgtcaggcaggtagttgaaaggccaacctcactgtgatgttttatcccaagtccagatgtaccactgttatatctccaggtacatcttttaactctaggaagtaaacacagtttttactgtaaaggtaaaccagaaagttaagtttaaatcaagtttgaatataatttgtacttggagtaataaacct

SEQ ID NO: 275243 - DNA, 407 bp, Homo sapiens
aagtgaaatagtattctgatttaggactgcagtatttagaacactgaaggatttaagtgtcatttctaagatttttaattttaatttttattttgtgtgctttcattaagaaagaggcagccaggctcagtggctcacgtctgtaatcccagcacttagggaggcagaggtgggcagatcacctgaggtcgggagttcgagaccagcctgaccaacatggagaaaccctgtctctcctgaaaaatacaaaattagccgggcatggtggcgggcacctgtaatcccagctactcgggaggctgaggcaggagaatcgcttgaacctgggaggcagaggttgcggtgagccgagatccctacattgcactcaagcctagacaaaaagagtaaaactctgtttcaaaaaa

SEQ ID NO: 275244 - DNA, 6053 bp, Homo sapiens
  misc_feature (547)..(547): n is a, c, g, or t
  misc_feature (851)..(851): n is a, c, g, or t
  misc_feature (1577)..(1577): n is a, c, g, or t
  misc_feature (2175)..(2175): n is a, c, g, or t
ctgttctggccttgaaaatgatccttcttaaaaggattttcctccttcctcaagggaaagaaaacctattgatataaaacttcacttcccattcagtttcccctgctaaatgccactccagtagagactgagtgttgataaatacaggggaaggaaaaagtcgtaagctgagcctggtcacattgccccttgtgatatcgttttatttttaacttcgcaacacttggactatttctgttgaagttttctctcctttccctgccttcccaacagaacgctgtcctctactgcagctgatgcaacccagccacctcccggcaatccgcttacttgcaatcaagggttcaggtgcaagcagatgctgactcagcctgttccattaagagctaagaagcaagaagaaattggggcgccatggggaaagcccgcagatccccgccagggcaccacaggcattgtgagggatgcttcaaccgccactgccacattcctgtggaacccaacacctcctgcctggtaataagctgccacctgctctgtggtgccnccttccacatgtgcaaagaggcagagcaccagctcctctgccctttagagcaggttccgtgcctcaactccgaatatggctgccctctgtccatgtcccgccacaaactggccaagcacctgcaggtgtgccccgccagcgtggtctgctgctccatggagtggaaccgctggccaaatgtggactctgaaaccacccttcatgaaaacatcatgaaagagacccccagtgaggagtgtttggacacagccctggccctgcaggatcagaaggtcctcttcagatccttgaaaatggtggaacntttcccagaaactagagaggctactgaggaggaaccaactatgaatggtgaaaccagtgtggaggaaatgggaggagcagtgggtggagtggatatcggtttggtaccacatggtctgtcagcaactaatggggagatggcagagctaagtcaagaagaacgggaggtgctagccaaaaccaaagaagggatggacctggtcaagtttggccagtgggaaaatattttcagcaaagagcacgcagcctctgctttaacaaattcatcagcgagctgtgagagcaagaacaagaatgactccgagaaagaacagatttccagtggccataacatggtagaaggagagggcgctcccaaaaagaaagaaccacaggaaaatcagaagcagcaggacgttcgtacagccatggaaaccacagggcttgccccttggcaggatggtgttctggaaagactgaaaacagctgtggatgcaaaggactataacatgtatctagtgcacaatgggcggatgctgatacactttggtcagatgcctgcttgtacacccaaggagagagactttgtttatggcaagctggaggctcaggaagttaagactgtttacaccttcaaagttcctgtgagctactgtggaaagcgagctcgacttggagatgccatgttgagttgtaagccaagtgaacacaaggcagtggatacttcagatttggggatcactgtggnggacctgcccaaatcagatctcatcaagaccaccctccagtgtgctttggaaagagaactcaaaggccacgtcatctctgaatccagaagcattgatggactgttcatggattttgccacacaaacatacaactttgagccagaacagttttcctctgggacagtgctggctgacctaaccgctgccaccccagggggactccacgtggagctccacagcgagtgtgtgaccaggagacacaacaaaagcagctctgccttcactttcacttgcaacaaattcttcaggagggatgagttccccctgcacttcaagaatgtccacacagacattcagtcatgtctcaatggctggttccagcatcgatgccccctcgcctacttgggatgtacatttgttcaaaaccatttccgtcccccagggcaaaaggcaaaagtaatctatagccaggagctcaagacctttgccattaagccggaggttgctccagagctgagcgagggaaggaagaacaaccatcttttgggtcatggaggaaaaagccagaattctttaaccagcctgcccctggagattttgaagtacattgctgggttnttggacagcgtcagcctggcccagctctcccaggtgtctgtgctgatgaggaatatctgtgccactttgttacaagagagaggaatggtccttttgcaatggaagaaaaagaggtattcccatggaggcacctcctggagagtccacagagagatctggcagttcagcagcctcttctccaaaatcaagagctgggagtttaatgaagtcacctccatgtctgagcacctgaagtcctgtcctttcaacattgtagagcacaaaactgacccgattcttttgactagcatgtgtcagccccgtgagcaggcccgagagagcttagtctccacctttagaatcagaccacgaggaagatacgtctcctaaaaattcagatgccactcgatgcacccttcttggatttcttctcggagttcctgaagtaggacagagtgtgtggttttgaggactcccttctgtaaactgcctatttgcttatcggggtgtattggaacacgcaatgtccttcgaaacctcaacacgaggcctaagaatttcctaagccatgtcttgtaccatagtgccacattgatgacttgtttccttttttcttttcttttcttttcttttttctttctttctaaaatagattggtctgagaagaaaataagtaatttgaggccatttggaagatgggcccaatttcttaagtgatgagagagcacgaaattccataaccagtacaggcctgtgcttttacatgggctttttagttcacaaagcactttcaaatttatgggacaggaaatgcaggatgggactccccagggaacgcagggtgaagggaacaaagctggaggctctggagctgggtctgttttgacggtcaagtccagggctcattttggttattctactgcctctaggccagggtagtcctaacacagcctgacataggagagcccctggctgagcatggcagccttgaagacaccacaggccaaaacatgaggggcagaaatgggatcacagagtctgttgctagaatcttggcaacatacagcaggaaagccttgataaatcgggagtccaaaggagacaccatatttatggagaacattaggacaaaaagtcaccaacttactttgtaacattttaataatgacttaagggtcaagatttttttcttctgaaaattatgttctgagttaggcagaacatagccatggccctgggccaccctgtgctatctgaaatgacctcaatacactaatgccaacctcagcgtcatgccagaatgcacagggcagcccagggagatcacacctttggcaaagtccagacaaggcccactgcagttcctatggcgccagtcaccagctcctagacagcacttgggtaccccattggggtcttggagaggaagacatgtgaacataacggctccctgaaattgctcctacccatccatatttctggtcatgctttcagtctgacaaaaatggatgatactgctgtttttggtaacaaacagtgaatattcataagaacaaaagtaacagaaaaaaagacacagtagaaactggcatcccctaaagcagggcttcttagccttggaactattgacatttttaaatggataattctttttttttttttctaggtggggaggggatggagttcactcttgttgcccaggctggagcgcaatgacatgatctcggctcaccgcaacctccgcctcctgggttcaagcgattctcctgcctcagcctcccgagtagctgggattactcgcctggctaattttgtatttttagtagagacgggctttctccatgttgttcaggctggtctcaaactcccgacctcaggtgactcgcccgccttggccttccaaagtgctgggtttacaggtgtgagccactgcgccctgcctgaactggataattctttgttgcaagggactgttctgtgtactacaggatacttggcagcatccttggcctatccattaaatgtcagtagcacccccacagtggcaacaatcaaaaatgtcaccagacattgctaaatattggggagcaaaatggctccccgttgaaaatccctaaaggatgtcatactagtgacaataagttaggatatgcttattttttagtacagcaaaatcttatcgcacatagctatccacaatagttatgatttaatgcagctctttatttatgaaataggttttagacatgtggtgattttaagttgggaaccagaaggaaatgattcgtttggtatggcttcatgtccttcagccacccccaagaatgtatcctttcagctctctttggttatacctgaagccaggagcgttgagttattagccttgtgtttatattcctctcactgtaattggtgtcattttcccagcagtcctagcagtcctcaagcaagtgggaaatcggaaaagaaaaggacaggcattgtagggaagcagaggataaagaatttagccaacaaaagaaacaatctagtcaatctgggtgcttttatttcctgggttctctctaaacatggctcagagctggtgtagatgaagtaggtgaaacctctgaaaagagtctagaaggcagtagagcaagtcccagaccagaaacatgctcatcttttcatcgtaatgtgccactcggtactatttggtaatgtcactctatttttcctaatcccatcctttggtttgtatttcatatttgtatataaggcaccattttctaaaaatatgactagggtgtgacctaaggttttattctgtgaagatgagtaactggaaagaagctaacactgcagtgggaaggaaggaagagagttgtccaggtggtagttcgacgtgttttgaatctagtccttcctacatggaggataaaagctcctaaagtccactctgggtttgtgattttaatagaaatagaaagggaaactatagaccaatggagatgaaaatcaggggctatcgacagatggaggagaaataaggtgctacatagagaaaggaagagggcagaaggctttcccttcccaaactgggtgagctggggaagccttggttcaggagagtggcactgcccacaactgctttgtgggttgtgcacttccagccgcactctccccctccagttgctgccttcagagccgtactgaagcacgagcttcaataagacaagcacacttcatagtgagagggcagcggtaccaaagcctttcagagagactatggattagacagaaatgatttgtgagaggaagctggagtgaacagcatgaacagcgagtgttacctgacagaggcaagacagctagaagtggcttcagatttagaaacagctgaggggagcaaagacggactgtgtacacagggagggaggatgtctatgggcagagcccttggtgagtatcatcaccaagaaaggcagtccagagtagagatcagccgaatatggaggctgaggtctgtagaactgggccagagaggaccttactgccttagtagcataagggtctggaaaagaagtttctatctcacaacaaaggaaaaagtgaaaagcaaggtggaacttgaagatacgtcacgaaaatcactataaaagtctgatttatgtgtgatgtcaaatcaaactgaaatgaagaatgagattgagtatatctgtggtgactgacctctgtatactagaaacctcaacatctctagaagaggaaataaaagctgctttgcactctgaaaggctaattgggtgaatcttataagttaggtctagagacagatgtgtgattcacaggcatagaagttgtcgctgaaaccaagtgtgtatcatgaagaaagaccagagcacaagcctgagaccaaa

SEQ ID NO: 275245 - DNA, 276 bp, Homo sapiens
tggagtcagttgtgtagctctcataaaatgagaacatgatccagaggctcttccaagtgccttatttatattaatagtgcttcattcgtttttcaataatatggaggaggaccaaattacggatgagaaaactgacacccaaagagatgatgtaatgcccacatggcaggctagcatttgaatacagtgcagtgttctttaccatgtatattaactgttctggggataagagggtcttttaattaaataaaaacactatacaatgtgtaatcctca

SEQ ID NO: 275246 - DNA, 406 bp, Homo sapiens
cttggcgccaagcttcaggctgggcccaggtgtgtgccatgtgtctctcatttttcttggctgggcaatctatccagagcgtcttcttgtcatggtgatgtcaaagcgcaacaaggcaatctgtgccctgtccaccatcaacccaacagccaaagccagtcatgtgaccacaatcaagatattggggaaggaggcatgactgcccagagtgggagaaggaagagagtgcatatgctttattgtttttatctaattatatatgttaaatatatgattgagaaaatgtgaaaataaagaaattatttggaaattattaaaattcctccttaatactaccacccagagagagtcaccttaacattttggagtatcaggcttgttttgaaatattctttaatattctttt

SEQ ID NO: 275247 - DNA, 564 bp, Homo sapiens
ttgaaattcatcttgcttttgcctgtaggcagggagcaatttattaaaatactctgcatatccaatatttcttaaacaaacaaacaaaatctcttatactcagctcaaaaagatggtgacagatgaaggaagaattagaagtgttaaaaaaagaagaaaaagaaaaaacaactaaccacgtggcctatcttagaacctgactgatgattccattcagataatatttcttgggcacccacaggccacaagccacatgacattagatagagaaaatgatagaaatcaagccatatttctctacttgcaagcaagttatatactagcagatacatacaatacacaaaatgctcttaaatccaaataaatcacattttcatgatgcaaatactgacagcttaaatcgacatagcactccattggttacaaagcacttctacctaaaacatcttatttaatttgaaagtaagttaatctagttaggttaaagagttgtgtcaatcgcaagttgtctccaaaagctacctggagcataaagaaccaagaagagctacgacaatattgaga

SEQ ID NO: 275248 - DNA, 248 bp, Homo sapiens
ggctcccctgccttcatgtcccccacttgctctggcaccacggcctccactttgcctccagacctgttattcctggccgagcgcccagcccctggtgtaaaccccatgaggtttcaaaggaagaagatggtccctcaagtcgcatatgggctctaaacacttcccccgcggcccctgtggttgccctcaagtttcctgagctccgttgagtcagaatgagtgttttcctggtgacggatggctgtgtg

SEQ ID NO: 275249 - DNA, 233 bp, Homo sapiens
atccagggttttgcttttgctgttgagtgtgacaagatggaagggcaggcaggctagggtactgtgaaaaggcttgaagttctggacctagaatgcctgatgaagtactggatgaagcctggttaagaagggatgagccacaaactcactattttccacattggacccctcatcttttttcttctgaaccctatatccatgactgtaaaggacctgggatctttacctactta

SEQ ID NO: 275250 - DNA, 423 bp, Homo sapiens
atgctggcaaggttgtggagaaaaaggaatgctcatatactgttggtgggggcgtaaattagttcaaccattgtggaagacaatgtggtgattcctcaaagacctaaagacagaaatgccattcaaccaagcaatcccattactggatatgtatccaaaggaatataaattattctatcataaagacacatgaacacatatgttcacgtcagcactattcacaatatgaatgacgtgaaatcagcctaactgtccagcaatgacaaactggatccagataatgtgatacatacacatcatggaatactaacactttcctccactacactttctaccaaagtatattttaatgtcagatatttcattttcctctctgggtgataataaatcagggaacaaaaaatacactttgaaaattaaaag

SEQ ID NO: 275251 - DNA, 485 bp, Homo sapiens
attcttattccgtaccatacacaaaaaataactcatatttgattatagagctatatgtaaaaggtgagattagtaactaagatactaaaacatactacctgtacaactgcaagtaatataagtgggttaatcaaccataattccatctgtatatttctctacttagatcattatttctataataataataatcccctgcatagtaatctatcaatatctataatgctattttaaataaaactaaattagatggtgggtcaccgtcactctgatttagtggaaattcaagcaaaaatattattgatactccatctttctccttagatttttggtattattacttctttctatttttcattttttgagacacgttctcactctgtagccccaaatggagtgcagtggtttgagattggctcactgctgtctacagttccagcctcaagctatcctcccacattagcctcccagatagctaggactgc

SEQ ID NO: 275252 - DNA, 428 bp, Homo sapiens
aaaaagaaagggtatccaacatagaagggacagaagtcccaggaggagggcaaaatgataggaagacagttgtgccagaagacctaggtatagatgacagctacagacagacagctccaggtacccatggacaaaaaacaaaattaacaggaaattcaatatttttgtgcatgtgaatttgagaggctgtatgaaatgtaggaaaacttagctagagactcaaggaaaaacaaagcaaataggaagaaaaataaagcaattgttaactttcagtgggaacaggaaagaatatatagtaattttttgtcttaccattaaacagttttccaggctgggaacagtggcttacacctgtaatcccagcactttgggaggccaagccaggaggatcacttcagcccagcagtttgaggccagcctgggcaaca

SEQ ID NO: 275253 - DNA, 554 bp, Homo sapiens
gtcaggagaaatagttgtttgcaatatgatataatagaagttatgagagaagtatgtatgggcacacccaggtgcagaacctaatccagagggtggagtggagaagtaaacaatgttagagaaggttatgtggaaatgtgacccctgtacttaacgcttaactacaaagaggagttttggaaggaagaatattggttcttttcaacagagcagtgtgtgcaaaggccaataggggaaagaggccaaagaaaagactagtgggccgggcgtggtggctcactcctgtaatcccagcactttgggaggccgaggcaggcgggtcacgaggtcaggagatcaagaccatcctagctaacacggtgaaaccccatctctaccaaaaatataaaaaaatttagctgggtgtggtggcgggcgcctgtagtcccagctactcggaggctgaggcaggagaatggcgtgaacccggcaggtggagcttacagtcagccgagattgcgccactgcactccagcctgggtgacagagagagactccgtctcaaaaaaaaaaaa

SEQ ID NO: 275254 - DNA, 488 bp, Homo sapiens
caggcctcggggttggaaagctacacagtaaacgggtggagtaccaaagcttagttgtgtgtctagagaattcagggcgtggtgagtgatcagctcctggaagagcaaagattagtatttaatacatatgcatttattagcgtggctgggtctctcgtcaaaaatgtcataatttcacagatcaggattttaaagcaaatagaattattgatatatatctcttccaacagccaataaacatcccgcagagaggacagcttacgcatgggctcacacaaagaaaattgcagagtctttgcttaagctacagcctgaaatattaaaattctgattttcatgcgctgttagaaatagttttcaaagaattccttcctccagccccatcacaacccctgcccatgtgagaggttaggagtaaatcatatgttttttaaaacatttgctgaaacctcctcccttttccaagtctaccaaatttttatctcaaa

SEQ ID NO: 275255 - DNA, 588 bp, Homo sapiens
actggataccaacaaggttaaatggtggaaaagccataatcacttctaaattcaagggtaggattaatactgtattttcacagtacctgaaagttctgtggcctttcctagacaccagttcatgtgatcaccagaacagaactgaggttgaggggaaagttagctatcagcattgggcccattttacagatgggaaactgaggcagtggaaggtaaagtagtttgcccaaggttactgtttctgcataaatggctgccctgggactagatgggaacagaactaccacagacttgtgggtcagacatactttggttaaaaactcaaccttgacatttatgtaatgttggtaatgttactttacctttttaagcctggggttttttgtttgtttgtttgtttgtttgtttgtttaaacttacaaaatggggaggataaagcctagatcataagtttgcagtgagggttagtttaaggagatgataggtgcaaaggacctggtgctcgggaagcctttgcacctcccaccgtgtacttacattacttacatttgattttgaaatatagtataagactgctttggctaacat

SEQ ID NO: 275256 - DNA, 497 bp, Homo sapiens
ttggctccaagcttcagtgccttcttcctggcttcctcgaagtcttccttctggccagtattggccaggtaggcagtgacatcatagccttgttccttcagccacacgaggatgcaggaggtgttcaggccaccactgtaggccagaaccaaggagcctttgctggacatagcgtctgggattggaggcgtgagttcccggtgtcaggaatctgtcttcacggtgcagtgaaccactcgggcccgagcagcggtggcaggcgacagagcaggtctcagcttggttgtcacttcctcaaggaagccttccctgatttctcctctgcctgatgaacctagatcttccactccatattcctataacacattcacctttttttcatagcactcatcactgtttaattcacctgtttaatgcttgcctttttcattacactgtaaactccatgtgtttactgctatatgcaagaattagcctgataacttacactgggaaaa

SEQ ID NO: 275257 - DNA, 398 bp, Homo sapiens
aatcctgacaaaagagaacatcagtcagattcattggtagaagactctgagatgtgttctaatttgatgaagctctgaaatgtgatcccacttctgaagtctgtttgcccagggtcgtggaatagttgtctggtgtccctggcagccctgccgcacgtggctgcacgcccttacgatgcttagatgcatattgtttaccggtctcccactgcgcatttctatgacttgcagagtaaatgcttctgagaagaactttgtgttcttgcacaagggacatttatgaaataaacatatttctggccctatacatttgtcttccaaggaaccaaaaccaatccgttgaattagacacgagtaagttctgttaattaaaaaaaaaaagtcaatggtgagttatg

SEQ ID NO: 275258 - DNA, 584 bp, Homo sapiens
atgtaaagaagcatttgctaggagttctgagagagaagtttctgcatagcttagagagagctacaagaagagactgccactcttattctggatagtctagagttgaggagtgagttctagagctagcatggccatttcttttactataatgagagtctagcctgaggaaaaattgaatacacaaagaagggcaaaatacataacagtgaagcatagagaaagagaagcttgatggcgacaggaatctcagcattgaaatgtactagaaaacacacaaacttgaaccatgaagtctcattaaaaattttaatttgctcaaagtaagttttctgacacttgcaacgtaaacatctcaacaaaatttaactctacgttgtatcagtgaaaactgacccatactacaattgactgggtgaacttaactgtgggttcacaagaccacgtaatcaacaaggacatcccaaatccttccatgcacaaggcatcatggagaattttagtgttagtataggaacgaattatccataaggaatacactccagttaggggaagaggaataccctataggaaacgaagatgagcaa

SEQ ID NO: 275259 - DNA, 608 bp, Homo sapiens
acatttcaccagcagccatccttccgagggacactctaaccctgaaagcttttacttaatctctgcaatttaggaagatttctggatgtcaatttaactgcgttgggaaggcaagacggtgtgggaccaagaagggcactgtctagccctcccggcaggtctcacactcctgcatgcccaagggctgatgggtggactggaaaagcggctgcagcaaggctggtttggtttctttcctgaagctcacaggaatatagtgccttggttctgtaaacaccataatccctgttcctgaatgttttctttgaaatcaaccacatcttgggagacagatgaccttaagcacacagtatgcagggacccagtttcctttcccagaagacgaaagctctggactggaacctctgaccacagtcagtcttgctctggtccttgatgttctgggatcctgatcgtcaggaaatctcgacggaccgtccgtgggaagtgccaaggggctgacaacccagctggaaaggcccaggcttggcctccacccagctgactgctgggtctgggatttgatatgattccacttaacaggctagtatgtgagcctcttactgttt

SEQ ID NO: 275260 - DNA, 419 bp, Homo sapiens
gagcactaggactttgggtgaaatctgtcctttctactttaaatagtagtgtgtacaattctgtagctaaaatgagtatgttgttaattaagggttttctatgtctctgagaggtaactgaaaaaaatttgtaatgatgcaggaaattataaaaatacatggaacataagtttttctaaactaattagcaatgttggcctatcatagtcattatttgatgactcagagaaaagtgacaataaccagtgcaaagtgcccttagttcagtgagtgagggaagtccttgactcctgtaggcaatcagtctatgcactgaagcatgagatctacttaccattatattgctttggctagctgcaaatgtattaatattcatgccattatcatctggcctcttttgaagctagcaacagcaatct

SEQ ID NO: 275261 - DNA, 354 bp, Homo sapiens
aacagaagaggaaaaggatgataaaaaatgtaatcgaggtaacttatttaatcttacatgctggttgacaaaaattcctcactgttagcagttcaaagtatgtttctcagccaggtacggtggctcacgcctgtaatcccaacactttgaggggctgaggcgggtggatcacttgaggtcaggcatttgagaccagcctggccaagatggtgaaacaccgtctctactaaaaatacaaaaattagcagggcgtactggcgcacacctgtaatcccggctacttgggtggctgaggcacaagaatcgcttgaacccaggaggtggagattgcagtggccaaggtcacgcccagcc

SEQ ID NO: 275262 - DNA, 410 bp, Homo sapiens
tgagacagtctcgctctgtcgccaggctggagtgcagtggcgcgatcgctgcaacctccgcctcccgggttcaagcgattcccctgcctcagcctcctgagtacctgggactacaggcatgtgccaccatgcccggctaattttttgtattttaggagagacggggtttcaccatgttggtcaggatggtctcgatctcctgacctcgtgatctgcccgcctcagcctcccaaagtgctcggattacaggtgtgagccaccgcgcccggtagactggccttttctaaaaacaaggcaatccctcatttggaaggtagacatgtaactgattctatactgttccaagattttttttaataacatgatacaaacactatcagatccagaaacaagcaaagcagagtactctg

SEQ ID NO: 275263 - DNA, 334 bp, Homo sapiens
tctgcactcacccaccttccgcagtgccagatcgctttcctcctcagaatctgaggaatagaaccaagccaccattaccagcccaggttcgcttttataagagagattatacttcttcccgactccacggaaatgatagggcttcttccttatcaactttgcctccctggacctttcccaatgaactgttaatatactttctaggaaagggccgggcacagtggctcacgcctataatcccagcactttgggaggccaaggcaggtggatcacctgaggtcaggagttcgagacccgcctggccaacatggtgaaacccctgtctactaaaata

SEQ ID NO: 275264 - DNA, 352 bp, Homo sapiens
ctttggcttctcgggtggccatccctaccttggagaaaagtcctcaggcagcgaggtgcagatacctgtagttggaggtcagctttgggtggctagggcaaattcagccccatcttgtaattgtgatgatttatacacatttgttcctccatagcaacctgtcagatccctgaaggcaggatatgtaatttgtcttgtgttctaatagcatttagtgcatattatgcttttttgtttgctcaatgagtgagttgattgttggtactttctactttggcaaagtgttacaagtgcagtttatggtgcagttcggactccagcctgggcgacagaacaagactctgtctcagaa

SEQ ID NO: 275265 - DNA, 526 bp, Homo sapiens
ctcgtgccgaatcggcacgagctggcatataaaaccttctcaataaatgttagctcttacatttactcctctattagaccataagctgagtaagaggaaggccccagtcgtgtcatttgtgataactcatgcatagtaggtactcacacccacagacgactccggtctctcaagagacaagaaaactgattttttaccatctcggacggctacaaaagggtataataactcatgaaggcaaacagagacatttacaaatgggtagattaggactggacatggcattggagcatttgcgtagctgttatttctgtagcagataatggaaagtgaaaggggtgcacgtcagcgtctcttccacggtgagaaggaagtcactgttgcaagaagctaatgcgaaatcatttctctctgatttacctgaggaggttaacaaggacccatcaaaaccttccaggcttgatgccccatagtctgctggttaataaacttcactcatgcaaattctgtcccatccttaaatttg

SEQ ID NO: 275266 - DNA, 1541 bp, Homo sapiens
tggtctactggaaaaattgtgttttccctcctggtgctgttggtcatgctatctcctatccctagggtggtcttcacagggtgggaatccttctagaggtgtatgaaattcctggccggtgggaggccacaaagttactactgtatttttcaaaataaggattttattttttattttattttgttttttttgagatggagtctcgttctgtcgcccaggctggagtgcagtggtgtgatctcagctcactgcaacctctgccttctgggttcaagcaattctcctgtctcaccctcccgagtagctgggactacaggtgtgcgccaccacacccggctaatttttgtatttttagtagagacggggtttcaccatgttggccaggctggtctcgaattcctgacctcaggtgatctggctgcctcatcctcctgaagtgctgggattacaggcgtgggccactgcacccagcctcaaaataaggactttctttaaaaagcttaagaaactgacctaatacaatttcttccattgaaaatttatctgtcagaattctgcctctgtgtgcctgaaaacacagcgccaaagctcctggcagcatgaagtcttccctttcatttcagtcaagcaatcagatgtgtaagaggataaacaaacactcgtaatgaataaaaatcctcggccacacggactcagagggagggactgagcaggaatcgtaaagtgggcatttagctgagcatggtttccactaatcattgttatttttctgagccagtatagaatagttaaggacaagggagccctgcttgcttctgtttgggcttagagtccaggcttggctactcattagctgtatgactcatggcaagttatttaaccttcctgatccccaaatttctcatcaatacaatgaggttatgagagtagctacttcctaggaacataaaatgaaaaaaatattaagtgaaaaaaaatgcacgtaagatacttaccaaaatgacggctgtagttaaacgttagctgttatatttatctggcatataaaaccttctcaataaatgttagctcttacatttactcctctattagaccataagctgagtaagaggaaggccccagtcgtgtcatttgtgataactcatgcatagtaggtactcacacccacagacgactccggtctctcaagagacaagaaaactgattttttaccatctcggacggctacaaaagggtataataactcatgaaggcaaacagagacatttacaaatgggtagattaggactggacatggcattggagcatttgcgtagctgttatttctgtagcagataatggaaagtgaaaggggtgcacgtcagcgtctcttccacggtgagaaggaagtcactgttgcaagaagctaatgcgaaatcatttctctctgatttacctgaggaggttaacaaggacccatcaaaaccttccaggcttgatgccccatagtctgctggttaataaacttcactcatgcaaattctgtcccatccttaaatttg

SEQ ID NO: 275267 - DNA, 1043 bp, Homo sapiens
ctgctatccatattgatcgcctggactgtgcagtatttccagtctgtctcagaattctgcctctgtgtgcctgaaaacacagcgccaaagctcctggcagcatgaagtcttccctttcatttcagtcaagcaatcagatgtgtaagaggataaacaaacactcgtaatgaataaaaatcctcggccacacggactcagagggagggactgagcaggaatcgtaaagtgggcatttagctgagcatggtttccactaatcattgttatttttctgagccagtatagaatagttaaggacaagggagccctgcttgcttctgtttgggcttagagtccaggcttggctactcattagctgtatgactcatggcaagttatttaaccttcctgatccccaaatttctcatcaatacaatgaggttatgagagtagctacttcctaggaacataaaatgaaaaaaatattaagtgaaaaaaaatgcacgtaagatacttaccaaaatgacggctgtagttaaacgttagctgttatatttatctggcatataaaaccttctcaataaatgttagctcttacatttactcctctattagaccataagctgagtaagaggaaggccccagtcgtgtcatttgtgataactcatgcatagtaggtactcacacccacagacgactccggtctctcaagagacaagaaaactgattttttaccatctcggacggctacaaaagggtataataactcatgaaggcaaacagagacatttacaaatgggtagattaggactggacatggcattggagcatttgcgtagctgttatttctgtagcagataatggaaagtgaaaggggtgcacgtcagcgtctcttccacggtgagaaggaagtcactgttgcaagaagctaatgcgaaatcatttctctctgatttacctgaggaggttaacaaggacccatcaaaaccttccaggcttgatgccccatagtctgctggttaataaacttcactcatgcaaattctgtcccatccttaaatttg

SEQ ID NO: 275268 - DNA, 658 bp, Homo sapiens
ctacccacttcattctctatgcttcagcctcacagatctccttgcgaatttcctggaaactcacacgtatgcttctatctttggaactttacaccttattattctattagatatcctcatggtttgttccttcattggcatcatgaagatctcttctcaaaaatcccttcgtaaaacatatcctccatgacaacccccccaaaactatagatttatcaaggaaaatccctccccagtatcactcttcccttatttctccttctccattgcccttattatcttctaataagctaagtaatttacttatctcattttccatttccacagcctagcatataattccatgaagtcaggagctttaaatgttttagtctcttgtatccccagagcctaaaacagtgccttgtatgtaacaagtatttaatacataagtaaattagaattcaataaaaaatacatgtaagaatgtttacaaggatagatgtccaataaatggtttttcttactatttgtaaaaacttgcaaattcaagtgcagttatcccaaaattggtggggcaaatagtagtgatcaagttgatagagaacgatataaactagaagtcattctcccatacacattgaatttttaacgccaaaattccatctgggaaggtcat

SEQ ID NO: 275269 - DNA, 373 bp, Homo sapiens
tgatcattgatcattgatcactgatgccttgaactgctggactccagcaatcctcctcccttagcctccggagtagctgggactacatgtgcacgccaccatgcccagtggtttccttttcgtattgtacattttcactagtagggcagatcagctgaggtcaggcattcgagaccagcctgtccaacatggtgaaatcccgtctctactataaatacaaaaattagccgggtgtggtggtgggcacctgtagtctcagctactctggaggccgaggcaagagaatagcttgaatccgggaggtggagtttgcagggagctgagattgtgccactgcacaccagcctgggcgacacagtaagtctctgttaaa

SEQ ID NO: 275270 - DNA, 417 bp, Homo sapiens
tctgaggctttatatgttgctggagaaattccagccagcttcctttttcatttatttatactatgcattagaatgttgtttttcaagcctttaaacggctgtggaaccctgtgctcactgaagttttacgtcaagtcctgctgggtaaatccaataaaagagctggtctggttgcagtgatgggtgatactcaacgcatgtactcccaaacccttggccccccaggactctgtggggccccagcaaattcctagtgttcctcagatgctagttgaaaacccactgctactgggcacagtggtgtacacctgtagtcccagctacttgggaggctgaagtgggaggatcacttgagcctgggagtgtgagtccggcctggacaacatagtgagaccctgtctgtggaacaaaaacaag

SEQ ID NO: 275271 - DNA, 684 bp, Homo sapiens
catttcaaaaggagatcagggactccaggaagcagagcgtaactccccacttctaaactgtgggcttcacataatgacatcctaccaagaaatcagtatagcaaaggaggaaaaagagtaacttcgcattggagaaacctaacaaacactgtctcagccaggtgatcaaggccactgtgagcagtgatcagtcaagtcgaaagtgcatatcatatgacaggatgagaatggcattttacctcgacatcttccctcccaaaactaataatcctactacatcagacaaacctcagctgagaaacagtttccaaaaacacctgactagtaccccctaaaaccatcaaggtcatcaagaacaatgtagtcctgagaaatgatcacagccgggaagaacctaaggacttggtgtcctttggtatcctgatatggaatcctggagcagaaaaggacattaagtaaaaaccaaggaaatagaaataaagtataaacttaataatatatcaatattaattcattaattgtgacaaatgtaacatagtaatgtaagacattaaaatggggaaaattgggtatgatgtggaggagaactctgtgtattctatttgcaactcttctgtaaatgtaaacctatttgaaaattaaaaatttattttttaaaaagaaaattaagaaacctatatactt

SEQ ID NO: 275272 - DNA, 700 bp, Homo sapiens
ggaggtgagctgtctcggaaggagccctccacgcagaccccacagctatattaactgtgcttaacgtaatcatgaacacataatcgcggggctattgaagactccataacaaacaagatcaaggagcctggagcctctaaaacatgaaaaccaattagcactatgaaatctaagagcagacacagccagagctcgagaaaaggcatgggcaggagctggactgctcaatcctgctcactcctcccttccttcctgttacacggttctgttctgaggtgctgctgagaggggcttcctctcctgggccagaactgaggctaaggcccgaagctgaggacagaaagtgatcaactccccacattctaaagaggctgctggagaagcggccacgactggggcctgacatccttctctagggattatcaggcagcactctgctacccatcccacaggaccgtaacttatccttcccaatccgtagaaagcaagactctgaagcatgtgcgtttgtctttggccttgtgggaggtttctattcaagaggaaaactgatgccatgaaggatgggatgaggtgctttctcttcccagaagggaaagatttgggtgcctcgtgaaagggagtctggagtcagctccctggtcaatgatctacttgcagagacaactctctgatctcaccttaataaatgagattcatt

SEQ ID NO: 275273 - DNA, 454 bp, Homo sapiens
ctgggttcatgccgttctcctgcctcagtctcccaagtagcatatacgttttttttttatacacatgggcaaatagaaacattcttttgctatcagtggagagggtctaaaagaaatgacatctcagtagcaacaagcacacttaatgcctagatctagtttccaatgtcattcttcaatagaaggccccttccaagtcatatatatatatacagggttccttgaagaaatggtcaattctaggaccaaggcaggaaatatacgagatgagcctggaacttcttttagtgccaaaaagtaaggaagtgcttaaataaacgcaaacaaaacggaagcccacattgatggggatgtgacaagtggcacctgtgctgactgaaagagcccccagtggccaaccctggaacaatttagcaacaaaataaatggccccaaactccagtcttatcatgag

SEQ ID NO: 275274 - DNA, 487 bp, Homo sapiens
gtgttttcctggatactagatatgctgagttgggacaggagctaaggatagaggtgaggaaacccgcagacaacagcgacatgctcctcatctttgagtcccagcgaacctttccactgtgtgtgtgtgctggaatgcagttaactgatcacctgcaggcttgaactccagggttcaagcgatcctcctacttcagcctcctgagcagctaaggactacagcacattatgttcctgaaaaccaggaactgcttcctgtctgacccactgcagtggtggagaggatcaagggaaataatgatcatggatgtgcttaggagacgtaagattttactaagaattgctgtgagctgggcacccttctacgctctgcagacaccatggctagtaagacaggcaaagacctgccatctggagcttgtttggatatagggtagggggacggggagaagggagataaacaataaacaagtaaatttacactcaaa

SEQ ID NO: 275275 - DNA, 580 bp, Homo sapiens
gtgttttcctggatactagatatgctgagttgggacaggagctaaggatagaggtgaggaaacccgcagacaacagcgacatgctcctcatctttgagtcccagcgaacctttccactgtgtgtgtgtgctggaatgcagttaactgatcacctgcaggcttgaactccagggttcaagcgatcctcctacttcagcctcctgagcagctaaggactacagcacattatgttcctgaaaaccaggaactgcttcctgtctgacccactgcagtggtggagaggatcaagggaaataatgatcatggatgtgcttaggagacgtaaggtgagatacaccatcatggagctgtctctgctctccctgtcccttcagtgtgcatggtccataccactcagtcattccttacccactctacagattttactaagaattgctgtgagctgggcacccttctacgctctgcagacaccatggctagtaagacaggcaaagacctgccatctggagcttgtttggatatagggtagggggacggggagaagggagataaacaataaacaagtaaatttacactcaaa

SEQ ID NO: 275276 - DNA, 207 bp, Homo sapiens
cagtctcatctctggtggtagggctgtgtcttaccctctcccagggaagtagctgtggggaggaggaggtgctgagggagtagtggagggaggggagttgctgagggagtagctggggaaggtgaagtactgagggagtagctgagaaaggggaggtgctgagggagtagctgagggaggagaggtactgagggagtagggagggag

SEQ ID NO: 275277 - DNA, 742 bp, Homo sapiens
ttatcctaagcaaattaatgcaggaacagaaaatcacatactgtatgttctcacttataagtggcagctaaacactgggtactcatggacagaaagatggcagcaacagacactggggactactagagggggaaggatgggaggagccaagcactgaaaaactagctattgggtactatacttactacctgggtgacaagagcaatcataccccagacctcagcatcatgaaatatacccaggtaacaaacctacacatggaccccatgaatctaaaataaaagttgaaattattaaaaaggcaaaaataaaaaaataaaatccaggtaattgtaagtatataaattatatcttaataaagctgttaaaaatgtttaattaatcagttaatagatgggggaaaatgaaacagtaaaaattatccagtcaatcccaaagtaaaaatgaaatgagacaggccgggtgcagtggctcatgcctgtaatccaaacactttgggaggccgaggcaggcggatcacaaggtcaggagttccagactagcctggccaacatggtgaaaccctgtttctactaaaaaatacaaaaattagccgggcggggtggcgggcacctgtaatcccagctactcaggagactgaggcaagagaattgcttgaaactggaaggtggaggtcacagtcagccgagatcacaccactgcactccagcctgggcaaaagagggaaactccgtctcaaaaa

SEQ ID NO: 275278 - DNA, 396 bp, Homo sapiens
cctcccttcattgacacagacacactctctaagcttggatctgtagttctcacacgcagtgaggtttcagcactgtcttctaccatgtcctaggatacctgggctccttgaccctggggagctttaccttggctttcctggccatgggtttgcctgacaccttcaataagtcaagttcttgatgttcagcatgctggtgttctgcagtcacctccctccttgccgaccacagcatcaaggggaaggtcctggaagccatggggttcttcttcatcttagctttcagtgctgagctacttggctgcatctttgcccccatatattacgttactcttatgagatatgaataccttccaaggtctgaagattaaaataggttctggaagcagtaagaat

SEQ ID NO: 275279 - DNA, 210 bp, Homo sapiens
ccaaaaaagaaagtattagagttctctctgcctcaattatttataaaatataattattttcaaggagaaaaaagttcctcattctgtttattcttccccacagtttctgacctataaacaatatccaggatatttagcacaggacctagtatatagtcgactcttcataaatatttgttgagtaaataaatgctggtgattttctcgttg

SEQ ID NO: 275280 - DNA, 387 bp, Homo sapiens
acctcctcgtcttcctttttctcctggtctccaggtcattctggcctttacttaaacatccccactttgctctgtgtgacttgaacattgggaatgtaataatgaccacttttgaaaatgtaaaacagaaaacaatattacaaatatttttgtcagattctatacccaggtaagatagataaagacaaataatttcccttctctgtgtaacttttaaagtgttgtacaagttaaagtatgagtgaaatactgaagaacaaggcagttattaaaaacctctgatgacattgggcatgtgggtatttgctttatttttatgcttctattcaatatgctacattcaaaaaaactgtaatgggtgattaaaaacttgtatctgagtccagt

SEQ ID NO: 275281 - DNA, 362 bp, Homo sapiens
tgtgtaactgacctgcttcatctagaaaattgccggcgtaccagcaatcacacttgcattttaaattctaaacattgggccaggcacagtggctcacgactgtaatctcagcactttgggggagccaagacgggtggatcacctgaggtcaggagttcgagaccagcctagccaacatggcaaaaccccatctctattaaaaatacaaaaattagccatgtgtggtggtgggtgcctgtaatctcagctactcaggaggctgaggcaggagaatcacttgaacctgggaggcagaggttgcagtgagctgagattgcaccattgcactccagcctgggcaataagagtgaaaccccatctca

SEQ ID NO: 275282 - DNA, 398 bp, Homo sapiens
aggactttactataaggaacctagggcctgcacttagagcaaaagttccatgaggggagagactgcacatgccctctttgcttttatccccaagcacttagcatttagtaggtgctaagaaaaaggaaagacccaggactgggcgtggtggcgcatgcctataaccccagcgctgtgggaagctgaggtgggctgatcctatgagcccaggattcaagatcagcctgggcaacatggtgaaatcccatctctacaaaaaatacaaaaaattagctgggtgtggtggcacatgcctgtggtcccagctacttgggaggctgaggtaagaggattacctgagcccagaaggccaaggctacagtgagccgtgatcatgccactgcacaccagcctttttc

SEQ ID NO: 275283 - DNA, 181 bp, Homo sapiens
atcagctgtgcagagagagggacccggaggagcgtggggctcagagagacacagaaagagggtctcacaggaatcacaggcagacccgaggcagaaccccagggaacgtagcagcatctgagcatccgggagacagccctgagggaagagagactgaagccgatagggtctgaggcgggga

SEQ ID NO: 275284 - DNA, 527 bp, Homo sapiens
cacatttgctcagaatgtccctgcaagcagaaaatgcaggacctcagcaagaaggttcagaaagtaccctgttcccctaataaactccagatgcatctgcatctggcttctgcacacacgtctgaatggccaacttggaaaaactcagaggaaaggaaccaggagtggtggctcactcctgtaatcccagcactttgagaggccgagacaagaagatcacttgagcccaggagttgaagaccagcctggggaacatggcgaaactccatctccacaacaaaagtacaaaaaaaaaaattagtctggcatggtggcgcgcacctgtagtcccagctactggtggtggcagattgggtgggggttagggggtgatgtaggaggatcgcttgagcccaggaggtcaaggctgcagtgagccatgattgtgccactgtactccagcctgggcaacagaagaaaaccctatcttggtaacaataataataattttaaaaagaaaaataataaaatgaacttgaaatttttaa

SEQ ID NO: 275285 - DNA, 319 bp, Homo sapiens
tatatatatatatgtatatatatattaatttatagttcctaggactttttaagagttttacagtaatcttcagcatttaccatgcaactttcttgtttgattatgcataggattgattagacaggtattttcaaaaagcctgcaagcatagtactcagactcattgaaagtttatagaatttggcctgtgtggaaaactctgtgctccaagtacaacaactaactgaattctctaatttaaacaactttgaagggaagtgaaaggttataaaatgatacagactcataccgcagaatcaccttaaaatgcagctgttgg

SEQ ID NO: 275286 - DNA, 377 bp, Homo sapiens
ggagtgggagttgactgggcagacattcacctcacctcggtggagtcatcgtatagtttaaagcagcagttgtcaaccagggtcagtttgtcttgaggtgacatttggcagtgtctggagatatttttaattgtcaagacttggaggggagggtaatactactgccatctagtgaatagaggccagggatgctgctagacgttctacattgcacagcatattccctcacaacaaataattatttgcccaaatgtcagtagttccgagattgagaaaccagcttaaagtgtacaggtgtgtgtcgtatgattgagctagggttctgtgctagtaaagttgttttgcctgcaaacatcagaaagctgatctatttaagt

SEQ ID NO: 275287 - DNA, 330 bp, Homo sapiens
aaagactttaaaagactagtacatacataaacacacaaacacacacaaaaagcagaatggtggtattgtctcactctggtgaaggacagtggaaggaaacaaggagaaccttctaattctttatgcatttgttttgttagaatattgtgcaaagtgtttagctgttgtgtgatctctccataaaggcagagtttattatgattgtgaaaatcagataaaagttaaagaatgtacaaaactaaagtaaccggccaggcgtggtggctcacgcctgtaatcccagcactttgggaggctgaggcgggtggatcacgaggtcaggaaatcgag

SEQ ID NO: 275288 - DNA, 111 bp, Homo sapiens
tgtaatgaactatttgttctcttctagatgacagccagttgcttaaaacctataatgagatgtcaggtgaattgcactgattggcattgatggatggacttgttgaaatat

SEQ ID NO: 275289 - DNA, 557 bp, Homo sapiens
gggccacaaaacacatcttaacaaatttaaaagaatagaaattataccatgtttgcacttagactataatagaattaaagcagaaatcaatacagaaagataactgaaaaattcccaacacttggagattaaacaacacacttctacataacacatgagtcaaaggagaaatctcaggagaaatttaaatatattttgaattaaatgaaattaaaatatgatatcagaatttgtgggatactgcttagcagtgcaagcagtatttagagggaaatgtatgacattgaatgtgtatattagagaagaagaaagatctaaaatcagtcatctaagctttcaccttaggaaaataaagagaacagcaaattaaatccaaagtaagcggaaaaataaaaattagagcagaaatcaatgaaattgaaaacaagaaatcagcagagcacaatggctcatgcctataatgccagtactttgggagggcaaggcaggaggactgcttgaagccaggagtttgagaccaaccagagcaacatagtgagactctgtctctacaaatt

SEQ ID NO: 275290 - DNA, 164 bp, Homo sapiens
tagccctccttcccctcctaccctccacatccacacttctctccgcagcccttcccgtccacatcgatcagtagccttcaattaaactgctgcacagcaagtgtcactgcgcccagcccacttccatttattcttgtattcttgtatcagttaagcctccctca

SEQ ID NO: 275291 - DNA, 211 bp, Homo sapiens
gacgagtgacgatagaatgtataagacaaatcacagttgggaggaatgttgcttttatgccaggcatgctttcccaggaaaacccagggaagccagcttggatggcataggagctactgaatgaagggaaaattggctttgatgcttccctgattcccccagcccagttctgggctgtgtgttataattccgcctcagataaaaacatgtc

SEQ ID NO: 275292 - DNA, 1093 bp, Homo sapiens
atcacttgctctgatcacacagagtcaatctaagcctagtcccactcacttcatccagctgtcccacactgcctggctttgcaagacagcagccgaatcttattagaagtctgggcatcgagtcctccttcttggtttagaattgtcttggaataaatcatcctggttggggagagcaccagagaattatagaatcccacaggcttctcaaagataattcactttaaactgttctccgtaaaagccacataaaaatgtccaacaaatcatagaaaaatgagctcatggagttaaccacaaacttgaataagaatgtgtttgtccagagctagaagtatgtagaagatgttttcaaaagtgtggcaagtagtaaaaattgggagaagaaagagactggagcctggtttggttctcattgtttttctgggaaagaacggagaaactagttagatccaattctccttgccccaccctaatttttgatgttctcagaatttgtttctttgaagttcaagctaatagatttatggcctctttaagcagttgaaaaccatcacattacactcaaatgcacatgttttttctcactccagcagaaacatctgaaagttctgtttaggtatttgcaaagaactagtatgcctctcagatagcatatactttaggcagaactgctcttgtctaacttatttcatgtgacatgcagtggagggattgttgaatgaaatgttagtgtgagtattccttaggtgttattgtgtcttgggtttaaaaatggcagatggagtcaagacaagcctgtccctctttctgtctgtgtcaggctttgccgtctgttctcttcctggcttcactggaacagacatttttttttatgtatgtgcacagtgctagtgtcacaggatgacatgacatgctaccaggactgcctcactgtcaggatgggtccagtgactctacaagttcctttttgaaatgggaatctggtctagatttttgcacatctgttagcttcttcacataagtccaagtctttctcacatgctaatttccttgtatcctatttctttgtaggatttaaaaaaaaaaaaag

SEQ ID NO: 275293 - DNA, 540 bp, Homo sapiens
acctacccacactctgtactgatagacattaaatatacaccatccttaccagtttatgagtgattggaatttttgttgttctaagagaatacaagttgttggaaaatcatagaccctaagttactggtgcaagataactgaaagtccctggcctgccattatgataagtacattctacatgcatcctttgttatttctgcatatttatacaactggaagctaacactctctgcagtgcctggggggaagtgctgatttcttagacctggaagaattctatttcatttattctgaatcatagcatactatatgctttcaacgtgggtagtctttcatttccggtcaaattttctccctttttattaagttacacaaagccatgcactttcttcccctcttcattatgctctgtgtacagaggtttttttaatcagcatcctctgaacagactctgctttgtaagaattcctcagaaaattgttcactgtgcagatctgtgtttgaaaatggccacgattaaagacatttctcagcagttca

SEQ ID NO: 275294 - DNA, 751 bp, Homo sapiens
gaagagaagtgtgttgagcactgtgtcaaactagacacagaaagccaaaggtaacttaagacgtaatccttactttcaaaaagttcacaacatagtatgtatgtgtggagaggggagggagggttgatatacaaacccaaaggtaaagtaagagctgttcaatattataggtatgataataaacatcctgtagcatttagtgaatggataaagaagggagtggtcagttcatcctggtggtgtcacatacgaaagttacattttcacacagagtcttgaaagtgtgtttgtattgcaaagtaagaagaggggaaggaagagcatttcagacagagagaacagagtaaactaagatctagtgatgtgaaataatggaggattcaagactctaacagaaacatggctcccacataaacataagaaggattgcagaagaggggggcagaagccagatcatgaaaatacatctatacattgctaagaagtttagcatacacagtacctttggaatattttaatcaggggaaagacgaagttatgttttagaaagaatacttcagtaacaatgtgacagatgaattgaaggaaagatgagtacagcattagagacaaaaacttgttgcattcgtccaagggaggaaagtagggtagtagcaataagcttggaggggaaaaagtggataccagagagattcagggataatccactggacttggtgatagactaaatgttaagaggaaaggggaggag

SEQ ID NO: 275295 - DNA, 521 bp, Homo sapiens
gctgaaacaggtgtcctccacctagttgcggttatagatttccaagcccttccacaaccagatttggaaatatcccagatcttagatgtccgtgggctaacttccagaaggtgcacacagggcatggcataatgggaattacttgagcctgtatacagaagcagcagacatcgcattgagcaaaagggtaaaggctaacagtaacggagtcttatgtttgtacagcagattgaaaagctatgatgaaacggaaggcctgtaatgttgcttataaactgtggtactaataaacaggctagaaattttctttaactcatccatctaggcacacgaagttctaattagcctttgaacagacttggcacatccaaatcaaaactgcagataagaaagattctacgagtcagagccataatagcaatgctaataacatcaccataaaattgtatagtattggtatgctcagccataggaaacaatttccagtgtgttcagaatacaaggtatttctcgttaacaaa

SEQ ID NO: 275296 - DNA, 470 bp, Homo sapiens
ttccagttgtttgttattattttttaaattctgcagcaaataacctcttgtacatatgtcattttgcaaatgtgggcatatttctgaagttagcacttcttgccttgattatcctaatagcctcctaacctgtttctttttccttattttcattcatctgtaattgctgtgctggcttaaacgcttttaaaaagtatttgatgacattttaattttttccctacacagctgaggggcgtagagtaactccttcactcctgggattcagtaccattccctcagctggcatacgaagctctcctagttacttgttaggtacttaagttcccagaaggacatgggaggattaagacactgttaaattcatgggagtgttctcaaatataatttaaactaaaaatagaagcaatttagtaatatttcccctgttttgcagagatattgcttaggctaattctaacatttgtttg

SEQ ID NO: 275297 - DNA, 670 bp, Homo sapiens
  misc_feature (1)..(2): n is a, c, g, or t
  misc_feature (11)..(11): n is a, c, g, or t
nnagaacgccngtgaattgtgagagtgtgcagtcgcgttcctgctgtccggacacttttttcctctactgagactcatctggtagatccgcaggccagtcctcccaggggctgaagttgtgaaatatgggttttctaagaagattaatctatcggcgtagaccaatgatctatgtagaatcttctgaggagtccagtgatgagcaacctgacgaagtggaatcaccaactcaaagtcaggattctacacctgctgaagagagagaggatgagggagcatctgcagctcaagggcaggagcctgaagctgatagccaggaactggttcagccaaagactgggtgtgagcttggagatggtcctgataccaagagggtgtgcctgcgaaatgaagagcagatgaaactgcccgcagaagggccagagcctgaagcggatagccaggaacaggttcacccgaagactgggtgtgagcgcggagatggtcctgatgtccaggagttgggcctgccaaatccagaggaggtgaaaacacctgaggaagatgaagggcaatcacagccttaaaagaagacacgctgaaatggttcaggctgctcctgtgttggaaatttgaccattaaaattctcccaataaagctttacagccttctgcaaagaaaaaaaatgtg

SEQ ID NO: 275298 - DNA, 420 bp, Homo sapiens
tggttcactgggatgtaagttccatgagaacagggtttttgagggccttttgctgactgctgtattctcagctcctgggacagtgcttgcctctctctctgttgaagcatagcccactgcagttcagacgcaatatgtgttaaaataccagctgtgtgccctgttgatggcaggttggggggtggtttagcacgtcgaggacagcacactgtggctttgcttgccggctcactgagcatatctgagagagcttttcgtgcattatcagtcagccttaattgcagtttcaggccttggtcctaccacactgatcctgtgtgttttgtacaagtagatataaacagggttcatagcactatacatagcactataattttaaaaaattgattatgatgtatttggaaatagctataaatgacc

SEQ ID NO: 275299 - DNA, 2214 bp, Homo sapiens
  misc_feature (1117)..(1117): n is a, c, g, or t
  misc_feature (1119)..(1119): n is a, c, g, or t
  misc_feature (1176)..(1177): n is a, c, g, or t
  misc_feature (1180)..(1180): n is a, c, g, or t
  misc_feature (1184)..(1184): n is a, c, g, or t
  misc_feature (1231)..(1231): n is a, c, g, or t
aacatgctgttaatacttgtaagactcctagcaaactgcatttaattttttaaattagttttagtgtacataaaggcatgtcttttccaaatactgtactttttgaagtgttctttgttgttcattaatctttgtgcgtttccctccagtctctaatagtaggttgtagcatgatttgcttccatcgtgtgaattctgttcggttttgattttcaagtatgagagtgagcgtaagctacccttataggttacctaaggtaagttagaattagaacgtctttatgctagggttactactccccaccataaccaaccatctgcaaaagcgttcagaaagaacatgctagcaaggtcaaaagcttcaaatcacgaaataagaacttgaaaacgagcaaaattgctgctgaggcgctctgccatttaactcaaaggcttcactttatttaggtttaaagtatgagtgcatattcagtggacattgagctccgaactgttcaaaatctctattcatctgcattctggagtagagctgcgggtcacattattagctccatctttggatttctgcctggacccagggcactcctaaccgttgtgggatcatataacaatcttacaggatgaattttctgttagtccaagcagaaattttggcacatgaaaactatcttaccataaacaaacaaaaaaagtacaaatggtaatctaaggaaaatagctaaaatcattaaacaactcttacagccgtttcccctgttttctctccattttttaaaagcatattttcctttactttcttccttctgctatgggaatttttcagggttctagaccttttttctcttctgcggctggaaagttaaacacaggtcattttttaaataagactgctagtaaataccttcttaataaacaacaccaaatgctagtcttgtgggtgagtagttgaacagcaagtaaagcactctatcacctgtaattttcctgtggtaggcacaccccatctctaccttcacgtaatttctgattatgcctccataccttacacatataattcatttgtgggtgggggcgacagagtcttttgctcttttgcccaggctggagtgcagtggcnanctctgctcactgcaacctccacctcccggcttcaagcagttctgcctcagcctcccnngtngctnggatcacaggagcgcaccaccaccccctgctaatttttgtatttttngtagagatggggtttcccctgttggctaggctggcctcaaactccgatctcaagtgatccacccgcctcggcctcccaaagtgttgggattacaggcatgagccaccacgtctggctataattcacttcttgtgtgtgacttcctactaatttgtaatcatgaaagttgggcacatacccagtatgctcactatttctctgcagggcctgatacagtggctgctacaacactgatactctgcatttgttgaatgagtaatttaaattttaaattatcatctagaatcatttagagatttatttagactttgataaatttagataacccacacacagtttattcctagagttcttgatacattgttacagtaagtttggtcctggcaacagcaataacacttactgtaataacttaattcttcatacgaggttgcttcacttttattattaagcagaaaatacccaaagtaaaattgagctatttgggactcctttcagaatactgtgtaggctgaagcattgttgtatcagaagtgctctgttatttgaatgcataaggtattcaacaaacaaatgcttattaaattaaatggtattcagcatacagctactgtcaccgtgctaggagttcacatttttcatatgcgtggcagttagcactggtgcatgtttccttcagcctcagaaatggaggtgtctgcgtgttgcccagatctaccttgaaaactctagttgcttcctaacacctaggttgtatagtgggacttgattatgttttataaagccaagtctggtctgtgaggactgaaaggatttcctcatcttaactctaatttggcctgcaatgtctggggaaaacccaaaactaaaatgtaactaaatgtggaactgtttttttctgcagtttgatttccttgtaccattttcagtacagttaaattcatcacctcccctacctcaccatccccctccccctgcaaaaa

SEQ ID NO: 275300 - DNA, 317 bp, Homo sapiens
cctctatctgtcctcatttttcttcattttcctctgctcctggtgctatgggtatcaaacagccctagatcaagccactgtctccagaggctggaggcttctgtctctggccactattatcagacctatggcttccagaactctagttgctattccccctggaaggccagaaggagggggggcctttaaaactgctgggagctgatattctctgccccaggaccccagtgcagattaagcagccatcacatgaagggccactgccgaggtttttctcctcttctctgaggctgatcctagtagtagttcctttccac

SEQ ID NO: 275301 - DNA, 845 bp, Homo sapiens
acccaggagtcgttcacgcctactgaggagcatgtgttggtggtgcgcctgctgctgaagcacctgcacgcctttgccaacagcctgaagccagagcaggcctcaccctccgcccactcccacgccaccagccccctggaggagttcaaacgggccgctgtcccgaggttcatccagcagaaactctacctcttcttggagcattgctttggccactggcccctggacgcatcgttcagagctgtcctggagatgtggctgagctacctgcagccgtggcggtacgcgcctgacaagcaggcttcaggcagcgactcccagccccggtgtgtgtcggagaaatgggcgccctttgtccaggagaacctgctgatgtacaccaagttggttgtgggcttcctgaaccgcgcactccgcacagacctggttagccccaagcatgcgctcctggtgttctgagtggccaaagtctttgcccagcccaacctggctgagatgattcagaaaggtgagcagctattcctggagccagagctggtcatcccccaccgccagcaccgactcttcacggcccccacattcactgggagcttcctgtcaccctggccaccagcggtcactgatgcctccttcaaggtgaagagccacgtctacagcctggagggccaggactgcaagtacaccccaagtgtttgggcccgaggcccgcaccctggtcctgcgcctcgctcagctcatcacagaggccaaacacacagccaagtccatctccgaccagtgtgcggagagcccggctggccactccttcctctcatggctgggctttagctccatggacaccagtg

SEQ ID NO: 275302 - DNA, 850 bp, Homo sapiens
gaaaaaaaaaaaaaaacaaaaaatacgacataggtcgaggctgcgtgataaatcggccgaggagagcactgcacgcctttgccaacagcctgaagccagagcaggcctcaccctccgcccactcccacgccaccagccccctggaggagttcaaacgggccgctgtcccgaggttcatccagcagaaactctacctcttcttggagcattgctttggccactggcccctggacgcatcgttcagagctgtcctggagatgtggctgagctacctgcagccgtggcggtacgcgcctgacaagcaggcttcaggcagcgactcccagccccggtgtgtgtcggagaaatgggcgccctttgtccaggagaacctgctgatgtacaccaagttggttgtgggcttcctgaaccgcgcactccgcacagacctggttagccccaagcatgcgctcctggtgttctgagtggccaaagtctttgcccagcccaacctggctgagatgattcagaaaggtgagcagctattcctggagccagagctggtcatcccccaccgccagcaccgactcttcacggcccccacattcactgggagcttcctgtcaccctggccaccagcggtcactgatgcctccttcaaggtgaagagccacgtctacagcctggagggccaggactgcaagtacaccccaagtgtttgggcccgaggcccgcaccctggtcctgcgcctcgctcagctcatcacagaggccaaacacacagccaagtccatctccgaccagtgtgcggagagcccggctggccactccttcctctcatggctgggctttagctccatggacaccagtg

SEQ ID NO: 275303 - DNA, 563 bp, Homo sapiens
agacaggcaccagtgcccaagggcacagcctgtgccacccgctgcggatttgcagcagtgcagaagcaggcctgggaggccctctgcagatgtgtctgtcttagtgaggcctcccccggggtgggctgtgtgggcgctgggccaagcacttccataccacaagctggtcacagttcagaccaagcagtgcaaggcacgtctgctgggtgccaggcacagtggtgccccatggggtggccccactcccggcctggctcgtgcctcctgtggggaagcagagcaactggctcggtgcgggatgtggtcagacctggaggccgagtgctatgggtgccgcgctccttcccaggccctcacccctccttctccacccaggagtcgttcacgcctactgaggagcatgtgttggtggtgcgcctgctgctgaagcacctgcacgcctttgccaacagcctgaagccagagcaggcctcaccctccgcccactcccacgccaccagccccctggaggagttcaaacggtgggtggcccttgcggcttcccaccactgccgtctccccca

SEQ ID NO: 275304 - DNA, 396 bp, Homo sapiens
ggtctagcaggatctcccactctcatcatagcgacaggggcaaatcctctctctaaaaagtacaataaacactaaagtaagacaacagagcctggaagttcgaggatgcagtaagctatgaacctattactgcactcccgtgtgggtgacagaacaagaccccacctcttagagaacaacaacaactaaaagaacgaacaaacgactttcttaagaccaacatcctttaattaccttgaagacaatgcactgtctggccctggccatctgctccagcttcttctcataccactctcaaggagacttgctctttctacaaagctactctggcatccaatgctttatatgtaatattccctttaactagaaccacctatttgttcatcctcccaaccc

SEQ ID NO: 275305 - DNA, 452 bp, Homo sapiens
tcagatcaggaaaatggaggaggagacaggaaaagaattctggaattctggttctatccctaggatctatttttggtgtgaccttggtccaccaacacttgcttcttacctcccaacataagaatttcaataacctcaaggaaaaaagaataacattagcaacaacataaaaatcacaaaagcaactggcctgcatttaaaatgatcaagaattccacttcaacagaaatttgtaagtacagaaataaatatataactagctcattttaaaataaaattggggctgggtgtggtgactcacacctgtaatcgtagcactttggtaggctgagatgggcgaatcacttgagatcaggagttcgaggccagcctagtcaacatggtaaaacctcgtctctactaaaaatacaaaaattagctgggcatagtggtggacgcctgcaatcccagct

SEQ ID NO: 275306 - DNA, 370 bp, Homo sapiens
ctggcaggggcatgggtgccaggtaccacgcggaaagccgggccgagcatgctgagagcctgggggacccgacgccgccgggatttacctctctctctccctctgtgtatatataaacgagtccctctctacttgtatttaaccgtgggtgcacgtgagtgtgactgtgcggtgtgcgtgtgttccgcttgtgtgtgtgcgtggggccgccctgtgagggcgcggcgactgtgcgcccaggaggcaaccgggggcgttgtgtgtgtcgtgacttcgtacctctcaagcccctccttgtacttcactgaaggatggcactttggtggggttggaaacaaagtcgacattaaaggtcatttctcctgttcgg

SEQ ID NO: 275307 - DNA, 462 bp, Homo sapiens
ttactattttttccctttacataatctattgtttggaagcaagacactaaattcagcccatactcaaggggtgaagctttaagttccatctctggaggggaaactgtctacatgtattatttggaattctttagtaaggaagatttatcttttacccatttatttatttacttaatcatatacttacatatgtatgtcagcatagatccaggtatatttattttattatttgggttaaaatactgtactgtttggttgttatgaatggttaattttagaagtcaacttgattaggctaagtatgcccaggtaactggtagaacattatttctaggtgtggctatgaagttttttctcctggaagagaaaaaggacatagtaggaagagatttgaatcagttgactgagtaaagaagatagccctcaccaatgtggtgggcatcatccaaactgttgcatgat

SEQ ID NO: 275308 - DNA, 1456 bp, Homo sapiens
  misc_feature (92)..(92): n is a, c, g, or t
  misc_feature (856)..(856): n is a, c, g, or t
  misc_feature (863)..(863): n is a, c, g, or t
  misc_feature (869)..(869): n is a, c, g, or t
  misc_feature (883)..(883): n is a, c, g, or t
  misc_feature (935)..(935): n is a, c, g, or t
  misc_feature (952)..(953): n is a, c, g, or t
  misc_feature (958)..(958): n is a, c, g, or t
  misc_feature (1032)..(1032): n is a, c, g, or t
gggagtccaacgatcacgtgtgtctccagcactgtttgagctggctttatgtgctggggcagaagagatccgatagctatgttctgctggancattctgtgaagaaggcagtacatttgggttaccgtacctcgcctccctgggaatacagtcccttgttcaacagagagcttttgctgggaagacggcaaacaagctgatggatgccctaaaggactccgacctcctgcactggaaacacagcctgtcagagctcatcgatatcagcatcgcacagaaaacggccatctggaggctgtatggccgcagcaccatggcactgcaacaggcccagatgttgctgagcatgaacagcctggaggcggtgaatgcgggcgtgcagcagaacaacacagagtcctttgctgtcgcactctgccacctcgcagagctacacgcggagcagggctgttttgctgcagcttctgaagtgttaaagcacttgaaggaacgatttccgcctaatagtcagcacgcccagttatggatgctatgtgatcaaaaaatacagtttgacagagcaatgaatgatggcaaatatcatttggctgattcacttgttacaggaatcacagctctcaatagcatagagggtgtttataggaaagcggttgtattacaagctcagaaccaaatgtcagaggcacattagcttttacaaaaattgttggttcattgtcagaaactgaagaacacagaaatggtgactcagtgtcctactgtccgtggcagaactgtactggcgatcttcctcccctaccatcgcgctgccatgctcctgcagggcgaattgggtacgggccccccctcgaggtcnacggtgnggcgcnctaaaactattggngccccctccagggaattaccggttacattatttgggcccctgaaaccattgntgaaacttggttttggnncaccncatccttggaatcccaaaacaggccttaattctcctccacatggccatcgagcccatcttggctgacggggctntcctggacaaaggtcgtgccatgttcttagtggccaagtgccaggttggcttcagcagcttcctacgatcagccgaaagaaaagcagaagctctggaggctgccatcgagaacttcaatgaagccaagaactattttgcaaaggttgactgcaaagagcgcatcagggacgtcgtttacttccaggccagactctaccataccctggggaagacccaggagaggaaccggtgtgcgatgctcttccggcagctgcatcaggagctgccctctcatggggtacccttgataaaccatctctagagaggacatccctgctgggctgctgtgcagagtataagattttggacttgttcatgtcccctctctccctataaatgatgtatttgtgacaccctatcttgtcaataaacagcattctgatt

SEQ ID NO: 275309 - DNA, 1417 bp, Homo sapiens
  misc_feature (92)..(92): n is a, c, g, or t
  misc_feature (817)..(817): n is a, c, g, or t
  misc_feature (824)..(824): n is a, c, g, or t
  misc_feature (830)..(830): n is a, c, g, or t
  misc_feature (844)..(844): n is a, c, g, or t
  misc_feature (896)..(896): n is a, c, g, or t
  misc_feature (913)..(914): n is a, c, g, or t
  misc_feature (919)..(919): n is a, c, g, or t
  misc_feature (993)..(993): n is a, c, g, or t
gggagtccaacgatcacgtgtgtctccagcactgtttgagctggctttatgtgctggggcagaagagatccgatagctatgttctgctggancattctgtgaagaaggcagtacatttgggttaccgagagcttttgctgggaagacggcaaacaagctgatggatgccctaaaggactccgacctcctgcactggaaacacagcctgtcagagctcatcgatatcagcatcgcacagaaaacggccatctggaggctgtatggccgcagcaccatggcactgcaacaggcccagatgttgctgagcatgaacagcctggaggcggtgaatgcgggcgtgcagcagaacaacacagagtcctttgctgtcgcactctgccacctcgcagagctacacgcggagcagggctgttttgctgcagcttctgaagtgttaaagcacttgaaggaacgatttccgcctaatagtcagcacgcccagttatggatgctatgtgatcaaaaaatacagtttgacagagcaatgaatgatggcaaatatcatttggctgattcacttgttacaggaatcacagctctcaatagcatagagggtgtttataggaaagcggttgtattacaagctcagaaccaaatgtcagaggcacattagcttttacaaaaattgttggttcattgtcagaaactgaagaacacagaaatggtgactcagtgtcctactgtccgtggcagaactgtactggcgatcttcctcccctaccatcgcgctgccatgctcctgcagggcgaattgggtacgggccccccctcgaggtcnacggtgnggcgcnctaaaactattggngccccctccagggaattaccggttacattatttgggcccctgaaaccattgntgaaacttggttttggnncaccncatccttggaatcccaaaacaggccttaattctcctccacatggccatcgagcccatcttggctgacggggctntcctggacaaaggtcgtgccatgttcttagtggccaagtgccaggttggcttcagcagcttcctacgatcagccgaaagaaaagcagaagctctggaggctgccatcgagaacttcaatgaagccaagaactattttgcaaaggttgactgcaaagagcgcatcagggacgtcgtttacttccaggccagactctaccataccctggggaagacccaggagaggaaccggtgtgcgatgctcttccggcagctgcatcaggagctgccctctcatggggtacccttgataaaccatctctagagaggacatccctgctgggctgctgtgcagagtataagattttggacttgttcatgtcccctctctccctataaatgatgtatttgtgacaccctatcttgtcaataaacagcattctgatt

SEQ ID NO: 275310 - DNA, 1488 bp, Homo sapiens
  misc_feature (888)..(888): n is a, c, g, or t
  misc_feature (895)..(895): n is a, c, g, or t
  misc_feature (901)..(901): n is a, c, g, or t
  misc_feature (915)..(915): n is a, c, g, or t
  misc_feature (967)..(967): n is a, c, g, or t
  misc_feature (984)..(985): n is a, c, g, or t
  misc_feature (990)..(990): n is a, c, g, or t
  misc_feature (1064)..(1064): n is a, c, g, or t
ctgtgccaggatggcactcgggtctgaattcacccgtgaaaactaattaacatactatgactgcagggaacatggggtgggggcggggggatctgggcagcgtgtactcccagctgtgccctaaccactacgtgtctcctcgcgctgcacatccaggatgcttttctgcctttcttatcctgagggccaggttgctggcactgggaggcatctgctcccaagaaagccagagcctgtgaggtgtatgactttacgcctccactcaagatagctgacgggcatggccaaagcgcagccaggtctgctgctgaaaggaaatcctgttccctctccccacccagcaccatggcactgcaacaggcccagatgttgctgagcatgaacagcctggaggcggtgaatgcgggcgtgcagcagaacaacacagagtcctttgctgtcgcactctgccacctcgcagagctacacgcggagcagggctgttttgctgcagcttctgaagtgttaaagcacttgaaggaacgatttccgcctaatagtcagcacgcccagttatggatgctatgtgatcaaaaaatacagtttgacagagcaatgaatgatggcaaatatcatttggctgattcacttgttacaggaatcacagctctcaatagcatagagggtgtttataggaaagcggttgtattacaagctcagaaccaaatgtcagaggcacattagcttttacaaaaattgttggttcattgtcagaaactgaagaacacagaaatggtgactcagtgtcctactgtccgtggcagaactgtactggcgatcttcctcccctaccatcgcgctgccatgctcctgcagggcgaattgggtacgggccccccctcgaggtcnacggtgnggcgcnctaaaactattggngccccctccagggaattaccggttacattatttgggcccctgaaaccattgntgaaacttggttttggnncaccncatccttggaatcccaaaacaggccttaattctcctccacatggccatcgagcccatcttggctgacggggctntcctggacaaaggtcgtgccatgttcttagtggccaagtgccaggttggcttcagcagcttcctacgatcagccgaaagaaaagcagaagctctggaggctgccatcgagaacttcaatgaagccaagaactattttgcaaaggttgactgcaaagagcgcatcagggacgtcgtttacttccaggccagactctaccataccctggggaagacccaggagaggaaccggtgtgcgatgctcttccggcagctgcatcaggagctgccctctcatggggtacccttgataaaccatctctagagaggacatccctgctgggctgctgtgcagagtataagattttggacttgttcatgtcccctctctccctataaatgatgtatttgtgacaccctatcttgtcaataaacagcattctgatt

SEQ ID NO: 275311 - DNA, 296 bp, Homo sapiens
ttggcctcagacccaccctccagttcagtttgcctttcacagtcttcttcccacagtgccatccctgcagactctgtgccgcctagtgatacaaaggagcatggtgcaccggctggccattgatgggctccacctgcccaaagaacttaaggatttctgcaagtatgagtgaagacccacagtgcaccagagcacagctgcatcctggagccccagacctgtggctggctggtccgaagttggccacattgctgccagccaagaccagaaataaacagccgatgctgacatcttga

SEQ ID NO: 275312 - DNA, 509 bp, Homo sapiens
gcagccggccagggctctacagccatctcttggaccagctctatgagctgaacgtgctgcctccgaccgcgcgccgtagccgcctgggtgtcctcttttgcccgcgccccgatggcacggccgacatgcacatcatcatcaacggcgaggacatgggcccgagcgcccggggactgccagctgcgcagcccctctacgcggtggtggacgtgtttgcttccacaaagagcgtgcgccttgtccagctcgagtatggcttgccatccctgcagactctgtgccgcctagtgatacaaaggagcatggtgcaccggctggccattgatgggctccacctgcccaaagaacttaaggatttctgcaagtatgagtgaagacccacagtgcaccagagcacagctgcatcctggagccccagacctgtggctggctggtccgaagttggccacattgctgccagccaagaccagaaataaacagccgatgctgacatcttgaaaactggaagg

SEQ ID NO: 275313 - DNA, 560 bp, Homo sapiens
tgtaggtttcggtgagctgagaatatgccactgcactccagcctgggtgagtctttagagtatactatatagatatttaaagcagcgtttcaagaagtttttatgattagagaaatttatgtgttataataaagtaagaaaaaaaacagcaaacaaaattgtacacatgggattgttgttaaagcattaaaagaatgaaggccaacaacagctgtcatttacgtgactggtgggattactgaagctttcccactcttttttccttttaaaaaatatttgaggccggggccgggcgccgtggcttacgcctgtaatcccagcactctgggaggccaaggtgagcggatcacctgaggtcgggagtttgagaccagcctgaccaacatggagaaacccccgtctctactcaaaatacaaaattagctgggcatggtggtgcatgcctgtaatcccagctactgtggagactgaggcaggagaatcgcttgaaccctggaggtggaggttgcagtgagctgagatgatgccattgcactccagcctggacaataagagcgaaa

SEQ ID NO: 275314 - DNA, 861 bp, Homo sapiens
tttttttttactttttaaaaatagggctactggaaatcttaaaattacatatggagctagttattacgtttctattgaacagggctaggctctgacgcaggaagacctccatgcagggactttgtcacaggcctcagcctcagcctgctggactaacccgcgacatcagtattggctggaaaccaggcatgggacatatctattttctctccaacctccatgtcagcacacactggggactgctgcttgctaattcacaaggttaccctgatcaaactggaaccaggggtggcgttttgataagaccggcttcaggtaggaacccagagtttctaagggctggcaccatgaaccagaagcgaatctaaagcatgaggtatacgaataacccaaggatgtcactggcatttagatcagcgtttctcagtctctttttcattatcaacatgcccctgagcattctgagaaattaatagcccaactccacccaccatgagattttaatgctgtggccccttagagaccacaaaccattataacgtctaagattttgtcaccacccaagaatgaattttcatcccaatgggggttatattatttcctgtgttgagaacacaggatttagctctaccctcttccccaagtcctttgaaaactagccagggggctcactattcccagaggtttcactgatgtaaacatctctggggtcatcaggatggcatctgcacagtgagcagctctagttctccaagttttcctctagggcaacttgtgagttcatttcagggaaataaatattcttgaattcggcagaatggattaagtgtggcggaggcaccattctaatagccctgaacg

SEQ ID NO: 275315 - DNA, 325 bp, Homo sapiens
gagccaagagcacttcatgcactccagcctgggtgacagagcgagactctgtctcaaagaaacaaaacaaaataaagtttatatagagaagcaaaacattcagaatagccaacacaatattgaagtcaaaagttggacgactgatgctactcgacctcgagacttaatattagagctacagtaatcaagacagtatggtattggtcaacaaacagagaaatagaccaatgaaacagaacagagagtccagagatagacacacataaatatagtcaactggtctttgacaaagaagcaaaggcaatacaatggggtagacagtatt

SEQ ID NO: 275316 - DNA, 255 bp, Homo sapiens
ctgttttaagaaatctctgtaaaaaatgtcaagtgtgacaagaattcttcaagaaacaagctcctctagtttgtcttctatatttagagcttcaacagttacctatattactggtaactcccaaatataccttcaaacttgttttttgggcccaagttttttgcttcatatatatctgttttgaatatcccataaataattgcatctaaagcatacctccactccattgttctcaaagataaaaccaaacctgtg

SEQ ID NO: 275317 - DNA, 390 bp, Homo sapiens
ttgtactcaatcttcagatgagaagtaacagttctcattcatggacacttttgtataattgggtgtatctgtttacactatcctctgaatggaggtcttgatggaaataagggagagagaataaaaagagaatcatcttgtctcagaagagggatctcaggaaaagcttcagtgcagcttgacagcagcttgagagaactgaatttctgcgaataggtttatagagggaagccaggcactagaagagatacacaaaagggccctgtaaataaaataaaacgaaaaaaccccaaactagaaccagtgtgggttacaactgaggaaacacattaaagcacagttctaaacaagataagcaatagcaccttggggcatactatggaaatgtta

SEQ ID NO: 275318 - DNA, 361 bp, Homo sapiens
atacccttggtggcaatgaacaatgcatgctcctctgagaaaactggacctaaaggagaatggaaggtgataccagaattgggaatgtccaaggcccaaggcattccctggtctggagaccactttgagtccatggttgggaagattctccaagggaacataaatgcttttactatctagtttgtctctttgagaattaaaactcttttttttttttttcattccagtagcttttggggtagagtttggctctttgagaattgcatactaattaattttaggggtgatttgtacatcatctctatattcctgaaacacagtagaaacagccagcagtcaggcaaccatctaccatgaccat

SEQ ID NO: 275319 - DNA, 534 bp, Homo sapiens
ggcagacttggagcctgtgtttcctgtagccaaaggcttttgcaaagatttgtggctatgaaagataaaccttcccaaactttaaaattatgcagtgttttcaaaaagatagccattgcacttttgtgggaattttaatttaatagagaaatgaaaggaaagcagtcatatcttttcatcattgcctaacccctttaaaagtatatattaaaattcatactatttcgatatttatgcctatggccttctaaactttttatttaatccactcccctccccaacccccaggagaaaccacagtgcagacagcaattacgagccttctggtttctttcacaaaatgggctttttaaaaactgcctttaaaacactctccatgtaaggagtcctggtccacgtcatttctgccttctccatagggtacatactcactaggacattagggattgaagacaatagaagtctactgttcctggatgtgttgtttctagtttcagctctaaaaagccaaattgtttctaattccatattaaa

SEQ ID NO: 275320 - DNA, 372 bp, Homo sapiens
gctgtttattatgcaaagacgagtattcgtttccttcacttcaaggaacgtccatgagttgtggaaagggtaaaacaaattatttttatagttctgcaaaacttcaaagccatagaaacataagagaataaaactttctacttttgaaacctgtgtctaaagtcaagcttatgactttgggtgtcaacttaagggaaatgatgtagaagacctgagaaaagacccatgttttcatgatctgtggaactaactcagtaaggtcctggaagacaaacgtgtttgaaaaaataattcttggtcactatttggttctgattggttgcctggctgacaaaataaattttaggtgtaacttgatagtattatatgtgt

SEQ ID NO: 275321 - DNA, 455 bp, Homo sapiens
tggaattactagattttaaacctcattacactgaacaagatcccaaacgtgcccaagccaggggtttgagaaaagagattccaattcccctagaaaactgacacctataagataacgcctacaggatgatgaaaccccaaggccttggtttatccaatctcaaaacatctacataaaggaatgcactatgggagtgatgtcctcgccaacctagtacaaccacacctcagtagaccacactttcaaaacatcactcggaaaattacacagggatgcatcttgtgcactacaaacaaacaatcccaagatggaatgtagtcctcctaaaaaggagatatagtacaaagagctgagtcccttcaaagactgaaaggcgggcttcactcagatgcctacctggttatgtgcgccaaggaaagatctgaagttattaataaaagaaaaagaaggagata

SEQ ID NO: 275322 - DNA, 464 bp, Homo sapiens
tcatccacaattccattgcccgtgttctcaccgtaattaaccagactcacacaaagaaaacctcaggaaattctacaagggcaagaggtacaagcccctggacctgcggcctgagaaaacatgcgcctgcgccactggcccagcaagcacgaggagaacctgaagaccaagcagcagccgcggaaggagcggccgtacccgctgcagaagtacacagtgaacgcctgaacgtcacattgtcaataaaagagagctggccgaagagaacaaaagaaaagtgtgtatttaatatgcaattctgtattcattcaacaaatatttattgaaggcaaacaatgcagaactcataaccctctgatgatggactcatcatgtggttctcatgcaggagcaaaacacacagcatatgccttccatgtgcagcataaatcccattgcagtgagccatgttacagggcagtttc

SEQ ID NO: 275323 - DNA, 533 bp, Homo sapiens
tacaaatagcctttttgactgagaaggaaaagagaaattcaacaacatcaaagaatgggagtgactaaagtgtgtttttcagctggtacataggagccagtagagagaaaaggttgaagatggagggaagagaagaaccagttgttaggacaaggtgccagggatgttgggaagaaaacagatccagggacatatgatggagggtggacttaactaccctaagatttgagggcaacaaatatttgcttggggcatgggagtgattaggatggtggcttaaggagagtgacaaaaattttagaatagctgctaaagggagaatgaaagcaaatgaaagagttgtctgccagatggtgttaagagcccatctgaaagtgaaaaccatgaattgttcatcacatcattcaatctgcatgggtagatgctgcctttcatttgaaagcagcatatttctttccttaaaaaaaaaaaaaattggctgggtgcggtggctcatgcctgtaatcccagcactttgggaggccgaggtgggc

SEQ ID NO: 275324 - DNA, 289 bp, Homo sapiens
gttatctacaccaatattcccctccactggtgtaaataatcaggaagcaactggatttctgacaagagaagtctttttttgttgttgttgcactggtagttttcacattacctgtgctctacagcaaactatacataagtattttcctgtactcttagaaaagctaatttaagattgcattagctacatttaacctgctattgtggatggcatctctttaagaaatgtttctgcctcctcaatgcaccttgaaattgagaaagtaatgatgcaacaaatgtgcctgggg

SEQ ID NO: 275325 - DNA, 457 bp, Homo sapiens
cagtttttaaagtttgaaatatatgcccctgctactgaatcttgtcttgttatgtatagtcgttttattatttatctggttggagcacagtcaattgaaattctgttgccagcggagtagaaaaagtctgtatctgattcattacaaaactcccttcaataaaatggctttcaaaaattcctcacttgttatcgtcatcgttatgaaaaactaaggaacatcttagaagaacatttatcctttctggctttgggggaggttgctgtaatggaaacctgaagaaactcataaagtttgccttaaatcaagttattcccaccaagagaacaacgtacaagactactctggggaaaactgtagttcctcccagactctcagttaaaacaaactgttcttgagcctcaaggcaagagagaactggaaaagccatgggacttcgtagacggccgacaaaaaa

SEQ ID NO: 275326 - DNA, 778 bp, Homo sapiens
  misc_feature (10)..(10): n is a, c, g, or t
cacacacacntctccagcgtatgtacacacacacctctccagcatatgtacacgcgcacacacctctccagcatatgtgcacacacacataggcacacacatctccagcatatgtgcacacacacctctccagcatatgtgcacacacacacataggcacacacatctccagcatatgtgcacacacacacctccagcatacatgcacacacatgcacacacacatctccagcatatgtgcgcacacacatacacgcacacacacatctccagcatgtgtgtacacacacacacacctctccagcatatgtgagcacacacacacctctccagcatgtgtgcacacacatgcacgcctctccagcatatgtgcacacacacacatgcacctctccagcatatgtgcacatacacatagccagcacatgtgcacacagctctcatgtatgtgcacgtgtatctctagcatacatgcacacatgtatctggtgtatatgtgcaacacatgtatctggggcatgtgcacacgcatctcttatgtgcacatacacacacatgtatctaggtatgtgcccacgtttttctagcacacatgcacacacatctctctagcatatgtacacacacatgtatttgtagtgtgtgtgcacatctgtgtctctagtatgtgtgcatacacgtacacatgtaggctttgagttaagcaggggaggaatattttgatcaactttaaaatcagcaaaattagatatgcatgtatgaaaataatgaaagtttt

SEQ ID NO: 275327 - DNA, 496 bp, Homo sapiens
agatgggctgaaacccaaggaattaactgcaaggaagaggtaacggtgctctaggacaagtagtgatatcattgttgtgctaggtgtctacacttgagccagtagtaagatgaggaacctggactaaaatttccacattaagcctgtgtaaggggaataaaataaagtaattccaggtttgtatcacaccctgacttcccacagaaggaaatgtaaattctctctggaaaaaatcatgtccaatagagtcccataggtttcccacagattagaaccaagcaaatgtgaggaataaaataaatgtgttgtaataaaatatcaacaaattaacaaggaaatgaaccaccatgactgacagtcagcagaaaagacaaagccaagtaagattggcttactctttactcaggacctttgttactaaaactatccagacatagatataaaataaccatttataaaagctttaaagaaataaaaaaaagtcacaaaaatgagg

SEQ ID NO: 275328 - DNA, 373 bp, Homo sapiens
tttttctttttttgtattgctccttgcagagcagggctaccctacaggtagtgtgcccagagcagtctcccccaattcttaacaagtaacccaaatatagtaaaaaccagcaaaaaactgtggtagtggtgaacaagtgaaggggtgtagtctaaaatcatacactttaaaaagtggcagctaaaagagaaaaaaaagattacagagcagtaaaatgttatccctaaatgttgttttaaatactcaccaccaaaagaagtaatctgaaaaggctacataatgtattattcaaactatatgaaaatctggaaaaggcaaaactaaaactgtggagagagttcaattaggataagtagtaagttcaggagatcta

SEQ ID NO: 275329 - DNA, 729 bp, Homo sapiens
ccctcacgatttctcttcaaaatatctaacaaaccatattcaacagcccattaaaagaagcattcatccatgatcaatgttagatttatcccactgaatacaagggtggtccatcataaacgaatctattaatttgataaaccatactagcaaagtgaacggcaaaaaccatattatcatcacaacagatgcaaaaaagcatctgacaggccgggcgcgggggctccagcctgttatttatcaaagtgtgtgactgcttctaacctgtcaaatatgcatcttatactacatattaagtcccaccaaacaagtcatttaagtcaacattattttagcattgagttaatcggggaggaaaaatccaataaatatacatgtaactctaaagatgcccaaataattgtaatttgccctcccttttaaaattaatttacttttgttttttgagtcagagtctcactctgtcatccaggctggagcgcagtgatgcaatattggcttactataaccactgcctcccaggttcaaacaattctcctgcctcagcctcccgagtagctgggattacagtcatgagccactgcacctggcttagggtaggtgtttttttgttttttgttttttgttttttgctttccaatggcgaaattctctatctttagaataagggagtccatgaatgctcacagtggaagcattcccagaacagagtggaagtagggagataat

SEQ ID NO: 275330 - DNA, 349 bp, Homo sapiens
gtgaatgtaagtgttctaagcgtgtttaaagtaggctaggctaagctatgatgttcagtaagttggatgtattaaatgcattttgacttaaaatattttcaatttatggtgagtttgttgggatataccccaccgtaagtcaaggacaatctgtatactattctatcctttggtcatctttctatttgaaacaaaaatttgctcttctttttcgttttaaaagggttgtatgggctgggcgcggtggctcacgcctgtaatcccagcactttgggaggccaaggtgggtggatcacctgaggtcaggagttcaagaccagcctggccaacatggtgaaaccccatctct

SEQ ID NO: 275331 - DNA, 344 bp, Homo sapiens
gactgggaaatgccgacttcacaatcaatgtcaatgtatttcatgtcgtctcgatacctcttagtcattttgcttcagaagtgcgtgaacagggtcaatatatttcattagtttgtttcatctgaaggagagtacaacacgagaactttgattatattataagaattgctttaatgtgacaccgattccctgattgtgctataccagacattcaagggctggagggcaacaaaaccatctttcccctaaacattcatccagccaccaccagcaaaatgtgccgcaaatgaaagaagaaaataagatccaactcaatttacatagtggagatgagattatgctgt

SEQ ID NO: 275332 - DNA, 283 bp, Homo sapiens
agggtagggggtcttaattttagtgagcaaggggcacgaatgctcagacctgggccaccatggagttgtcggggtgtgggtaggagactggcgtcacccataaatgcagagtagacccacttcctccaggatatttgactgtgatcttgggccattgtgtctgttccccaggccctgagggttctcctgggataagatgggtatgaacttgctgcgctgatggtgaaggcgggtggctgaggaacaggaagagtgcgtccagtactgcttaagaattcggtga

SEQ ID NO: 275333 - DNA, 133 bp, Homo sapiens
agtccttgacttaaaagctaaagatcagaaactattgtcatcttccattcttactcctcaggttgactcataaacctagaatccccccctgccaaatatatgcacccacaatattgccgagaaagcaaagttc

SEQ ID NO: 275334 - DNA, 526 bp, Homo sapiens
ctacatcaaattgaagatattttcatgctggggcttgagcctggcaggcccaggaaatgtgacccagtggaatgattttcatttattcaagtaatcatatacagtagctgcttttatgaacatggcgttcacttggctcgagtgcgttcttcaccagagctgaggggccaacattcccaagccatgagaactcaaagctcagggctctgatgaagatgaattaaggggctgggtcttgagcatcactctgggcatcgggaaaatcccatcagcctgaagcattcagaaaaaatgcactatctctccttcatgccacaggcctcctggccttccaaaccccacagatgtgggtgctgagggcggaggagagagagcagcaaggggaaggttagggcttctaacacaagcttcctctactagttgtcttttttcactttagttttgtacaggattctggggaaggccagggatatgagacaggctagagaaaagggcagaatggaaagaaaaaaaagtagtaaacttg

SEQ ID NO: 275335 - DNA, 414 bp, Homo sapiens
ggagtcatgattagagaactcctgaaaatgcatggagcaaactcccaaaatacagaatacatgacaatatcttctcctctctccttccaccctcactctcagctgctgactttgctttctatttcatgaagaaatgaaagcaaccagaaaagaatttccagtgttgccattaccacaactcccagcctacttgtatctgtacctatattgtctgccttccttcctgttagtatagaggggtctctgtcccagtccaaggccaaggcctctattactgcactagatcttatctgtgatcacctacttggggacgtctttccagcaaatgctcccactctcccctgcacatcagttggtaccttctaatgaatcattcacattagcatacaagcatgctgtattttcgccctttaa

SEQ ID NO: 275336 - DNA, 471 bp, Homo sapiens
tcagcatacgaaataatctaattctggaatccagctgttttagtttgctagggctgccataacaaaataccacatagttaattgcttaaacagtagaaatttcttttctcacagttctggaggctagaagtccaagattaaggtgtgtgtaggtttagtttctcttgaggcctctcgccttggcttgcagtgtccttttgctgtcctcacatggcctttcttctgtgtgtccttgcatccctggtgtttcctcttattgggacaccaggttggattagggcccacccctattatctcatttaaccttaattacctctttaaagtccttatcgccaaatatagtcacactctaaggacttcattcttcattctaggttagggcttcaacatgaattttgggggtacataatttagcacatcacactagccttgcaaataaaattcaaataatttactgacccattttgagtt

SEQ ID NO: 275337 - DNA, 794 bp, Homo sapiens
gagcttgcagtgagccaagattgtgccactgcacgccagcctgggcaacagagcgagactctgtctcaaaaaaaaaagggaatgaagtcttgaatgcatgggcactttgaaagcattatgctaagtgaagaagctcatctcaacaggccacacattgtatgagtccatttatatgaaatattcaaaataggcaaatctatagacacagaaagtagattaatggtcacctaaggcttgaggtggacgatgattgctaatggaggtttctttttggtgtgataaaaatattcttaaattatgatggcacaacactgaatatattaaaaaccattgacttctacatgaattatggtatgcaaattacatctcataaagctttaaaaagaaaatcctcctttaggtgctttctagttcaagttagggctggctcagcaggtaagggagggccaagaaagtcaagcagaagctggaaaataatttaaagcagcactgcccaaaatgtatcctgtggaccaactcttttcctcagggtacctgactctagtcccagacaagataaggagctgagatagaatgtcagccaacttaaggccggatgcggtggcttatgcgggtaatcccagcactttgggaggccaaggcgggtggatcacttgaggccaggagttcgagaccagcctggccaacacggtgaaaccctgtctctactgaaaatacaaaaattagctgggtgtggtggcgcatgcctgtaatcccagttacttgggaggctgagacaggagaatcacttgaac

SEQ ID NO: 275338 - DNA, 288 bp, Homo sapiens
tcacccccaccctactcccgtagccccatgacctctgcccacagcagccacggtcatctctgtgctgtcccccagcccctctgccacgtccagtgggcagctgtggtcgctcccctcctgtattcaatccccgactgatggcctggggtctgcggggccccgccaagcccaggactctcctcatccacctcggctcggcccgcgcccgggagaagctacatgcagaatttggagcccagggccaggccagattcgctcacagagggcagcatctgtccagccctggtc

SEQ ID NO: 275339 - DNA, 185 bp, Homo sapiens
cctcacccctctatgtgtctcaagcctaatctttcctggtcgtgtgacaagaacctggtttaaactaaactgaggggaaagttctgcaacagtagaggggaaaagggatgtcctggaaaaagtgaggctctggtgacaagaacagatgtgagtgtcctagtgagaggttcttggggacagaacaa

SEQ ID NO: 275340 - DNA, 331 bp, Homo sapiens
tcctgtatagacagggtttcaccatgttgcccaggctggtcttgaactcagcccagactgggctcaagggatcctcctgcctcagcctcccaagtgctgggattgtaggtgtgagccagcagcacccggccataccttctcttctgtaaagtgggtctcttgtcccaaggtgttgttacgcaggatcccacgtcagtgaattaaacgctgtgaaagccatcagctagaggttctgcagagaccctgtgggcaagggcaaactatacctggaacagtgtcagttcggggcaacatgatctgctgagccttacagggtagaaggggcccagtg

SEQ ID NO: 275341 - DNA, 360 bp, Homo sapiens
tggtagaggcaggccttactgttgccaggcttgtcttcaactcctggcctcaagggatccccctgcctcagcctcccaaagcactgagattataggcatgagccactgcacccagcccactatttattatctttatacacaaagtatgaacctcatagagttgtgcagattaaatgagaatacatatggagtactcaaaactgtctagcacaatgtaagtgctcaaattttgtcctcctctcttcccactccatccagatgttctcagtatctagggcttcctagccaaatcagtaatggtctttttgtcctttactataccattacaacagctttggctttgtaaggtctacatgtatc

SEQ ID NO: 275342 - DNA, 433 bp, Homo sapiens
aagtgtgggcagatgctaagtgattatgacagtaaataatttcctttgttcttgtaggctttaacatctctcctacaagatagtaccttcataaattgtcttgtggaaacattatctaaaaatttcatttaggacaaaggagaatagaagcttctgtcattaaacatgaaacagccttgctttctttactcctaaaaatgtaggcagtatttctagaaatatttaatgatagcgaaccacttcctggccatcaatttgattcccttccattttcctagacttctgaagaggtctcactttacactattttgcattacagaacagtctttatacttcctttttttttttttgacacaggatgtcactctgtcgccaatgctggagtgcagtggcgctatctcagctcattgcaacctccgcctcccaggttcaa

SEQ ID NO: 275343 - DNA, 299 bp, Homo sapiens
gtcagtgaggaatatgactgagatcacttgttacaaggaacttttataacccattcacctgcatttcacatgtttatgaggactggcttcacttatgatctgcagttgacagtcataaagtcctttgttataatggcaaattctgataacaagtttgcttcacattggctccaaattccactggaaactgtcataaatggctggtttataaagtgaaccttcctgtcccttgtttactgatttcacatttatgaagagaaaggaatcctttcctaaaaaattattttcttttaaccaca

SEQ ID NO: 275344 - DNA, 418 bp, Homo sapiens
aagtgggaacactaaactggtattcaggtgacctgaattctgccactctgtaattatgaacaaatttaatctctccagtgttgtttatcttcaaattaaagggtctagatttgatgatctctagaggcaaaataatttcataatttcaagatcacaagccaacaggccaggcacggtggttcaagcctgtaatcccaacacttcgggaggctgaggaaggtggatcacccgagctcagaagttcgagaccagtctgggcaacatggcaaaaccctgtctctaccaaaaacacaaaaacttagcctttggggaaaagaaagagagatcagactgttactgtgtcgatgtagaaagaagcagacataagagactccattttgttcagtactaagaaaaattattctgccttgagatgctg

SEQ ID NO: 275345 - DNA, 349 bp, Homo sapiens
aagtgggaacactaaactggtattcaggtgacctgaattctgccactctgtaattatgaacaaatttaatctctccagtgttgtttatcttcaaattaaagggtctagatttgatgatctctagaggcaaaataatttcataatttcaagatcacaagccaacaggccaggcacggtggttcaagcctgtaatcccaacacttcgggaggctgaggaaggtggatcacccgagctcagaagttcgagaccagtctgggcaacatggcaaaaccctgtctctaccaaaaacacaaaaacttagccgggcatggtggtacacaactgtgggtcccagctactcagggggct

SEQ ID NO: 275346 - DNA, 461 bp, Homo sapiens
aaaaaaatcatgctagtgccaagagctactaaattcttaaaaccggcccattggacctgtacagataaaaaatagattcagtgcataatcaaaatatgataattttaaaatcttaagtagaaaaataaatcttgatgttttaaattcttacgaggattcaatagttaatattgatgatctcccggctgggtgcagtggctcacgcctgtaatcccagcagttctggaggctgaggtgggcgaatcacttcaggccaggagttcaagaccagtctgggcaacatggtgaaacctcgtttctactaaaaatacaaaaattagccgggcgtggttgcacacacttgtaatcccagctactcaggaggctaagaatcgcatgagcctaggaggcagaggttgcagagtgccaagggctcaccactgcattccagcctgcccaacagagtgagacactgtttctga

SEQ ID NO: 275347 - DNA, 322 bp, Homo sapiens
ttgaatttaggctccaatgttaggtttgaagtggaaaagtaggattggttttcagcaacttttttttttttttttttttttgagacggagtctcactctgtagcaatgttttctttcaggatgggtggacttcttgtttgggttacttatctttatcctctgaatatccaactattctcattgtcaggactccactcagaggtacccataaacagaaaggacccactggccacttctccaggacagcaaggtagtggacatgcacaaggaccttgcccctgttcagatccatgaaagaagtgctgtgcctcccttgacttga

SEQ ID NO: 275348 - DNA, 1324 bp, Homo sapiens
tctggtgagtgcagcatggcctctgctctctccccctgcctctttttgttttccttttctgagggttcctcagcctcatgaagtttaaagcctaatgcagatcctctccctccgctgcattgttctaggtgtcactgaatttctccaaagagaaaaataaaaactcagaatattcttgtgactgatttctgaatgtgacacgtggcgtaatgacttaaacgtattacagccagcagctcttggtataggacccatgatattttattatattttgtttagcattttgttgtactttattattttattgtctttgttttatttagaacactttatatccacccttttcacagagttttaaatgtacgttacggtactgttaactctgggtacgatgttgtgcagcagatgtctagaacttactcatcttgtggaagtgaaactgtacaatgtgtctgtgatccttcttaaagccttagctgggctgctgagtcctgcactctaactgcaggaagggcagctaaggaaagccaagtgcaacttgccagacagatgggattttcatgtctcatctatcaggcaagacattgtctcagtgtactcagcagactcctagactcgggttctgggctgatgctgtcagacatcataaaaggagagacactcctctcagccatgctcctaatacccctgataagcatgctcctaattcatctactgcccttagcaaagctgccgtttgtgtctccgatttggtgtctttatagacatcgccatcccctgttagtgaatttggggtcttgagacgtcatctgatgaggacctgctgtttcacagaggaaatataactgtctgtgtgctttttattattgtcatgtttgctgctgacatttcacagctttcatttattgaattttgaagacattgattttttcttcatagcagaaattatggatcagataattggccaaataagaaaaattcagacagcattgtttttctaaacatactgaaaataacgcatgtacctggtgaaaagtgaagacgtcatgacagagggtccagccctgctgtccaggccacccccaggatgggagccctgaatcctcatgggatgtgcgctgagatacaaggaggtccctgcacacacctgcctttccccgctgctggactcttgcaaatcatttcctgtgagtgtcagccagcccactgcatgttccgaaagctctgcagagtgcgccaatattccagagtttcaaagtagtgccctttgaaaagatttaaacctgcaaataaaattaaatttgcatttgagaatacaatgtgt

SEQ ID NO: 275349 - DNA, 444 bp, Homo sapiens
caggacggtatctccacaaaggttcagaggcgaaaggaaatgagaacgggagctatgacttggattcacagggaagctgaataaagggaaaggagagagtttaaacttatctgcaggcatcatgttaaatgtaatgttttcttgacaaatagccagcacactgcactatttttaaaaatcccctcattaaaagctaagaccaatttcttacatatggaagagtttctatgctacaggttattctaatgagaaaagaagaaaagtgacttacaatactatacaataccatcacatgaaatattcatgtaaaaattcttttagaacaagaagacacattcttataggtaagaaatgctatgcagatattaaaaattaattcctgagcacaagagtgagccagggtaatgcgagtgcagtttgtccagagtttaaaaaccaggacct

SEQ ID NO: 275350 - DNA, 352 bp, Homo sapiens
ttgcaagtactctgttgaataaaagtgatgaggctggccatccctatcttgtactcaatcttagtggaaaagctttagttgttccccactaactatgattagactgtgggtttttcataaatggtgtttattatgttgaggaactttccttctatacataaactattaagaggttttatcaagaaatgttgctaaactttgttaaatgcttttactgcatcaattgaggtgaccatgtcattttatctttcattttgttaatgtgatgtatcacattgattgatttacatattttaaaccagccttgcatgccagggataaatcccacttaaacacgatgtataatgttttt

SEQ ID NO: 275351 - DNA, 415 bp, Homo sapiens
gcttgatggtgtatggccacactctgacaatatcctggaaggttctctggatttcttgctgtaattctttctagtttattgtctgtgtataattagacagtgctttctaagtagcaaaacttggttgtagatactgatgcagcttagcaaaaaatgttctatgatggcagttagtccaacttttatcttcttcagggccatcaggcctctgtaataattagaatccataaaaactggctatattctagactaatataaaagttttatgttcttcagtgatgtctcaagcacatcataaagcatcagtgatctttccaacaatgttcctttgtgccggtgatttgggtgatcggaaaagtttgccagtggaagaaccacttgctgccctgataaggaaccaatattactatatttc

SEQ ID NO: 275352 - DNA, 458 bp, Homo sapiens
actcctggtaggaaacacatttacaaaaacttctgttatcgcttacatccagctatagaatctctcaaagggaatcatcgagaagaatttttttttagttaattaatctcaaaggtattcatttctacgagatgctttttatgctcattatgattttggctattttgccctttaattgttggtttccatttgtgagctgtgtcatgaggtaaagaggattagttagccaatgcaagaaggcttgttacagtgtttatgtcttggattcactctgcaattgttattccaaggaaaaactaattatgagtgtaacacatacatgttaatatacagcctcctttccagacacatgttcatggataatttcatttacatcagtttttcagcatttccgaggtgaggctgatttttttctaaatcactgtattaaaaagcaaacaagcaactcccctgctcca

SEQ ID NO: 275353 - DNA, 378 bp, Homo sapiens
ctggttaaggtgggtacctgcaggtcatgggcagacagcacccctaatgatgatcagagctcatgcggcaacttctaggccctcagtcacccctctgattcactaggccaactttcagccctctccctgcagtctgtgtccaccaggtgtctcctcaggctaggacggtggccctcctgaaaaaaacaggcttctttcacaacagcctcactcagttactatttgtgacgcactaagctgtgcacacagattaaagtccagaacagcacagagggaggaagacagctgtgctgcagcctacatggtcaggaggttccaggtacaagatgccaagctgtctgaaaacttagaaataaacatctttttgggtcctccaaa

SEQ ID NO: 275354 - DNA, 374 bp, Homo sapiens
gaaaagtcccaaccctctaatcctgctttggtcttttgctgccagcccccatcctgaagctaccagtcaatttgtttgcatacaagaagatatcactttggagattctaagtgtatacgaggaaatgaggtcaaagaccaaatatatatatttcactatatcacacttcaaacttttgtttactgtttcccttctcctactctattataaacctttgagggtggggactgtgagttatttatctttatattcccagtgtcaagagtgtttagctataatgggaatgaatctcaaagtttcttgaataaatgacaagaagaatcatagttgcatgaactaaattcattattctcagtccttgaggtaaatgaata

SEQ ID NO: 275355 - DNA, 392 bp, Homo sapiens
gaatttctcatcactgctatccttgaactgacttctcctttcagtccatagcagtaaatctctgcagcatcagcaggtgcagccattaacgactcaagtgtccctgcagccaatgcttgtctgttctatttattcccattcctgacatgtcactgaatcaggccataccatgaacagatattaaaaaatactgcctttctattaattttaaatgacctttcaatctacatgtaaatttaaattgtataaaagcacatcaaatttcaccatcagagaaagaaggggatcaagaagacaccacagaccaaagcacttgtatctcagaagccagcattaggggagaaaacaaaaataaaaatcttcacaaataaaggagagtaagaaataatttt

SEQ ID NO: 275356 - DNA, 301 bp, Homo sapiens
acgtgcacgcagccagctcacagcacccaaaggcacgggcaagttgcatcacggcagcccctcctgtctgaccaggagcaggtgcgttcctgaggtcctggccacttctgcaggagcgtccgagggagcccagctgatataccacagcccctgacctcccaggttagcctttccatccaacagcaccaggactggacaggccaccttggctgaggatcacgtgtgcctgggtctgggcggtgctgatgcccacaggccctgagtctgtgttgcgcacaggccttggaaagcagtgcacatc

SEQ ID NO: 275357 - DNA, 395 bp, Homo sapiens
tataatatagttttaactgaggaattacaatgaagatactaaaaggaagcttaaggtttctggtattaactaggttctgttaaatgattttacttgttttagaatatatagaaatatactgagttagaatgagtggcgtattttctaaataattcaaataaaatggggagagagaggaggagattggaaggaatgaaattttcctgttcaagctgtaaacactaaaacctttaattttgtaggaagacattatatactctggtcattcaacttgtgtatccttagtctatttagtagtcaaaaacttctaagtaaatatgtgtgatttaatttgtgctgctgagaaacagtgatcaaaaatggcaataaaagtcacataacgaaataagaatact

SEQ ID NO: 275358 - DNA, 507 bp, Homo sapiens
cttcctttctcacagctataaataaatacatgaataaactgcccactctgattcataggctgtcagaactataaggaatcttcagaacacactggtttgatttcttccttttaaatatgagcaaatggaggcctagagaaggttgaggttcctgttcatggggcactgggtggatgggaaccctcgtctgattctgggggacatgggagatagaaatcatcctcccatcacgaggttagcagttcaagaccagcctggccaacatagtgaaaccctgtctctactaaaaacacaaaaaattagccggatgtggtggtgggcacctgtaatcccgcctactctggaggctgaggcaggagaatcgcttgaacctgggaagtggaggttgcagtgagccaagatcgtgccactgcactctagcctgggagacggtgtgagactccgtctcaaacaataacaacaacaacaaaaaaagaaagaaagaaagaaagaaagaaagaaagaaag

SEQ ID NO: 275359 - DNA, 151 bp, Homo sapiens
atgcaaagtaaatgttgaagttgagtttgcagagcctgagccagagagaaagttaatcatcccacgggggacatatagagcaaaggagattgcagccccagaactggagcccctccatttgcgatatggccaagagcaatgggaagaaggt

SEQ ID NO: 275360 - DNA, 547 bp, Homo sapiens
agcaccgtctgagattcgccggaacctgggaggcggaggttgtggtgacccgagatcgcaccactgtactccagcctggcaacagaacgagagtccatctaaaaaaaacaaacaacaataacaacaaaaaacaaagaaacctatagtaaaaggcagaatgaaattagagtcataagagttgattttttaaaagagaagaagaaaggttaacaggaaagcaaggaaagaaaatgtggtgcctaactgaggttaccagggaagcatttattagacttgcagggtgaataagataaccgctatggacacccttctaggcagagcagtggcatgaataaaggtatgaagaaagcatgtgtgaggtacatagagcagttcagttggctataaagaagagtagaggtgaccatataatggagtctgagagaaggagtgtgtttataaatcatctcggtatcttcagtatctaataccatggctggcacatggtaactgcacaatagatgttagcataaaagactgtcagatgtgctgtggctgctaagtagtg

SEQ ID NO: 275361 - DNA, 334 bp, Homo sapiens
gggtgctctgagtccaagatctgattaggatacagaactgtttgattgtaattaatgttgtggcatatttgaaataattataaggatggaaagttcctagtgcttaaagaagagtgagggagataacaaaacattaaacttaagctctctctcaattttaggaaataactgatggacaagtagatattgaatgaattatgtatgatggctcttccagcactcaaatcctttgtttatttctttgttggtgattgaagatataaccatttcctcatataaagcggttttcacaaactttctataactgtattttggggcctcaaaaggaagaaaa

SEQ ID NO: 275362 - DNA, 454 bp, Homo sapiens
tcctgctgcacaggacctgaaggcattgatgccagtggctcccagagacctctggggcatgggaggaagaggtgatggagtgcccctgacaggagcacccaggctgctggcagctaggagagccacatcctggcatctctccaccttccttctctccaccaccactgtgagctgtgagtcaggcccgtaggatactcctggatagctggcagtgtcacgccacttctcgggggaagccactgccccagttactattgaagacggggtggggaacagggaggatggggaggtagagatactgaacctcacccattggtttagtggctggctaaattagtacatgctacccctgcacaggctggttcagaggcatcaaacaggctatctgacctgcggagtggtcaggaggaggggagagagcttggcagtggcggtggtgtgtggggatagcctt

SEQ ID NO: 275363 - DNA, 331 bp, Homo sapiens
agtgctcattagccaatgcgactagtggctaccatattggacagcacagatacagaacattttcatcatcacagaaggttctgctgtacaataatgctcatgagaagcaaatgatgtgaaagtcatgagactagggctctagagccctggctgggttccaatcctcctcctcctctccaatttcgtgtgtgtgtgtgtgtgtttgtgtgtttgtgtgtgtgtgtgtttatcatacccacgcttaccatggaagtcacttaggaacagagaacctcaaggtcaaactactctttgccaaggcttgaaattcatggctgtttttaagaacact

SEQ ID NO: 275364 - DNA, 446 bp, Homo sapiens
gatcttatacctaatttttgtgattttttttttttgagacggaatcttgctatgtttgcccgtggtggtctcaaactcccagcctgaagtgatcttcctaccttggcctcccaaagtgctgggattacagacgtaagccaccacaccagtcctttatccttgattttctaaaagaacagagacaaatttgaatattactaatacctacatctaaagcagattcagtagtatgatacgttagtaaaaaatttaagtggccaggcgcggtggctcacgcctgtaatcccagcacttggggaagccgacgggcagatcacttaaagccaggagtttgagaccagcctggccaacatggcgaaaccctgtatctctattgaaaatacaaaaatcagccgggcgtggtggcagacgcctgtaatcccagctactcgggaggctaaggcagg

SEQ ID NO: 275365 - DNA, 259 bp, Homo sapiens
gtcattccgcatgcagtcctgacaggcagtcttccttggccgtttcactgggcagttaataatcaagttaattcccagaaacagcacaagtaaatcctaacccaaaccaccaaaaagagtttccccgctcattgaaaggatagtcatgtgacagactcatcacattcatattcattccctccctgttaaagtggtcttaatacggttttaattaatagtgcttcttttgaattgtatgtgttcagcttccccataactt

SEQ ID NO: 275366 - DNA, 751 bp, Homo sapiens
actcttgtggggtggggggagaggggagggatagctttaggagatatacctaatgctaaatgatgagttaatgggtgcaacacaccagcatggcacatgtatacatatgtaactaacctgcacattgtgcacatgtaccctaaaacttaaagtataataataataaaataaaaaaatttaaaaaataaataaataaacatatacactcaaataattagcagtttcaccttatttattttttaagttaataatttgtaacttcatgtgggtggaaaaagagacattacaatggagggtagacttaggaaagatttagaatagagccttttccccccgaacaataaagcagtgacataaagacatggaaaataatatatacaaacctggaatgaaaaagagaaaacatgaataacaggcttacatgagtgataaattgcattgtactttgatgaagaaaatctagagatataatttgctgaaatcttcataaaaatgcaaaaatatatcttctttagcacaaattatctccagaatcacctatgtactattctccgagaaacaaagcagaatagaatgtctgtttgacagatttccccatgagacagttaatgttctcggctaagacatttcaattatagccataccacagtaaatgctgaattcctcagttaaacaaggatagactgggttttaccagatgtgtggtgagtagatagacactgatgagaaacacgcaactgtaaaacccccg

SEQ ID NO: 275367 - DNA, 191 bp, Homo sapiens
aggtgaccctctgagaatcggccatcctggatagtgagccaggaatacagagccctgagcacagccctgctcaccacaccaacctttctttcattatgttttttgtttgtttgtttgtttgtttgtttgtttttgagacagagtctcactctgtcgcccaggctggagtgcagtgacgcgatctcagctca

SEQ ID NO: 275368 - DNA, 314 bp, Homo sapiens
agcagagataaaaagtagaagaacaggtgaaaccttcacttttcatcacttatggaaaggtgaaactttctatttcttgagttcaggccaaaacactggaagagggaaagtgcctatgtactaccttacagtgtttaactttgaaaccttgtaacaaaaataaaagacaaattgttcttttgtaaaaaagctgattaaataaaacagaaaaatgtattttaaaaatgaatactgaaatgaaagagttagataataagaggaaaaaatggtttttaagttgccttccctggccaaggtaggagtaggagagaaca

SEQ ID NO: 275369 - DNA, 112 bp, Homo sapiens
acacatgagaatcagggaaagagttaaatctaatttcatatgtatattatgactggaggaatagtggttccaggaaagaaattcaagacattactaaccaaagatggtggtg

SEQ ID NO: 275370 - DNA, 378 bp, Homo sapiens
aatgggccctcagtgactatccgatgcagggccaggcactgaatgcagatgcatatactggagctcagaggatttcagtgagttaccccggccacagccagtgagcagcgatgtcaagatgtcttgaatcctgggcctcagctgcaaagccgtaaccagtcctctgtgttcccatgggccagtgctttacaaaggtccttgcagagaatcatgccaggttaggctggtggtcccagaggaggataagaggcttatggagcagagttgcctaatcaggcccagccaagatcagcagaccctcaaccaatacatagacacatgaaccagataaatggttttgttatttgccactgagaaatggtaggtgtttgttacaca

SEQ ID NO: 275371 - DNA, 422 bp, Homo sapiens
atacaggaagcaaggcgagtcccctccactaaccaacagggattattgcagcagaaagggagctgctggcagaagctctgtggcagcttatgaaggcctctctgctcaccagcctagagcactgtttaaccagggggtgctggggagaccagggccagaaaggaagggacttttgtctccaccaagctggggattcatgagatagcgatcctgggacatagacacatacgcatatcctgcaacagctgcctttggtccaagcaggcagagtcaaatcaggtctaagtggggttagacgttaattcgactttttccaatcgtgtgtgtgtgtcttcctccccagatttcctgtgattataaaaaaaactttagattcagctggccgaaaacagaaaaatagaggaggatctatgtgtccattc

SEQ ID NO: 275372 - DNA, 405 bp, Homo sapiens
gtaaaatcctagttattattcagaatctaaaaaaatttaaacattaaaacccaatataatgtaataattcatataaagttaatattaaaaatcatgaactccactgagtgaaagagagaagtcaatactcattaagttcctatcacaagcaaggtattatgcttaggactatacatgtatttttgtacataacttttataattctataatgtaggcgatatagatgcatatgcttttatatgaaactctccaggaaaaggatgatcagaataaataagtttacagatttcagaaatatgttactttttatacttaacattcaaagcatgatgtggagcactaccacataatcaaacacattaatttctacagtaaaaaatgaaatctgtgcaaactagaacacac

SEQ ID NO: 275373 - DNA, 403 bp, Homo sapiens
gctctgtccctgccccaggtgtccagcaggccctggaatccgcaaaggcagaaggggaagttggggtgctgggtgctgggcagggggtgctgaggcctcacagcccggcggcttggcccccacccaccccacggtggtcccgcgccccacacttcctctcctctcctgtggtttctccttccactcagtgctgcccagagatgggcttctgtctagttctcctgagaaattccacactcgcagctgggaagtcgggggacccccgaagctgtgcggcggccacgctgcggctcctgcttccctcctgctcgggtgcgggctcggctgccttctcgtcccgcggagcccggagtgcctccccctcgggtagatcctactaacagcatcaaagaaataatgaaat

SEQ ID NO: 275374 - DNA, 250 bp, Homo sapiens
tcttttttttctctatttctctctttaaaaacaaacaaacaaaataaataggatttggatttttctaacaatgccgtgaagtacagtctgagtgacaaagtccaattaaaagaggcacttgccagtgacagaaaagtctcacggcagagtctggtccgaatgaggctggagacagtgaccagggccccggggctcctgtggtgtccttcacactaatggtgaaggaaagtgctgtcacttgatttcatat

SEQ ID NO: 275375 - DNA, 698 bp, Homo sapiens
aaagaatgaaaggaattaagagagagtaagagagagagagagagagagagaataccgtttaaaggtctggtgcgtgtatttaaagttccagaaaggcaagagaaagaggatgaatcaaaatcaggatttgaagagaaaatggtttagaactttctaaaactgatggaaaacattagtccataaattgcagaaatgatatgaaccctgagcaggagaaataccaaagaactctacatatataggcattattgttaaattgctgaaaaccaaaaatgagaaaaatcttaaaaggagctagagagcaaaggaaaattaccttcaaataagcaacaactagctagtagctgtcttctcaatagaaatgatggaaacaaaaagtcaatcaaaggccatttttaaagagctgaaagaaaataactgtcaacttagaattttatatccagtaaatggatgaatgatcatagaaatatataatggaatacaaggcagtaatgaaaataaatagcctacagctatatacagttgtgaatctcacaaataaattattgagcaaaagaaaccagatttcaaaaaacacatactgtgtgattccatttatagagagcttacctaaagtatagtgtttaacaacacatgcttgggtggtaaaactataaaggaaaatgaattattaccataaaaatcagattgtggttacc

SEQ ID NO: 275376 - DNA, 305 bp, Homo sapiens
aaagaatgaaaggaattaagagagagtaagagagagagagagagagagagaataccgtttaaaggtctggtgcgtgtatttaaagttccagaaaggcaagagaaagaggatgaatcaaaatcaggatttgaagagaaaatggtttagaactttctaaaactgatggaaaacattagtccataaattgcagaaatgatatgaaccctgaggcaggagaatggcatgaacctgggaggtggagcttgcagcgtccgagatcgcgccactacactccagcctgggggacagagtagactccgtctcaa

SEQ ID NO: 275377 - DNA, 599 bp, Homo sapiens
tgaggcccgcggagaccaggggtgaggaggccgggggggacgggattagagggctgacggggctgggacgagggtcaggcgagcgcccaaggcgcacaggggtgaaatgggaccgaggaaccggaggggtggaatcagagggctggggaggcaaggaggccgagacgaggctcacatgggtgcaccgaaagggtgcgggggtgcagtgcggggggccgaggagcaagaggggccgctgcggacatgaggaacccgaggctgggagttggggggctggggagccaagggggcagaactggggggcaggcgggggtgtggccgagccgagggcctggtagggaccgagggctatgaggcagaatcgggtgctgagggggacgcgccccattttccgagatttggcctctccccaccccccaggagcctctgggccggcacgttgccccatatccccccagtccctgcaccttcaggggcccagtctgcctgatggcccccggctccgcggcctcccaagcgtccgtgaagcgagcgtcagctgcacaagtgctcgggctgcagctgcttcagccacaggtctgtgagccagagcctcaggc

SEQ ID NO: 275378 - DNA, 263 bp, Homo sapiens
atcaaagcaagagtcctgattgggaaccccaatttccattatattagtagatgatcagctttaccacctgctggtctaacttctaatacttgtggttctgttcttaatcaacaatatagaatacttgtacactccaaggatcagcaaactttctgtaaaaggtcagatgataagtattttagtctttgttagccatgtgacccctgccccaaccacccagctctgctgctgtagcgcaaaagcagccattgacagtgtgaaaa

SEQ ID NO: 275379 - DNA, 188 bp, Homo sapiens
tgctagcattacagacaggatccactgctcccggcctgtcttgtattttgacagtttgattataatgtgccttggtgtggatgtttgtgagtttattctacttggagtttgttgaacttcctggaagtatatattcatattcttcatcagatttaggaaatttttggtcattatgtcttcaaatattc

SEQ ID NO: 275380 - DNA, 458 bp, Homo sapiens
agcctgtaccgaaataagagaaagaaggaagggcactcttcttggactgaagtagattgtcgggtgttggaactcttgtgtacctgtcatgttcatacctaggccatagctggcagaataaaaagaagagggttggagaatgagtctgtgtactcagatgtgaattccaagactttaacttgtcctctggtttccttccttcatggagatttatacagattctccttatgtgcctaatctgaagagcagaatttcttttattttcttttttcttttttcctttcttcttttctcttttcttttctttctttcttctttctttccttccttctttctctttctctttctttctttccatctctctctttctttctttctttccttctctctctctttcttttttatttatcatgaagtctcactctgttacccaggctggagtgcagagaaaagcagaa

SEQ ID NO: 275381 - DNA, 116 bp, Homo sapiens
aagcactgtgaaaatccctgtcctgttctgttccgttccgttctaattaccagtgcatgtagcccgcagtcatgtaccccctgcttgctcaatcaatcacgaccctctcacgtgga

SEQ ID NO: 275382 - DNA, 839 bp, Homo sapiens
gaactcggtccaagagcctctctgagacctcttctcccttctctgtcagcacaggaaaagagagtggaggggctgctgccccaggaaggctgggcccacccctcctcacaggcaccctgatgcctgttcagcttggctctctggatgacaggcagaagcccagttgcttctcttctccacggtgatttctgcatactttatccaaaccccctccccaccgctgttcagtttctggctcctcttcctgcccgtgctctgaggccagctgggggcctcccaggtgactcctgctgctgctgtcactggaccctgacgctgtgccgcacccgaattcctccgaatggagccttggccagagcaaggcgtgccgtgtagaggagcggatctgagcctggcaggagatcgctaaaacctttgcccttcacacaaacgcggaagcacggggcgggtgctgaagagccaagcaagtgtcccccatttccttccaaggcagagcagcagcccagggaggcccagtttccatcgcggcagaagggcagaagagtgggggaggtcccaggaccacagcccaggggacactcaggatgcgccaggaaggacatggcagacaggccctttaggtggaaaagcaaccctcagctgcccagagagcggcccctccaggccctccccgccgtctgcaaagctcttcagctgggagaggaggaaagggtttgttcttgacctccttcctttcctttcttctccactgtccaccagagagcaggaagacaggctgatgctcttgttaaagatgaaggcataattcacatgccataaaattcaccattttaaccatt

SEQ ID NO: 275383 - DNA, 476 bp, Homo sapiens
aagagaaagaaagaaagaaaagagaaatgaaatctgccagctgaccaggatggctcactcttaaatatgataagacaaagatcgtcagatatttgaaaaatgaccttagcatgaaaaagagacaaggataaatggtggtggtggtcagggcagagctccataagaaagagaagtaatttaggaaacagaagacaaaagaacattttaaatatttcaggcatttgtcagatagattggagaggtgttacatccctaaacaaggacaggatgctatgaaaaggagtaatcagagaataagtgtgaactactggaaattaaagataggatcacagaaataaaaaagtcattagaaggtgttggaaggtaagagaattagttttatatctaaatgatagtatatctagatcctaaaaatttccttagaggtaaaaaaagaaaaaaagaaaggttacctaaaaatttccttagaggtaaca

SEQ ID NO: 275384 - DNA, 278 bp, Homo sapiens
tcaggtgttccacccgcctcggcctcccaaagtgctgggatcacaggcgtgagccaccacgcccagcctcgactctagactttttaaacttgagtttgctaacaagaactttgtcctcttggcttcaacatatgttcccagcatcacagagataggacagcagacaaacgagagagataataagagaggagagagaaaataagagaggaggaataaaagaaaaggaggagaaaagtcactattatctaattgcatttgagttcctagatccaggtgtc

SEQ ID NO: 275385 - DNA, 2331 bp, Homo sapiens
ggatatccgggggcgggggcgccggcgcggcgcatgcgcgctgcattgttttgactgaaaatgccgtcggtttcgaaagcggcggcagcggcgctgagcgggtcccccccgcagacggagaagccgacccactacaggtacctgaaggagttcaggacggagcagtgccccctgttttcacagcacaagtgcgcgcagcaccggccgttcacctgcttccactggcacttcctcaaccagcggcgccgcaggcccctccgcaggcgcgacggcaccttcaactacagccccgacgtgtactgctccaagtacaacgaagccaccggcgtgtgccccgacggcgacgagtcacttctcggcgtcctctatcctctgtgggcaccccctccggtgcctgcccccgtgggtgcccccactgtgcaccctttcctagcccggtggttctcgcacgttccctgggaaccagccggcagtgcagatccacgggcctcgtccacaccagctggggggaccacatgggccacgggcctcctaggtgattttgatgcatgtggctcgcagtctcgagaatgtgttaagggggtctggtggaccctccttgggttcaggtgtccctacctgcaccggacgacgggggacacagaacgcaagtaccacctgcgttactacaaaacaggaacctgcatccacgagacagacgcacgtggccactgcgtgaagaatgggctgcactgtgccttcgcgcacggccccctggacctgcggccgcccgtgtgtgacgtcagggagctgcaggcccaggaagccttgcagaacggccagctgggcggcggggaaggggtcccggatctgcagcctggggtcttggccagccaggccatgattgagaagatcctgagcgaggacccccggtggcaagcattgcttccagtcgcgctgctcaggcaccgtgtggcccatttttcagatgccaacttcgtgctgggcagctacaagacggagcagtgcccgaagccgccacgcctgtgccgccagggctatgcgtgcccacactaccacaatagccgggacaggcggcgcaacccccggcggttccagtacaggtccacgccctgccccagtgtgaagcacggggatgagtggggggaaccctcacgctgcgatggcggcgacggctgccagtattgccactcccgcacggagcagcagttccatcccgaggggcctgtcgggagtccggtgtccggggcgttttctgtgttcagtcacgcaggcctggttgcagaccccagtctctggtacccagctgagtggagctggcaccacgtgggccacagccgcaccataaatcctgagggagataaaccctcccgcctgggccccgccccagaaaatatcaagcggggaaatgactttgcctgtgatgggagggcagatgctgcgggaatggccccacatgtgtgcgtgttccctatctacaaatctacaaaatgcaacgacatgcgccaaaccgggtactgcccgcgcggccccttctgtgcctttgcacacgttgagaagagcctggggatggtgaatgaatggggctgtcacgacctccacctcacgagtccttcctccacgggcagcggccagccgggaaatgccaagcggagagactcgccggccgagggtggccctaggggcagcgagcaagacagcaagcagggggtgcgcgctcacggtgtttatgtctttgaacagaaccacctggccgtgtttgcagcggtccacccgccggcccccagcgtgagctccagcgtggcgtccagcctggcgtccagcgccggctccggcagctcctcccccactgcgctgcccgcgccccccgcccgtgccctcccgctcggccccgccagcagcactgtggaggccgtcctcgccctggagcccaccccttcctctcctacatcctctgctgtgcagggtgtggcgggggagctgggcatgggatcaggaggacagggctgctggagccacgtggtgggggccctcgctgcagtccctgcctggacacactctggggacttggagtgggaccccagcaccatcaggacccgcgtcaatgtgggcggcggcccggcggccagacccgcaatgactcttgcccgagagccgcagcttctggtcgttggtggttgccccacacggaactgctcaggcccagctgcaagcccccagcaactcctagacgatgccggccaaggaggccgaggagagagagactcttcccagcggccacttaggccacagaccacacatcggcaggacactagaccagtcccatcctga

SEQ ID NO: 275386 - DNA, 1481 bp, Homo sapiens
ggatatccgggggcgggggcgccggcgcggcgcatgcgcgctgcattgttttgactgaaaatgccgtcggtttcgaaagcggcggcagcggcgctgagcgggtcccccccgcagacggagaagccgacccactacaggtacctgaaggagttcaggacggagcagtgccccctgttttcacagcacaagtgcgcgcagcaccggccgttcacctgcttccactggcacttcctcaaccagcggcgccgcaggcccctccgcaggcgcgacggcaccttcaactacagccccgacgtgtactgctccaagtacaacgaagccaccggcgtgtgccccgacggcgacgagtgtccctacctgcaccggacgacgggggacacagaacgcaagtaccacctgcgttactacaaaacaggaacctgcatccacgagacagacgcacgtggccactgcgtgaagaatgggctgcactgtgccttcgcgcacggccccctggacctgcggccgcccgtgtgtgacgtcagggagctgcaggcccaggaagccttgcagaacggccagctgggcggcggggaaggggtcccggatctgcagcctggggtcttggccagccaggccatgattgagaagatcctgagcgaggacccccggtggcaagatgccaacttcgtgctgggcagctacaagacggagcagtgcccgaagccgccacgcctgtgccgccagggctatgcgtgcccacactaccacaatagccgggacaggcggcgcaacccccggcggttccagtacaggtccacgccctgccccagtgtgaagcacggggatgagtggggggaaccctcacgctgcgatggcggcgacggctgccagtattgccactcccgcacggagcagcagttccatcccgaggtacgtccctccaaccccccaggcgtaggggtcgctggaaggtcccagagaagctgtggggttcacagcgtggttatcacacagaaggaacagtgattaactttggccgagggctggcacaggtcgggaagcctgggggtggaggcatgagggctgtacctgcttgcttgtcttgcttgctggccttcgggctgccctcagccagcgagtctctccacttggcctgtaacagaagaaagagtcatgtgggaaaaaagcagagagaaaatgtcaattaaaaacatacatattcaggtctgggtgcagtagctcacgcctgtaatcccagcactttgggaggctgaggcagctggataacgagatcaagagatcaagaccatcctggcaaaaccccgtttctactaaaaatgcaaaaaatcagccaggcgtggtggcgggcgtctgtagtcccagctactcaggaggctgaggcaggagaatggcgtgaacccaggaggcggagcttgcagtgagctgagatcgtgccactgcactctggcctgggcaacagagcaagactctgcctcagg

SEQ ID NO: 275387 - DNA, 1435 bp, Homo sapiens
ggatatccgggggcgggggcgccggcgcggcgcatgcgcgctgcattgttttgactgaaaatgccgtcggtttcgaaagcggcggcagcggcgctgagcgggtcccccccgcagacggagaagccgacccactacagcacaagtgcgcgcagcaccggccgttcacctgcttccactggcacttcctcaaccagcggcgccgcaggcccctccgcaggcgcgacggcaccttcaactacagccccgacgtgtactgctccaagtacaacgaagccaccggcgtgtgccccgacggcgacgagtgtccctacctgcaccggacgacgggggacacagaacgcaagtaccacctgcgttactacaaaacaggaacctgcatccacgagacagacgcacgtggccactgcgtgaagaatgggctgcactgtgccttcgcgcacggccccctggacctgcggccgcccgtgtgtgacgtcagggagctgcaggcccaggaagccttgcagaacggccagctgggcggcggggaaggggtcccggatctgcagcctggggtcttggccagccaggccatgattgagaagatcctgagcgaggacccccggtggcaagatgccaacttcgtgctgggcagctacaagacggagcagtgcccgaagccgccacgcctgtgccgccagggctatgcgtgcccacactaccacaatagccgggacaggcggcgcaacccccggcggttccagtacaggtccacgccctgccccagtgtgaagcacggggatgagtggggggaaccctcacgctgcgatggcggcgacggctgccagtattgccactcccgcacggagcagcagttccatcccgaggtacgtccctccaaccccccaggcgtaggggtcgctggaaggtcccagagaagctgtggggttcacagcgtggttatcacacagaaggaacagtgattaactttggccgagggctggcacaggtcgggaagcctgggggtggaggcatgagggctgtacctgcttgcttgtcttgcttgctggccttcgggctgccctcagccagcgagtctctccacttggcctgtaacagaagaaagagtcatgtgggaaaaaagcagagagaaaatgtcaattaaaaacatacatattcaggtctgggtgcagtagctcacgcctgtaatcccagcactttgggaggctgaggcagctggataacgagatcaagagatcaagaccatcctggcaaaaccccgtttctactaaaaatgcaaaaaatcagccaggcgtggtggcgggcgtctgtagtcccagctactcaggaggctgaggcaggagaatggcgtgaacccaggaggcggagcttgcagtgagctgagatcgtgccactgcactctggcctgggcaacagagcaagactctgcctcagg

SEQ ID NO: 275388 - DNA, 801 bp, Homo sapiens
agcactgcaggagggaccccaagcccagctgggacccccgtgtgccccacccgtgcctctggttgcagccacgctctccagcctgtgggctgcatgctgtctcctcacccaagctgccaggggctcaggcactgtcgtcacctgggctcaatcttgtcttcacagctggcagctgggacgccgggtccttaggctgagtcccagggccaacaacccaagggtcgccctgcccagggtgcacacaggaccttcctccaccgcctgagccccagctgtcccctgggtctggcttgtgggtttggcacctcgcagcctgcttgcctctgaagcccctttctcctccttgctccagcccggccttctggttgtgcctggcctggcttgcctcctgtctgcagtttgcacctgagaggggggtgggggggtgcagaccccacagggtgtctggatgcctgggccatggccttggcctccctgaggccctgtctgtgtccagctcttcctttgagcagagagccaccctcgcctcttttgaatgacctggtgctgcctcgcatgccccggagagcacctgtgcttcctttgggaaggacgccccactccttgttgttatgccacgttcagtctccctctgagcagcttccgagtaaaggacctgaacggctgtagaacaaaccacaaattagtgtctgagattttgtcatcgcccgtcatggaaagaaaataaaaattattttttcaacaggcacttaatgtgtcccataaatacaaatcagttacaataaagcagctagagattcc

SEQ ID NO: 275389 - DNA, 1392 bp, Homo sapiens
tggtgcgcgcctatagtctcagctacttggaggctgaggcgcgaggatcacttgaacctgggaggctgaggttgcagtgagccaagagtgcgccactgcactccagcctgggggatagagcaagactctatctaaaaaaagtaaaatcctcagccaagggggaggcgtgcaggggctgggaaggaccaggcgctgcttcccgtcgtttcttgactcatgttgtcacagacgcgcatcatgctttctgggtgtcggtgaccacacactcaatggtgtcaccaggggcctgtcgggagtccggtgtccggggcgttttctgtgttcagtcacgcaggcctggttgcagaccccagtctctggtacccagctgagtggagctggcaccacgtgggccacagccgcaccataaatcctgagggagataaaccctcccgcctgggccccgccccagaaaatatcaagcggggaaatgactttgcctgtgatgggagggcagatgctgcgggaatggccccacatgtgtgcgtgttccctatctacaaatctacaaaatgcaacgacatgcgccaaaccgggtactgcccgcgcggccccttctgtgcctttgcacacgttgagaagagcctggggatggtgaatgaatggggctgtcacgacctccacctcacgagtccttcctccacgggcagcggccagccgggaaatgccaagcggagagactcgccggccgagggtggccctaggggcagcgagcaagacagcaagcagggggtgcgcgctcacggtgtttatgtctttgaacagaaccacctggccgtgtttgcagcggtccacccgccggcccccagcgtgagctccagcgtggcgtccagcctggcgtccagcgccggctccggcagctcctcccccactgcgctgcccgcgccccccgcccgtgccctcccgctcggccccgccagcagcactgtggaggccgtcctcgccctggagcccaccccttcctctcctacatcctctgctgtgcagggtgtggcgggggagctgggcatgggatcaggaggacagggctgctggagccacgtggtgggggccctcgctgcagtccctgcctggacacactctggggacttggagtgggaccccagcaccatcaggacccgcgtcaatgtgggcggcggcccggcggccagacccgcaatgactcttgcccgagagccgcagcttctggtcgttggtggttgccccacacggaactgctcaggcccagctgcaagcccccagcaactcctagacgatgccggccaaggaggccgaggagagagagactcttcccagcggccacttaggccacagaccacacatcggcaggacactagaccagtcccatcctga

SEQ ID NO: 275390 - DNA, 361 bp, Homo sapiens
tttccagagctctgtttggcggtgtcacctgacagacctgacacttcccgcttgccctgtgcgcctccccaggcctctgtcgtccggcaggtgcagaactcctgtctggatgggtccggggtgtgcctagctgggtctccactgtgcattctgtgagtaactggtgggaggagaaacttttccaagtatccatttctaagattaactgttgctgcttgtatctggcgggtctggagtctgatcttttttttttctttctttcttttttttgagatcgagtctccctctgtcacccaggctggagtgcagtgacacgatctcggctcactgcagcatccacctcccgggttcaagtgattct

SEQ ID NO: 275391 - DNA, 1430 bp, Homo sapiens
ggatatccgggggcgggggcgccggcgcggcgcatgcgcgctgcattgttttgactgaaaatgccgtcggtttcgaaagcggcggcagcggcgctgagcgggtcccccccgcagacggagaagccgacccactacaggtacctgaaggagttcaggacggagcagtgccccctgttttcacagcacaagtgcgcgcagcaccggccgttcacctgcttccactggcacttcctcaaccagcggcgccgcaggcccctccgcaggcgcgacggcaccttcaactacagccccgacgtgtactgctccaagtacaacgaagccaccggcgtgtgccccgacggcgacgagtgtccctacctgcaccggacgacgggggacacagaacgcaagtaccacctgcgttactacaaaacaggaacctgcatccacgagacagacgcacgtggccactgcgtgaagaatgggctgcactgtgccttcgcgcacggccccctggacctgcggccgcccgtgtgtgacgtcagggagctgcaggcccaggaagccttgcagaacggccagctgggcggcggggaaggggtcccggatctgcagcctggggtcttggccagccaggccatgattgagaagatcctgagcgaggacccccggtggcaagatgccaacttcgtgctgggcagctacaagacggagcagtgcccgaagccgccacgcctgtgccgccagggctatgcgtgcccacactaccacaatagccgggacaggcggcgcaacccccggcggttccagtacagctggcagctgggacgccgggtccttaggctgagtcccagggccaacaacccaagggtcgccctgcccagggtgcacacaggaccttcctccaccgcctgagccccagctgtcccctgggtctggcttgtgggtttggcacctcgcagcctgcttgcctctgaagcccctttctcctccttgctccagcccggccttctggttgtgcctggcctggcttgcctcctgtctgcagtttgcacctgagaggggggtgggggggtgcagaccccacagggtgtctggatgcctgggccatggccttggcctccctgaggccctgtctgtgtccagctcttcctttgagcagagagccaccctcgcctcttttgaatgacctggtgctgcctcgcatgccccggagagcacctgtgcttcctttgggaaggacgccccactccttgttgttatgccacgttcagtctccctctgagcagcttccgagtaaaggacctgaacggctgtagaacaaaccacaaattagtgtctgagattttgtcatcgcccgtcatggaaagaaaataaaaattattttttcaacaggcacttaatgtgtcccataaatacaaatcagttacaataaagcagctagagattcc

SEQ ID NO: 275392 - DNA, 529 bp, Homo sapiens
tgaccactgtgtcctcggcttgcagggagctgcaggcccaggaagccttgcagaacggccagctgggcggcggggaaggggtcccggatctgcagcctggggtcttggccagccaggccatgattgagaagatcctgagcgaggacccccggtggcaagatgccaacttcgtgctgggcagctacaagacggagcagtgcccgaagccgccacgcctgtgccgccagggctatgcgtgcccacactaccacaatagccgggacaggcggcgcaacccccggcggttccagtacaggtgagcctgcgggaccgtgctcagaggactccggctggtgggcgtccttcccggcccgtggctcgcgttgcccaccccggggttctaatgggagggctgcccttgtggcaccatcatccccgggaggggagggcatctccaagcacagtggctgtgggaggtgccatggaggcccacgcgtctgtcctggggatgggcctccccacctacgctcagtgtctcccatgcagtccc

SEQ ID NO: 275393 - DNA, 1209 bp, Homo sapiens
tgtcgtccggcaggtgcagaactcctgtctggatgggtccggggtgtgcctagctgggtctccactgtgcattctgtgtccctacctgcaccggacgacgggggacacagaacgcaagtaccacctgcgttactacaaaacaggaacctgcatccacgagacagacgcacgtggccactgcgtgaagaatgggctgcactgtgccttcgcgcacggccccctggacctgcggccgcccgtgtgtgacgtcagggagctgcaggcccaggaagccttgcagaacggccagctgggcggcggggaaggggtcccggatctgcagcctggggtcttggccagccaggccatgattgagaagatcctgagcgaggacccccggtggcaagatgccaacttcgtgctgggcagctacaagacggagcagtgcccgaagccgccacgcctgtgccgccagggctatgcgtgcccacactaccacaatagccgggacaggcggcgcaacccccggcggttccagtacaggtccacgccctgccccagtgtgaagcacggggatgagtggggggaaccctcacgctgcgatggcggcgacggctgccagtattgccactcccgcacggagcagcagttccatcccgaggtacgtccctccaaccccccaggcgtaggggtcgctggaaggtcccagagaagctgtggggttcacagcgtggttatcacacagaaggaacagtgattaactttggccgagggctggcacaggtcgggaagcctgggggtggaggcatgagggctgtacctgcttgcttgtcttgcttgctggccttcgggctgccctcagccagcgagtctctccacttggcctgtaacagaagaaagagtcatgtgggaaaaaagcagagagaaaatgtcaattaaaaacatacatattcaggtctgggtgcagtagctcacgcctgtaatcccagcactttgggaggctgaggcagctggataacgagatcaagagatcaagaccatcctggcaaaaccccgtttctactaaaaatgcaaaaaatcagccaggcgtggtggcgggcgtctgtagtcccagctactcaggaggctgaggcaggagaatggcgtgaacccaggaggcggagcttgcagtgagctgagatcgtgccactgcactctggcctgggcaacagagcaagactctgcctcagg

SEQ ID NO: 275394 - DNA, 411 bp, Homo sapiens
cttctcagcctttggtaactatcattctactctccatctccatgagttcaattgtttcagtcattagtcccacaaatgagtgagaacatgtgaagtctgtcatgtagacaattttgagacacattctaccttgctcctagctcaataacacacttgcataagctttcctctattcctcttatttcttgcctgtttcccactccttttcattcactttacaaaatagcatatctgtattcaaactcttgtctcaggctctgctttctagggataatccatacaaaatcatacaatcagttcccttgacatgagtaaatgcacgcattcagctgatcccaaactacttcttcagtctgtgggcagcccatggtttacttacagcttctctctcctgtctttttgtgcctgcag

SEQ ID NO: 275395 - DNA, 447 bp, Homo sapiens
tcatacagtatttgcctttctgtgactggcttattttgcttaatacgtcaaggttcatccatgtatgtatcagaatttcttttttaaatttataaacacatgttcacctgcattttttcacatttttaatttccttcctaaggctgaataatattctgttgtatggatagaccacattttgaagctttactttttactaaaaagttgttttccatcatgttccatgattcgtcccgagtgccactatccagtgacactgtgcccctttctcctgtggcccaccaccttgtaccccgcctgagacgcctcaggatgctctggatcacagatacttggattagaatcccagctccacccctgccccccgtgggcagatcacttcctgcctcagtcttttcatttatgaattgggttaagaactgcctggctgtgttcaaaactatagag

SEQ ID NO: 275396 - DNA, 6569 bp, Homo sapiens
  misc_feature (149)..(149): n is a, c, g, or t
  misc_feature (2239)..(2239): n is a, c, g, or t
  misc_feature (3121)..(3121): n is a, c, g, or t
  misc_feature (3547)..(3547): n is a, c, g, or t
  misc_feature (3868)..(3868): n is a, c, g, or t
  misc_feature (3923)..(3923): n is a, c, g, or t
  misc_feature (3936)..(3936): n is a, c, g, or t
  misc_feature (3938)..(3938): n is a, c, g, or t
  misc_feature (3947)..(3947): n is a, c, g, or t
  misc_feature (3982)..(3982): n is a, c, g, or t
  misc_feature (3984)..(3984): n is a, c, g, or t
  misc_feature (4008)..(4008): n is a, c, g, or t
  misc_feature (4018)..(4018): n is a, c, g, or t
  misc_feature (4024)..(4024): n is a, c, g, or t
  misc_feature (4041)..(4041): n is a, c, g, or t
  misc_feature (4469)..(4469): n is a, c, g, or t
tattttgacatgcaagaggagcaggcattccaggtatttgaatactgagagattcaaattatcagcaaggttctttccagttccacgtttgttgtgttatcagtgtaaaattatttgaatagctttccactgatgagttattagctganaagtgtttattgtcatggttgaaagaaaataataatgaaagaagaaacgattacctttagtgataaagttggggccggatgggacgaagcagtgcaatttttttctttataattattcccctatttgaaaaatcaacttgtatatgaggcagcaaacaccttgcagagcagcattcccttttagtttcaggacgtggtggtggatggaaccactgtaacctggcctccctccatgagaggagggaatccaggtggccatgttgaaatgtgcctgtgtgcagcaaggcttctgaaatgacaagagagcccagcagcttccaaagcagctgtgactctggatctcacccatcatctctgcttctcactgttagaggagtgaatctgtgctgccttaggaggcatggaacctgggacttttcttccttgtttaatgtttaattttattaaaataatttgtaagtgatagatgttgatctcgtgacaaaagagagattccctctttataaaactattctaactaaagatcttttgtaagcccatgtgttagaaataaaacttgaatatccccttttttgttgttgtttatgaatggccaataatttattcacatgtgacatttgagctggcattttttcctcctgagatgacagtagcgtccgctgtgttgtattctaaagcaaagtcagaatagccctttgcttttgtcccgattagtagttctgttttgccttcttgccttttccatttagaccttatggtatttcctaaaccttagactgttttgaaaggctttgattaaaatatgctgataaaagaattcgataaccaagttaggaacgacaaggctatctggagaagaccaaatgacttggcagcctaacaaattctattcagagcacacaaagagatcctggaacgttttatagggactcgtgtgtggggaatggtatgaactcaggttacctgcaaaatatggtgtcatatggaaacatttaagagcttatggaaaattctttgaaataaagtggaatgagctagcaagcatattatacctaagaagaaaaacaagagcattcattctggttttttaaggtagctgctcaaggaagggagatagatgaaagtaaattgttttctactttgtacacataatatagaagagatcacctaagcctagttttgctaaccagaccctagacttaaaattagaggtcatgatgtctagccaccttcctctgtaggaacctctcgtgataccctgaaagcctctgcttaaatacttccagagaaaagtgaggaaggtaggggtggggatgaaggtttgcaggaactcatgttgagtacctagtatctgcaagatactagagtaggtactttatcgccatctcatctgacttatgtatgagtgcaggttttataaccctcaagtttacaagtgaggaaactaagtttatataagtgtcacgaaacttgcttcagttcagatgtctagcttgaggcaaatctgaaattagaacctaggtccatcttcttgcattacactaaactgcctctcaggatgagggagagctcccttcatggctaaggcaacctcttctgtctaataatgcagattctttaaaaattctttcttttatttaactgaaatctgcctcccattaacatctctcattggtcctgattcggcctcaggaggatcacagagctgatgcaattctctttccttatgcaggtatgtttgcaaccactgctgccaaaatggcctctgccatcttttacctagttggttttttttgaaaatgaacacacacacacacacacacacacacacacacacacacactcacacacacacactcacagaaatatcctcttattgactgcaatccatctttcaacatatggagttctttttgaatactagaggtatagccttaaagaatatgagtatcagaagatactttagtttcatctttccctgcctgattcatcagccaattgttagtatgccatcagtcaagccattaataaaaataatgaacaaggtgaacaggataggttaacttgtagtctatgtataagtttccgangttgcatgcagaatttagcctatatgtgaatttttctggaaaaatggtcagtaactattgtcagattccttttttttttttttttttttttgaagacaaagtcttgctctccagcctgggtgacagggcaagattccatattaaaaaaaaaaaaagtattgagaagtactcagagtagagaacttactcccgaatgaatatactaacctctttgaggagagctccccaaatgaccataaattcatatagctcagccatcactagaccgtgtatttcagccagaagatatggtgaatggtcttgtaagatgcctgactaaattaaagtattaaagtatttcttgaattctcttgatattcctggactttgagaaagaataattatgcccttaaaaatggaaaaagagactgcaatattgttatacaggccttttaaaaaaaaagtatccttaaatttttagttacagagttcacttttttcccctacttttctttgttttagattataagcccaggattgttcaccagaaggttaccctttagtctgcaggaacctttgaaaacagatgtggtattgaagaatatctctgtaagcccagaacttatccattgtataaagaattttattttccccagtagaccgggagctcctcaagggcagggacctttgcaagtctttgactccctagcactgaacccagcatctggcaaatcttatttcatgtgactttattttggctgaatggcctaaaaatgcgcttgtactgagcacctaatacatttaatttaatttttaaatttttattcaataatatagacatggagtccccctatgttgcccacgctggctcaaactcctggcctcaaggatgttcctgcctcngtctcccaaagtgctgggattacaggcatgagccactgcaccaagccctaacacatttaataaattgtaaggaggaagaacagtggaccgcagtgagatatggtctacagggaaaatgaagaacctcttcaaaaatgatgatcttcaggcctgtaatcccagaactttgggagccgaggcgggtggatcacttgagcccaggagttcaagaccagcctaggaaacatagcgaaaccacatctctaccgaaaaatacaaaaattagccatgcttgtagtcctagctattaatacgtgggaggctgaggtgggaagatggtttgagtccgggaggtggaggttacagtgagccactgtaccccaacctgggtgacagagtgagaccccatctcaaaaccaaaaaagatgacctttattatgtttgacntttaaaaaaatgtagccaaagtaaaagtgttgattagcataaccccgatcacatgttgttgttgaaaatgagcactggcttgcataaaatggacattcatggacatgaaatggacattaatgattttacatatgttaagaagagaattttagacttgagaccttagggagatctgttgatagaattccctatgctctacagataaggatacttagtgaagggactttcctaagctcacagacccagaagagtagtactctttccagccaatggtgatgcttacttatgtttttttttttttttttttttttttgagacggngtcttgctctgtcgcccaggctggagtgcagtgacacgatctcggctcactgcangctccgcctcccngnttcacgccnttctcctgcctcagcctcctgagtagctgggactncngacgcccaccaccacgcccggctnattttttgtntttttngtagagacggggtttcnccgtgttagccaggatggtcttgatctcctgacctcgtgatccgttcgcctcggcctcccagagtgctgggattacaggtgtgagccaccgcgcccggcctacttatgtgttttagaaaaatctttaaaatgttaaaagatgacaggtaatttctagaccatatgaagtagcccagttgtcccaggattagtttattatgtgtatatcagccattattttacagagtcatctcacataaatccacacaaccttaaaggattaaaggatggtttctgtgcaactgaaacatatgcacagaatgacaatagtcgtgatactttctttattcttttttttttttttttgagatggagtctcactctgtcgccctggctggagtgcagtggtgtgatctcggctcactgcagcctccatctcccagattcangcgattctcatgcctcagcctcccgagtagctgggattataggtgcacgccacccgcctgggtaatttttgtatttttagtagagatggggtttcagcatgttggccaggctgatcttggaactcctgacctcaagtgatccgcccacctcagcctcccaaagtgctgagattacaggtgtgagccaccacgcctggccagtcatgctactttataatctgaagttaccagttctttgcagtgtttcacattaggggcattctccaaagggaactttagagataacaaatatgttaaaaatatcgaataaagttagagatgtggggagacattcctactcctacagagagcaaccataccttcctatagactgtgcactgaagaaagggcggaggggatgcgcctgttagagttagaatcttggcttgataggcaaggaaattgacccggtgtggtggttcttatattggtaagaagacccttctttggtttctttttttccagatagctaaagtcaatgtcagtgattgcttcaagcatgatagtcttaccagcctacactctaagcttttcttatgcttccagaatgacttactcagcaatcacttctactttgtattaaaacagttttggttattcaggtaggaagaagagaaaaaaaccaggctgtttccagttgtctggggtttacattatgttacctctcagactgttagtgaaatcagggagactagtggtttttacggcatcagagataccaaatgtataacagacagatgtcatcttactctttttaagtcatggacaaaaagacagacacattgccctgtaactttcagatcttctgtaacctttttaaacaacataggagagaagttggtacttgtacccaagggaagagaaagttaatgagtagaaaagacagaatttatttaggaaaacgatggaattaagctctggacaaaacatgcatcagtgatgcataacatttttgttaattgggtcttaacaggtttctgactcatatggtaatcattgtagaagtgggtcttactagaccacgccagtggcaaatcgcgaagctgtaagaactcttacctccctgtgtgtgtgcacctgagtgtgtgggggggcgtacgtttctgtagcttaatttaggttccacatacacttcagtggttaaacctgagctagactcaaatagtttgtttccattaagaaaatgaatcttttatgtggaccaaggtcaggttagttaatttgtttgcttttattggaataacttttcccattccaattcatcacttaattttaagtggttctactaaaatacccattaaagtcctttacatttctcacagactagggctatgacagattcataagacgtttcttttttcctcaaggcacaaaaggtagcttttctggtcatcaacctagtcttccttgttcctaatttcacaacagtggggcaacattttatataataccaatatgaactctaattgcaaagagactaaatgaaatcttcacacgaagcaagattaattaaaatataaaatgtgcttgactgtggtaaaacatttcttttaaaaaaaatagtatgacttttttttttttttttgctaaatctttcttttttgtacacctcaccctcttcttcactgatgcattttccagcaactggaagttcactctggctaggaaagtaactaaatgtgatgttatcattctaattagtgattacaaaagatcaattaatgttataattaaaaacagtgtctagatctgttgtttgtagtgaataaatgtgacaattactttgttcattgacatagatgtgttgaatttcctccctagattttaaggggatgcattttagtgctgatgtgtgcatttaactgtggacagtaggaacaaggcaagcatattaggggaagagtagggcccctaatgtctaagctacagacatattttagcatgcttgacacctttccttggtatatgatgctatatcagcaacttgtactcattggatctggagcctctagcttttaatattttatcactaaatgcttaagtgtttatgttgcaaaaaga

SEQ ID NO: 275397 - DNA, 571 bp, Homo sapiens
agcccacgccagcctacgtcacgcaggaagggagccagtggccaccccaaacacacctctcctcctcacacctggcctacgtccaactctccacggctctacccagaaggctgcacgtacaacacacacagaggcgggcatttccctgacgactcgtgtgtgccgtgggggagcggtagatggcccagccccaagtgttccgatcttcctgcccaaacatattctgtgacggaaagcctatgttgacctcgtccggcactcaaggcgtgggcagcggcctaacgtctgctgcgggaacacagtcgcgttgaatgctattctcaagacagacaaaacagtgggaagacactacgccaagctgctaactccctggccattgccggactctttcacccccatggactttccgctggcattttaaacaacatagtttcttttctctgtctctttctctttctctctctctttctctttctctctctctctctctctctctctctctctctcaatctcataatttctctctctcgtgccacgttcccacccaacgctctctcgcccacttctactg

SEQ ID NO: 275398 - DNA, 402 bp, Homo sapiens
caagagtgctcattcaagttactcagattttctggaagtcttttctgaagagctatgtgatgttgttctatgggacagactactcttatttaacatctgggcacttaggtagacaaccttctactgacctggaataaagtgtttcctaacataatattgaattattcagaaataatccattacttcaaaaaagaaaatattcattgggctagcccaaccttctctaggccctaagaattattacctcccctttctaattctagcaaacatggaacattctccttaggcacttgacacccacgagggtaatcctgagtgctcagtttggaataggttgcaaatctcagattttagggattgagtcacaccttcaatctatagaatgaagttgaccaattaaaa

SEQ ID NO: 275399 - DNA, 166 bp, Homo sapiens
actttatcttatcctacgttgccatacatgcatgggctttcttctagactctattcaattccattgttctacttttctatttctgatcaataacacactattttaggcactctaactttcatatcttatgtttcgatatctgatagggttagtctcctccccccta

SEQ ID NO: 275400 - DNA, 260 bp, Homo sapiens
atttgtatggaatatcttttcctgttcttttactttcaatccatatgtgtctttaccagtgagaagagtttcttgtaggcagcttatagttggatcatgttttttcatccattcagcccgtctgtatcttttaaatgaagtttaatccattgacgttcagtgtgattactgatatgtgagggctgattcttatcattttattaattgatttctagttgttttgtttatcctttgttcctttctcttttattttttatcat

SEQ ID NO: 275401 - DNA, 534 bp, Homo sapiens
taaggcacaggtcatagcatgcaaatggacttttaacctttaattagtggtttaccctggatagtaatggtttctaacctctttagtaaataaacagcttatagaaagccaggaactttgggaatgtaatacaaatggatttattattaacatttgagtgactcatagttgatttattcattacctaaaaatttgagtatgtaatctactctaggttaagttgtacttataattttggaggaatgatagatgaataatttttctgcagttatattgaattgatatactgctacatttagacctggacctgggcagaaatacatctcaggataatgaaaacaataaaccatggttgaaatttggcccattgcctatttatgcaaataaaatgttgtattgacacaagctatgctcattcatttacttgctgtctatggttcctctcgtgctgcaatggcagaattgaccagttgcaacagagaccatatgtcccacaaagtctaaaatagttctatctgaactttcatgaaaaaa

SEQ ID NO: 275402 - DNA, 342 bp, Homo sapiens
tattaggtattctctatcatttaataatatacttgtggactaaaagatataagtgctgtataaaatcagctcaattatgttaaactagcatatctatcttttttgtgtttgtcattggcctgaatagaaaggcctttaaaatttttttagaaagcatttgaatgcattttgtttggtattgtatttattcaataaagtatttaattagtgctaagtgtgaactggaccctgttgctaagccccagcaagcaatcctaggtagggtttaatccccagtaaaattgccatattgcacatgtcttaatgaagtttgaatgttaaataaattgtatattcacttta

SEQ ID NO: 275403 - DNA, 408 bp, Homo sapiens
gtggcgcatgcctgtagtcccagctacttgggaggctgaggcaggagaatcacttgaacccggaggcggagcttgcagtgagctgagattgcgccactgcactccagcctagtgacagagcgaaaatccatctcaaatatatataatttatgacacttgttaaagaaggccattcaaagaggccatgacaatatgtatagggacccctgcaacaggtcttgcagtgggggagagagactggactcaactccaagtccaattaggacatgtgggaatttataatcaaggaacaagaggggcagaagggggggtcagtggatgaaaaatcaaaagaaatatcaaggagaaggggcttctggctaaaatgacttgatactattgttgctgaaggcaggccagggtgaccag

SEQ ID NO: 275404 - DNA, 580 bp, Homo sapiens
taaactttttttcacttttatgtaattaagaaataaatatttatcagatctcagaactataataataaaagagatatgccatattgatttgctgatggaggctaaatgtaactactttattttcgtataaattagagggtgttcaaatcacagttttgatagtcaggttaaacatcacctcttaagattttttaagtgacttctcattttctagtattttatatgaatatttatgtttctcttcaataaaaaagggataaagttaatacagtttcactgactgctttaaaattaaccagaacttcaaaattgtccaaccacttggtctgggaaaggctgctcattgtttttcaatggctaattaccaatgaactcacctaatgctatgctgttgcattcaatgggaattacttgagaagaagttgaattgttgaacttttatacacacatatatattcatatatatatacacacacatatttatttagagtctataaccatatatatttatacatatatatacatgcaaatgaaatatgaacatatgactatataaataaaataatttcaatcattcttg

SEQ ID NO: 275405 - DNA, 197 bp, Homo sapiens
cccaggcctcctggccctgaagttcagcctgtgacagctcccccaccaagtgggaatgggcagtaaaataagccaggcccgggtgtggggccaccgagaggacccaaagggggtcttgaggccacgctcctccatcctgactcaggtggggagggtggtaagaggtctgtgctgttgcatctcaaacacccgtccgt

SEQ ID NO: 275406 - DNA, 471 bp, Homo sapiens
ggatactttctgctgcattcagatgagagctaatagctaatctttaaaaccattaagctgcacttagctgagccttcacttacagattctgggagaccctttgctattacacagtggaatcaaactttgtgaggtcatgagtgtagtcaaataagccttttctgtgagaaatcagtgagacatacatttcctcaatctcagtgctcaggtggagtatatgctttgctgccttttgtttaaaacagaaatttttagaaggtttttaatcctaacatccctctgaatttttaatagagttacttatttaaattgaattgtattaaaatttcagtgttttcatcttcaagacagcaggagacctggagtagggtaggcaagtaaggcacttaactcagacacaaaatttaaaggaagttcagcaatcaatataaataatattttaaggcaatatttttaaaaacaaaaattaac

SEQ ID NO: 275407 - DNA, 367 bp, Homo sapiens
ggtccctgcctccctccctcctgcctcatccgtgccctgggagaaggctgagccctacccatctaccatagcctcagcatctggttccagatgtggatcccaggcctccaggtccatctgggccccagctttaagcctccctgctcctcaaagtgggtaaagctttagctataaccagtcgaacagcgctgcctctgccacctccctccgctccctgggtctgctgctttctctcaccctatatttgtgaagcaattgtaacatctagaaagttcttgggttctctggaggtttttaagaaaataggacctttctatttctccagtccactagcaaaaataatcaggggcccagaaaaggtgaggga

SEQ ID NO: 275408 - DNA, 183 bp, Homo sapiens
tcagaagcattcaagcagacggcttagtctggggctcatctaaactagttccagtgggatacggaattaagaaacttcaaatacagtgtgtagttgaagatgataaagttggaacagatatgctggaggagcagatcactgcttttgaggactatgtgcagtccatggatgtggctgctttca

SEQ ID NO: 275409 - DNA, 333 bp, Homo sapiens
cagtgttggtgaccagtgcttatcttcttggacatatacatttatctaccattctacctacctatctattcttcataaaacatttaacatcaaccttgtatagagtcatggtgtggagcctagaagccggaggggaatattttctcaatctggaaatgtctttagtccttttgtgatcagaagcagtctcatttttttttttttttggctctttccatttcacaaggagcaaatcctcaggactaaatatgtgggagtcacagtggtgttactgaattttgtctcttaggcttccctggctcccagtaagtatgccatttgttaccttcttcc

SEQ ID NO: 275410 - DNA, 1033 bp, Homo sapiens
cccaaacagaagggtgagagcatgtcagtggcataaacgggaagaatttgagcaagagaataaataacgtagtattggattagaactcaaagtctaaaataaacatacatgagcccatactgataaaaatgattacataaatacatgggtgagaaaacacaaatcttccttacaggaaaatttcaaatagtatacgtagattcctattcccaggagatggagcttaatcctctcagatgctagtgtggattgggcttagtgacttcttcaaagaaaaaaatatggcaagggaaaaataataactttacagggagacgtcgagcagtaccatacctgaagtgccaaatgaccaaagttaacattactagtgttaagtcatattggtgtcatatatcctctgatgggtgatgaaaagggtacttcacccctgtggtattccaaaaatagacccacgtatatatggaaaactgattttcaaaagtgcaaaaggcaattcagtttcaacaaacggtgctggaacaattggatttcaattggatatcacactctatataaaaattattacaaaatatattgtagacctaaaagtaaaatagaaagtcactcagctcttagaagaaaatgtaggggtaaatctttgtgatttggggttaggcaaagatttcttaggtatgataccataaacatgggcagtgacctaatttccaaataaagtcccacaggtatggaagttaagacttcagcatgtctttggagataacacaattcaacctgcaacaaatataatggttcccaattaggactgctttcatgtttaatacagagaaactgagaatctctatatgagtttagtgcttttcacatactacctaagaaatgcatcttccacatttacatttagtcttccaatgtgttggtgttgtcattaacaaaatacaaattctcctaaaaatattatgaattgtagatttgggcacttcaggttggggatctctaagtcgactgagctgcagtggatggcgcgttaagcaga

SEQ ID NO: 275411 - DNA, 521 bp, Homo sapiens
aacgaagcaagagtccatcccaaaaaaaaaaaagttctgcaaaaatgaatactaaaataaattgggatgttaagaaatgtgatttctgcaatgcttgtagtttctatgttggaatatgtaaccattgcatgattttctgcaaacatcatatcttggtgttctgctgctcgtggacttttaaactgcaccaaaccatggaggtttaattatttaaaaaaaaaatgttttaggctgggcacagtggctcacgcctgtaatcccagcactttgggaggccaaggcaggtggatcacctgaggtcaggagttcgagaccagcctgaccaacatggagaaaccccatctctactaaacagacaaaaattagccaggtgtggtgacgcatgcctgtaatcccagctactcgggaggctgaggcaggagaatctcttgaacccgggaggcggaggttgcggtgagccaggatcacgccactgcactccagcctgggcaacaagtgtgaaactctgtctcaaaaaaaaa

SEQ ID NO: 275412 - DNA, 380 bp, Homo sapiens
ctccagcttgggcgacaagagcaagactccatctgaaaacaaaaacaaaaacaaaacaaaaacctctactctgtggctacgtacaacttctttatgagccgtaaacacatcagtgttttctccgaagagctccatggcatcacatttcacagtcagtccccttgtcaaatgtcacagagcggagtcacttgacaggtttcagaataatcactgtcgacgcactaacatgctccaacaacttcccgtagcaaacattaaagctttcctgaggaagaggcactaaacactggccattgaaatgaccatctgaccatccacaggccacagatggaacatgcagacatgaggctcctggcagggatagtgcccacagcttttgg

SEQ ID NO: 275413 - DNA, 451 bp, Homo sapiens
actgaaagaagtcatttaagcatgttgcttgtcaaaataaaacttggtaacattgaattagttttcttcctgcagttaatgaactcagaagagataaatgactgtggtggtggcccatgcctgtaaatcccagaggtttgggagggtgaggtgggaaaattgcttaattccaggagctcagaaccagcctgggcaacatagtgaggctccatctctacaaaaaaaggaaaacctgccaagcatggtggcatgtgcctgtaatcccaactacttcagaggttgagatgggaggattgcttgagcccaggtggttgaggctgcagcaacacagtgagaccctgtctcaataaaaaaagaaagaaaagagagacacagtcaatagtttctcctgccaaaagaaaaggtgaaaacaagattgtaagaaagagagaagagaaaagaaatcaccaag

SEQ ID NO: 275414 - DNA, 904 bp, Homo sapiens
ctcctgggcacaagcaatcctcccttctcagcttcctgagtggccaggactacagaggactgtatgctgttcttaaggactctctgcttcctggacaagctcaagctaaggactacatctcccagcaggctgtgctctgacagctcttggatttaaataggattctgggctctgctcagagtcaggctgctgctcagcacccaggacggagaggagcagagaagcagcagaagcagccaagagctggagccagaccaggaacctgagccagagctggggttgaagctggagcagcagcaaaagcaacagcagctacagaagttggaacgatgctggtcaccttgggactgctcacctccttcttctcgttcctgtatatggtagctccatccatcaggaagttctttgctggtggagtgtgtagaacaaatgtgcagcttcctggcaaggtagtggtgatcactggcgccaacacgggcattggcaaggagacggccagagagctcgctagccgaggagcccgagtctatattgcctgcagagatgtactgaagggggagtctgctgccagtgaaatccgagtggatacaaagaactcccaggtgctggtgcggaaattggacctatccgacaccaaatctatccgagcctttgctgagggctttctggcagaggaaaagcagctccatattctgatcaacaatgcgggagtaatgatgtgtccatattccaagacagctgatggctttgaaacccacctgggagtcaaccacctgggccacttcctcctcacctacctgctcctggagcggctaaaggtgtctgcccctgcacgggtggttaatgtgtcctcggtggctcaccacattggcaagattcccttccacgacctccagagcgagaa

SEQ ID NO: 275415 - DNA, 410 bp, Homo sapiens
aacgtatcttagtgtgagctcgtgaaggatggtacgtgatgctcttgtttcccttgccgataggaagttctttgctggtggagtgtgtagaacaaatgtgcagcttcctggcaaggtagtggtgatcactggcgccaacacgggcattggcaaggagacggccagagagctcgctagccgaggtaagtgtttcccctttagtctccaaagggccatgcctcccacccttcttcccactggggcctctgtccatattgctttgtgtttcctcctaggcttgggggctctgactagaaattcaaggaacctgggattcaagtccaactgtgacaccaacttacactgtggcctccaataaactgcttctttcctattccctctctattaaataaaataaggaaaacgatgtc

SEQ ID NO: 275416 - DNA, 248 bp, Homo sapiens
agagaatattgaaatatgcctcccctttccagcagaatatctgtgtgaatatggatttttaaatatactttaaccaagggcagatcacatcagattgactgcagaagtagatatgagaatccagttgtcttctattaagttagataattgaagagatttgtaaaaatgtaaaacagaggtattcctctaagttttgtcttgtttttgaaaagttattttcattaaaatgttatgtatattaacatgta

SEQ ID NO: 275417 - DNA, 515 bp, Homo sapiens
caaagctcaggctggttttctgctgttatattagtccattctcatgctgctaataaagacatacccaagacagagtaatttataaaggaaagaggtttaatggactcaagttccacgtggctagggaggtttcacaatcatggcagaagatgaaggaagagcagagggatgtcttacatgagagtgtgtgtgcagagaaactcccctttataaaaccatcagatttcatgagacttatttactatcaggaaaaagacccgctcccatgattgaattacctctcactaggtttctcccatgacatatgggaattatgggagctataattcaagatgagatttgggtggggacacagccaaactgtatcagctgttttctagggcactcactcacagcataacaatgtagcacctgcctcacactgtcaactgccacctgtggcctaggtgcatttcacaggatggccagggcattgccctgaaccacctgggctacagagcaaggctgctttaaac

SEQ ID NO: 275418 - DNA, 454 bp, Homo sapiens
ctaacacaggtatgcgggctgctgggagcctgagagcactgtctgagctgtctcactgcatgtccaccaattgggtgaccatggggcattggcccagagccaccctgtcacgggtgggaaagctgaggcccagcacagggaatggccttgcctgagtgacattgggaatgggtggcagggcaggagctaactttgtccccaggctgtcagagctgaccccttgccctgactccgatggtgaaactgagccactctgccagcagtgtggctctaggtcagaggtagaggctttgtggggatagccccgggctcctcagcagaagacagcgtgcaatccctgcgtggtggagggaggtgcacacacctgcagacccctgccccattctatcccctgctctggggccagggcccctcccctgagtcctggagcctgatgaggatagagaggggaggc

SEQ ID NO: 275419 - DNA, 328 bp, Homo sapiens
atgaaactgctccatctcagaccatcaagcattagattctcataaggagcatgcaacctagatctcttgcatgcacagttcatagtagagttcatgctcctacgagaatctaatgcccctgctgatctgacaggaggcggggctcaagcggtaatgctcacttgcccactgctcacctcctgctgtgtggtccagttcctaacaggccacagaccagtaccagtccatggcccaggggctggagactcctgaggtaataggacttaataaattaagtcattcaaaactgtgcaattaaaatataaattaatgtgttacttctttaaag

SEQ ID NO: 275420 - DNA, 388 bp, Homo sapiens
gtgaaggactttagcaagagaatcaaaaaacgctgaaggctgggtttttactactactcttcctaggttctcaggaggccacagatcaggagggaacactttacagcagacaggaggccgtgctgctcagcctctggaggacccactgagaaagactgccccaaacagcctgcctgctagaagtcacgctcttcaacaccctctgcttccaaacacgaaccacataacacccacaacttaacgaagccagagtgctgggaaaaaaataataagtggcaaaagacaaatactccacaagtgatcacttcagtcatccattccccaaaaaaagaccctcccatcatgctctgccaaacaacagaaagatcattaaagatcatcactggca

SEQ ID NO: 275421 - DNA, 413 bp, Homo sapiens
  misc_feature (204)..(204): n is a, c, g, or t
  misc_feature (381)..(381): n is a, c, g, or t
acagccaaagacctggtcacaaggctgatggaggtggagcaagaccagcggatcactgcagaagaggccatctcccatgagtggatttctggcaatgctgcttctgataagaacatcaaggatggtgtctgtgcccagattgaaagaggggattgccagggccaagtggaagaaggctgtccgagtgaccaccctcatgaaacnggctccgggcaccagagcagtccagcacggctgcagcccagtcggcctcagccacaagacacttgccacccccgggggctggcagaccgtaagtgcccaccccagccacaagatgggaagttgccaccccagccacttgatggcagtgtcaccccagccaccgatggaagcattcantccagccactgatggggagtgtcaccccagcg

SEQ ID NO: 275422 - DNA, 599 bp, Homo sapiens
cctaaggagtactcattctatgccagtcactgtgccaactgtcttacctcaccatgagctcatggggcaagtattctcatgcccaaatccccaatgaggaaactgaagctttgaggaggtcacagaattctggcatatccagaatttaaatttaggcctgcctgatcccacatacttaaacattaccctatactgttttactctatttaagtcaacaattacagagcagtaggcacactgcttcatttaaaggccataaatattgaaaggttgttgtctgaaggtagagaccaatgaacagataatttgcacagataaatataattttgatcaagtgctgtgaggagacgagttagggcaaagttttacagacctgggacctgaacgatgagtaagacagtgccatctagggggaaaggagtaccagcggacaaaaacaagcatcacaggcaaagaaaatcaattggtatcttgggcgtctcagtctctccatcattaccacaatctaacatttacttcaaaggcctacttcctctatccttctgtggtaaagcagcatgtcggatctaatggtctggattaacgcgggtcgcgagctc

SEQ ID NO: 275423 - DNA, 477 bp, Homo sapiens
atttttggtcatgaggtttttgcctaacccaatgtctagaagagtttttccagtgttaccttctagaattttttattgtttctgatcttagttttcactatttgatccatcttgagttgattttttataaggtgggagacaaaggtgaagtttcattcatctgcatgtggattgccggttattccagccccatttgttgaatggagtgtcatttcccctttgtgtttttgtttgctttgtcaaagttcagttggctatgggtgtttgtctttgtttctggaatctctattctgtacatgcctgttttcatgctgataccatgttgttttggtagcttttaatgtgccttgtaatacattgggtggtgtgatgcctctaggtttgttcttttttgtggtctttctttgactatgcaggtttcaaagccgagaatcaaataaagaactcatccattttgaaaatagctgcaaaaaaaaa

SEQ ID NO: 275424 - DNA, 371 bp, Homo sapiens
aggttaggcatacttggatcgtatcatttgcacaagctcaccttgaagtatatatgtaaacatgccattttacaaatgagggaactgagaggctcagaggttttataacgttcccaaggtcacacagcaagtaagtcacaaggcaaatatatccaaccacaggcctctgtccagagcctcctccaagcacccaggctgagaatggtgactgggggagccagatggaaccctgatccttctgagtggaaaggtgcttttactgcacttcatttccactccccaagatgtcatatgagtgggactgtttcacacccaaactgttaacctggggtcagtagtgtcctctcttctttatcctcaaattgtacccc

SEQ ID NO: 275425 - DNA, 400 bp, Homo sapiens
aggtgggtggatcagttgaggccaggagttcaacaccagcctggccaacatggcaaaaccacatttctactaacaccacaaaatatagccaggcatggtggcacacacctgtaatctcagctactcagggggctaaggcatgagaattgcctgaatccagaggcagagcatgcggtgagccaagatcacaccactgcattctggcctggggtgacacagcgagacactgtcttaaaaaaaaaaaaagtttggaaatgtctcaaatggagtactacagtcttcaacatagcaatgaaacaaaaaacagtaagctctggagtaggagaatctgattactggagttacctcattataacagtcaaatgcccatttttcaacaacaaaaattacaaggcataca

SEQ ID NO: 275426 - DNA, 456 bp, Homo sapiens
tatatgtttctcagccattgatgtttcatttttggccttttacttttcattttttaattaattttatttctatggtttgatatagtttttaaaaaaattattcaactatttcctacatatttgtgaggtaggtaggagaaaatgagtactgtatttttaactttgctagataagataatgcctgattgtttttttttccaaatagtttcacattctcacccaaatatcatgttgtcaaacttttaaattttgttaatttggtgggtataatgctttcttattaattttgacttgcattttttcaattgcaactgaggttgacaactttttgatatatttattatctaattggattttgtaaatctctttcatcatttctctgttcaattggctttttcccatgtattcatttgttgctggtatatagaaatacaaattgattttgtgtacttggta

SEQ ID NO: 275427 - DNA, 433 bp, Homo sapiens
tgtcattggaactctgaagctctctctgccctttaggtttggaccaagtgctgtcaaagccagagaaagtaggattaaagatactgatcagccaggacagataggggttttctgctggaaactgcgatacctaccctcggtacatggggatagctcacgtaagtgacttggtcacttggcaagatttcttcgcttctcggatagctgcaggaattaaaacatagtgtatagaatttaggtgttttacactaaaaatgataatgtcttgttccaattaagaatagtaaacaggtccaagtatagacaataaatgagattgggattctgttctcatttctcaatgtgaacagttactcccatatcagcattattttctatttggccttcttaaatacagagaaaaaataggatatattaatagtaggtcacttga

SEQ ID NO: 275428 - DNA, 422 bp, Homo sapiens
aagttacgatggaatgaaatttcaattatgccgtcacctattttctgatgtggattttattttcattttacagagatttcaccaagttaaataacttgtacaagggaaaggggaaaaaaaacacaaacttatagaccaggatcttaaacaacactagtgaccatgaccacccatctccaggctgctgcatggaagaggaggtataagtgagagattggagcaatgtttttcagcttctgagcattctgtgatgttccattaggaagcaagtagcgagagcatgggcctgggaagccctttctccacccagcctcatcttttgcagctacagccactctttttatctttatttatcgagacagagtctcactctgtcacccaggctggagtgcagtgtcacgatctaggctcactgcaaccac

SEQ ID NO: 275429 - DNA, 330 bp, Homo sapiens
ccagttccatccaagttagtgcaaaagacattgtttcattcctttgtatggctgagtagtattccatggtgtatatataccacattttctttatccactcgttggctgatgggcagttatgttggttccatatctttgcaattgcaaattgtatatgtactttatttttattattttttaaatttcatttctaaatttcagaaaacctacttaaatacactttgaaacaacagtccaacaaaatagaacagacttcaaatgttgaatatacaaaccattatagttcaaatctgaacactggtactttccgtcataaacttcaactaaaac

SEQ ID NO: 275430 - DNA, 197 bp, Homo sapiens
gaagctcagggacacccacctcccagagggggccaggcaccatgcctgcaggcaggttgctgactgcagggtgacaaggtttcactgggacagaggggtttcctaggacacaagatattcagtgctaaagcatggaagtcgcagcaaatgattgagttggtcccccaaacgcctggcccaccaggagggctggataa

SEQ ID NO: 275431 - DNA, 388 bp, Homo sapiens
tagtaaattgttatggcaacaataagaaaaatcaagacaacatgcacagatggaattattttatacttcactattcctctcctaccctctatagtcaaaagtgtatgtcatttaaactaatattcagtatttacatgattatgccaatggaaatacttcatgaaaggccaaatatataaaaaatatttcttatacatatttttcttgagctaataattgtcttgtttattctttgtacactttaccatgcaaatatcactttctttcttatgctatcattactctatagtattgagtattttattccccattgtcccttcactttgtgtcttctactgtcttgtcccaagctaaactgttttgtaggacatttgtacacgtatatttt

SEQ ID NO: 275432 - DNA, 347 bp, Homo sapiens
atccttactctggggcatatgcttgtgattggaatcataaaccctgatggtttaaattgatgtaatttaagtgtgcacaaaatgcagctactgggctgccatttcatataggcttcgatggtataggaaacagcaaaatgactagaatgaaatatacccccaaaaactttaacagtggttatcactgggtgatttttgtttatacttttctgaagtttctacaatgaacatatcttaacttttttaactaatacaaacttattagtcctggcatggtggctcatgcctgtaatctcaatgctttgagaggctgaggcggggcaggaggatcccttgagcccaggagt

SEQ ID NO: 275433 - DNA, 571 bp, Homo sapiens
taagcctagggaacccaaggctgcagtaagctgcaatcatgccactgtactcaaacctgggtgacagagcaagacactgtctcaaaaaattaagaatacctgagaaattctcaaaagtaagaaaataaggttgtaaaaatgaagaagctcaacatactaaaactaggaaacatacagatccataacaagacatgcaaagcaaagttcccaaagtcacagacaagaagagaatctcaaatgctggaaaatacataattatggttgcatgatataaccagtgactctttcaacaaaaaccttgcaggccagaaggaaattgtgtgctatagttgaggtgccaagcgaaaaatagcttctatgtaagaataacataaccagcaaaactgtgctacaaaaatgaagaaaaagcaaagacctctaaagataaccaaacgtggaaaaattatatcaacactacatgtgccatacaaaaaatgctgagaagagtcctcctattaaaactatatgatgctaaaaaacaaaactatcatataaaaataggtagctttctaggaaagatataaagatatgc

SEQ ID NO: 275434 - DNA, 724 bp, Homo sapiens
ttgtatttttagtagagactagtagttcaccatattagccagcctgatctcaaactcctgacttcaagtgatctacctgcctcagcctcccaaagtgctgatattacaggcatgaaccagcacacccagacgagtttttgttacttaggtgaaagctcaaacctttgctgatactcaccctatcatgctccaccttaccccccaacccccactcaagccaaagagaacaagatgaccagaaggggccctaagccttggagagtggaaaaactgtgtaaggtgatactaaaaacaagaggcaatgcaggcttgctcattttcatccgtttactcaaaggccatttaatgagtacctttcaaaactgttctgggcagttcccctgggcaggaggggcccctgctctgggctccaccatttagagaaccctactgaggttgggcacagtggcttatgcctgtaatcccagcactttgggaggtggagacgggaggattgcttgagcctgggggttcaagaccagcctgggcaacatggcaaaaccctttctctacaaaaaatacaaaaattatccaggcacagtggcatgcgcctgtacttctaactattcaggaggctagagtgggaggatgacttgagcctgagaagtcaagcctgcggtgagccgagatcatgccactgcactccagcctgagtgagtgacagggcaagatcctgtctctatta

SEQ ID NO: 275435 - DNA, 295 bp, Homo sapiens
taatgggtatcataaattggatgtaaatcacaggagagcaaatacgaggagctgttaagaggcatctacagcccgtcttatctcaggagtttcaacagctctgcagcttttagctctgctttgcagccaggttaatgtatatggcaagggggtaatatctacagaatgtagacaaaacaacttcgcgttcattaagaggatgacagcttaagcacaagtttaaagaacatcaggatttgcttgtgagtgagataaaatatgaatatatataaatatataaatataaatataagat

SEQ ID NO: 275436 - DNA, 291 bp, Homo sapiens
actccagaggattccgtgcagcttgtggaggttggaaagagcctcaggcagaagggcagctgtgcaaaggccctgaggtgggagtgtgctcaggatgtttgacgaaaaggcagccagtgagagtggcgataagtgacggagcactgggcagtatgtgggggtggagcgtggcaaaggtgggcctggaggaggtgtggggcagggcctctcaactctgtctggttgggagcattccttgaattcctagtccatccagacgggtccttttgtgtccatgtttagatgttgtgc

SEQ ID NO: 275437 - DNA, 467 bp, Homo sapiens
ccaaccaacttttgtgtttttagtagagatggggttttgccgtgttgaccaggctggtcttgaattctgggcctcaagtgatctgcccgctttggcctctcaaagtgttgggatcataggcatgagccactgcacctcgccagaatttttttttttaaattgtgtgtatttaaggcatacaacatgatgttattggatacgtatagataataaaaaggtcactatggtgaagcaaattagcatatccatcatctcacaaagttatttatttttgcttttgtttttatttttgcttttgtggctggaccgactaaaatctactcatttatcatgaatcccagatacagcactatattattatctgtagtcctcatgttgtacataagaaatctagactttttcattctatgtgtctgctactttacatcctctgactttcgtctccccattttctttccaccccctgc

SEQ ID NO: 275438 - DNA, 398 bp, Homo sapiens
ggcaattttcgaaaatattgccagagagattgaaataattcaccactgcccctcctccagcttctcctgggcatgccacatacactgtgggaaggggaaaggctgacctagaacaccttcaagtggatgctacagaacccaccagggcagagcctcagctctcagcctcccggaatgaaccatgaacccaaagcaaagagcagaactcctttgacacctccagcttcacagacaaagatgaatctcctaaggcatttctgaaacatgcagttctgaagtctggccagccacaccaaagagcttttcgcaagaaggcacaggccagaagcagatgctgctatgtttcctgtagagcctgcagaactgtgagctaattaaacttcttttcttatgaatta

SEQ ID NO: 275439 - DNA, 349 bp, Homo sapiens
ataattctatatttctcaaatttgagaacttataagactctcaagaatattgtcaagaatattgttactgaccagacacggtggctcagagctgtaatcgcagcattttggagaccagggcaggcagattgcttgagcctaggagcttgagaccagcctaggtaatatactgagatcatgtctctacaaaagttttaaaaaattagccgagtgtggtggcacgtgcctgtagtatcaactactcggaaggctgagggataagaatcacttgaacccgggaggcagagttgcagtgagccaaggtcatttcactgcactctagcctgggcgacagagtgaggcgccatct

SEQ ID NO: 275440 - DNA, 405 bp, Homo sapiens
gctggtcaccttggccttgccacatggccttcaggattcaggcagtggacatacactctttagtaacccgggtgggggggacctgttacactacaggtgtattaaaattcacaacattgttttaagtttaaatattttatttatgccaagatggatgtaatataactttacttttaatggaagtaaactgatcagtaatgtgttcaaatctgctttgcttgttttgagagaattgccatgccttcacaatttttcttgaccaagtaacaaccttaaataattttaattaacttcagcttactgatcttgtctttatttaaaattttggtattttattcatcatgaatttttttcattagttttaatattttaagaatatttcattaaagtatcacaaatcttgat

SEQ ID NO: 275441 - DNA, 183 bp, Homo sapiens
ggagctgcctaaaccctgtacatgaggaaggtggtggcaagaccaagatggtgggccaggggtcaggcagctcagccctgggacctactgagaagagtggaacaaggggcccctgaaacctccccaaatcgagccagggaccaggggaatccccagatgtcagtgcctgtgagaagccctaga

SEQ ID NO: 275442 - DNA, 342 bp, Homo sapiens
ttagcagccatctcatagtaaatcttccaaataattaggagggtcactgctttgtcaggacaatttataccctttctcaattagcaaattgtgtggcaatccaaagttaactggagtgttgctccccttttctattttgctcccgtgtggatgtggtgcaagaaggcctgccaaggtcagcctcccgttttcctccgtgggttggtatagacatgtttgttggccagacattgcctaaagccctgtagtcaagggtggtgtgcttgcatttgcctggctgaattaaggctcttggtgcttttctatcagtcgaatcccttctcctccatgtcttctagaaat

SEQ ID NO: 275443 - DNA, 241 bp, Homo sapiens
caccctagccatgtggaactatgagtctattaaacctctttttctttataaattacctagtctcaggtatttcttcagagcagtacgaaaatggacaatacaactatgatggtgccttcttctagtatcatttttccaatctaacatttttctacgtaattaccggcaaaacagaagggtttcaactaactctattttgggatatgttctacaaagtgaacacccatggatggctagaatg

SEQ ID NO: 275444 - DNA, 421 bp, Homo sapiens
agcacttctagaaagactgagggataaagacagtcttcctcctaaaaaagcccatgcactagtggctgcagatgtaaacaagctggaatggagctggggggaggaaaaatcaactctacctggctcattaggaaaggttccattgcagaggtgacctttgagcaggatcttgaaggaagactagaaatttgccagatggagaaggaagaaagaagattccatgcagaagaagcaacacaaagaaccagaggcaagaaagaacatatgtgctcagggagaagtacccttcttccatcaataatgatgggcacggtggctcacacctgttattccagcactttgggaggccaaggtaggaggattgcttgaggccaggagttcaagaccaacctggacaacatggaaaaaccctgtctctacc

SEQ ID NO: 275445 - DNA, 1074 bp, Homo sapiens
gcatttgcaaactctttactttcttgttgtatacattctcaagttaagccagaggtataaagttagggccttcttagggctttcctgagcatgcacatagtgctgggcatgtgcatagctctacacattgtcatggtattatagactcacaataatttgtcagagcttttcagaaccataatggacaactcttagcccagcccagcttttccttaacgtttttggttagtctgttttgtattttccactgcctcaggtacctttaagattaaatagttgcctgccattgttttcaacaaagctgccagggaaaatgttttcatattggccaagctccaaatccaatcatatgtagacagccttgcaagtggagttttctagggaaccattagaaaagtaaacttaatgacaattctctgggagtaaggctttggcgaaatgccagcccattctatcctctccagggcctgtcagcttccttggtttttactttgaatgtgttttaaggctgctgcacagctagagtataggagattggattagggtaagttaaaatcacgtagcttgatgttcttactgaatgtcagccattttctttaaatatctactccttgaattgttgcaagcctctggttattttctggaattctgaaaatgatgcttataatttttggcaattttcccattgcttttgtggaagagagaacttttcaggttttctggatttcttcatatataaaatacggggatactgcaaaggacgttcactgcagcaggatttgtaacagcaaaggtgtgagaaacaacccaaatgcccaaaataaggaaatagttttataaaatggttcatgtaggtatacatttgatggagtataatgcagatactgtcagtcatccatgtaaagagaatattttatggtgtaaaaaaaatgtttacaatgtgatacaggtgaaaaaagcagaatacaaaatacagtatgttgaagtttttaaaaatacgttttgtaagggaaatcagcaatgtcagcatttattatttctgggtgatagaatgacagttaaattatgtgagta

SEQ ID NO: 275446 - DNA, 484 bp, Homo sapiens
agccagttataagtgggaaaagagaataataaagttaatcctcttttgtgttggctatcagcactcctaatccttagcaccacagtgtcagtactttttattttagactcaaagatgttttcactgatagggccattttgagtttccacagttgaggacttaagtgtaatagactcttgaaagactattcatacagcgatcattctttcactttgcttcaactgaccaagttggaacatattaaaaatgcaaatgtaatttttacttttatctcttaggatcctgcagagtgtggggcattttccaagccatgctttgagaactgtcaaaatgctgtaaccacctctaggcgaaatgataatagtatcctgcatccacttggcacttgcagtccacaagacaaacagaaaggtaagagtctattcattttatccactgcaaatggagtgagaaaacacaaaagtgtctttttatctaaaaaaaa

SEQ ID NO: 275447 - DNA, 349 bp, Homo sapiens
agtctgtcaacttgggcgtgcaaacaaccatcctaagagcctttcttgctctgatagggagaaaaaaaggcttcgggggctaccagaggagaagaggccatcacctcggaccagcagcaacacactctgaagtaggtctcagaagacaaaaagctgaaatcaactcatgcttcctgctacacagaatccactgagaggaaaaggaaacttcaccgaaacttcagaaagctacagaaatgacatccattttcacaatcccagaaggaaagatgcatctgaagggaataaaaacagagcaatggaagagtatttgttaaaataaatggctttgacagggcaaaaaaaataa

SEQ ID NO: 275448 - DNA, 383 bp, Homo sapiens
cctccaccagcttggcgaactccttgaggacatgggctttgttttctgttccattttaccctccactgtgccttcgcagggattccccaggatcaaccatctgagcagataccttggaatgtccccagatttcagagcctcggaccagcagcaacacactctgaagtaggtctcagaagacaaaaagctgaaatcaactcatgcttcctgctacacagaatccactgagaggaaaaggaaacttcaccgaaacttcagaaagctacagaaatgacatccattttcacaatcccagaaggaaagatgcatctgaagggaataaaaacagagcaatggaagagtatttgttaaaataaatggctttgacagggcaaaaaaaataa

SEQ ID NO: 275449 - DNA, 347 bp, Homo sapiens
cctggaagagtcctcccttccaccccggatatcactgtgaacctgattccccaggatcaaccatctgagcagataccttggaatgtccccagatttcagagcctcggaccagcagcaacacactctgaagtaggtctcagaagacaaaaagctgaaatcaactcatgcttcctgctacacagaatccactgagaggaaaaggaaacttcaccgaaacttcagaaagctacagaaatgacatccattttcacaatcccagaaggaaagatgcatctgaagggaataaaaacagagcaatggaagagtatttgttaaaataaatggctttgacagggcaaaaaaaataa

SEQ ID NO: 275450 - DNA, 351 bp, Homo sapiens
aataacgccacacgtacgccccgtcccacacccacaccatccgcgttggctatcaccaggtacaccattctgagcagaaccttggaatgtccccacatttcagagcctcggaccagcagcaacacactctgaagtaggtctcagaagacaaaaagctgaaatcaactcatgcttcctgctacacagaatccactgagaggaaaaggaaacttcaccgaaacttcagaaagctacagaaatgacatccattttcacaatcccagaaggaaagatgcatctgaagggaataaaaacagagcaatggaagagtatttgttaaaataaatggctttgacagggcaaaaaaaataa

SEQ ID NO: 275451 - DNA, 797 bp, Homo sapiens
cagctggatgtctggatgaactactgaaagctgctgagtgtcctgcaagcaggccatttccaatccagaggaagaccttctagaagaagtgatgggtgggagagtgctgacatactatgtgaagctactatttggagttggacacgagtgcatgtgaccttgtgccacagcgggaatgtgagctggatgacaaatggagattggacttgtgataattggcctctgtgtcattgtgtggaagactgactggtccctttatttcctgtagcttgactaccacacaaattaatccactcaaatgttggcaagtggagcagagtcccaggacggggtctcactctgtcacccaggctggagtgcaatggcatgatctcggctcgctgccgcctccgcctccagggttcaggcgattgtcctgcctcagcctcccgggtagctggagctgcagatataatacgtaagtttggaggtggatgctttcagccattaagttcaaaagtactgccacaagggccaggcatggtggctcacgcctgtaatcccaaccctttgggaggtcaaagcaagcagatcacgagatcaggaaactgagaccatcctagccaacatggtgaaatcccatctgtactaaaagtacaaaaattagctgagtgtggtagtatgtgcctgtagtcccagctacttgggaggctgaggcaggaggattgcttgaacccgggaggcagaggttgcagtgagtcgagattgcgccattgcagcgcagcctggttacagagtgagactccgtctcccagaaa

SEQ ID NO: 275452 - DNA, 415 bp, Homo sapiens
gctgttgaattcccacaggcttgtcttccctttaaaatttatcacatggtttgtactcctttgcagatataatacgtaagtttggaggtggatgctttcagccattaagttcaaaagtactgccacaagggccaggcatggtggctcacgcctgtaatcccaaccctttgggaggtcaaagcaagcagatcacgagatcaggaaactgagaccatcctagccaacatggtgaaatcccatctgtactaaaagtacaaaaattagctgagtgtggtagtatgtgcctgtagtcccagctacttgggaggctgaggcaggaggattgcttgaacccgggaggcagaggttgcagtgagtcgagattgcgccattgcagcgcagcctggttacagagtgagactccgtctcccagaaa

SEQ ID NO: 275453 - DNA, 354 bp, Homo sapiens
gagctcggtacccccccgactagcccgacagtgggagggaggagcctaggttggcctctgcctccaccagcatgtctggttggtgactgggcaccacttgccaggcgaggataggagcagggagggttgggagcagcccagtgtgttccagtgaggacaggctgagcttgtggtgcctgtggagatgcccaggagctaggggcctccatagcagaaaccccagatggaggtaaggatttgggagtcgtcaaccaagaggtggcatttgcagtcctgaatgtggacagaaagagaaaattggaaaggaggctgatagcatggccacatgctgactttgatgatgtgggtgtggca

SEQ ID NO: 275454 - DNA, 267 bp, Homo sapiens
attcactgggtgtagtggtgtgtgcctgtggtcccagctactcaggaggctgaggtaggaggatcgtttgagcccgggaggcagaggttgcagagagctgaggtcatgccactgcactccagcctgggcaacatagtgagaccctgtcccccacaataaatagtagcccagttatgtgcacgtggcacatgtgatctcatttaatcctcacaacggacactttctattgtttccattttacaggtgagaaaattgaagttcagaggt

SEQ ID NO: 275455 - DNA, 453 bp, Homo sapiens
aggtgtgagccacagcgtccagcctcattcttccattctctcttaatttccgtatagtcaggccttctccccctcacccctacacatagcaaaactgttcccatcaaaaccaccaatgacttctactgtgttaactactacttagctctcattttacttgatagatcagcttttggcacaactgatcgtttcctttgataaatttttttactctgctttttgaaccccactcttccttggttttccttctacattactagttattccttcttaatttcttttacaaaatttctccctcttcttctaggactcaattcttcgttctttttgctttctctatctacattgactccctagtgctctcatcagttcctttggttttaaatactacctataatgctgaggattcccagatttatatctccagcccagacttctcacagtctctatata

SEQ ID NO: 275456 - DNA, 539 bp, Homo sapiens
aaaatctaatgatagagctcaaaaaaaaagagctaaaaataggagttggttcttcttagctgtttatccttctaaccttttttttaaatgatgaaggtatgtttttgttgtggaaaatacaagggcttttgttatcactcagacccagagtgaaatgtttgctttgtggttttgaataagttggcctttaataagttatttagtctctcttagcctcagttttctatctgtaaaatggtcatagcaatgtgaacatatgtgttacatcctagacttatttttctaccccagtaggttgtattgaaaggaaaatgttatatgtgtttcagcatgttttggtgaatcttcattccctttcctgccccttgttttccctcctcaaaggggagaaattagcacaaattagtatcaggattgtgcaggaaataaacatttgtgaaggttaagaaagaggaaaaggaagttatttcttcaacagattaaggatttttctacacacagttcttttgtggcattggccacatgtccattagaccaat

SEQ ID NO: 275457 - DNA, 287 bp, Homo sapiens
gttgcagtgagccgagattgtgccactgcattccagcctgggtgacaaagtgagactgtttcagtcaatcaatcaatcaatcatccatgaaggctgggtgtggtggctcacacctgtaaccccagcactttgggaggccaaggtgggcagattgcttgagaacaggagctcttaactagggagtctgaggtgggaggatcccttgagcccaggaggttgaggctgcaatgagccatgagcatgctgctgcactctagcctaggtgacagagcaagaccctatctcaa

SEQ ID NO: 275458 - DNA, 266 bp, Homo sapiens
cagcttcccaaagtgctgggattacaggtgtgagccaccactctcggccacctgtgagttcttctcagggaaacagtttcttaggaaggtggtaaatggcctgacagacttcattttttaaataggtagattatcaagaaaacaatggcattaatcacttccctagaagaagaaaggaagagtttaatctgcaagtgatcttatctttgctaaccattgtcttccctcttcactgatcactgagtttgttcttcgggcattctgtg

SEQ ID NO: 275459 - DNA, 331 bp, Homo sapiens
caaaagaataattattctagtaacaactgaataacaataacttaacaaattcttaaacattttaaatgcactatttttatttataaacttcctccaaaaaagagaaaggcaacttcactaagcttttatgctcttcaagacagactccctactttaagagaaaatagccgttttttattttaaaagttaaaattacatgtcaactcttaaaataatgaaaactaagataaatttccaagatagcttattacagttccttatgacataagcagtacaatagtgcaaaagaaaatttggccaaacttcaattccttttagcaagatcatctaa

SEQ ID NO: 275460 - DNA, 255 bp, Homo sapiens
ttgcttcggtggtctcctcctgggaggatcacttgaaccccaggagcagaggttgcagtgagccgagatcccaccactgcactctagcccgggcagcagagtgagactctatcttaaaaaaaaaagaaacaaagaaagaaaagaaagaagagggatgctgttgcgggggaggtgagaattatggttggctggggtacaggaggggtttgtctttatagccagggaaaagcagtaaaaggcatgaactgggctatt

SEQ ID NO: 275461 - DNA, 325 bp, Homo sapiens
agatagaatcaattcatttcttcactattcacttgttgtgggcgtctcctgtgcacttgttttagaggaacagagctagatgggtcctgaccccacccttaagaattccgtcctactgtggtccatttcttcctctgctgcttcctagcactgtgatcttggacaattggcctaacttccctaagcctcagtttcctcatctgtaaaatgggtatagtgatttctttaatcccctgagaaataaacagaataatgccaggaaagcatggtgacaaatacatgtcactaaatgttattgatggtagcagtgtgaaggctcagctct

SEQ ID NO: 275462 - DNA, 546 bp, Homo sapiens
ctcacttgcaaaggggttggcaagagaagtgagaagggagggaatgagcaagagagaactgggactatatctctgctgccacctgctactctctccgggcgcagcggtgccctctttacttctcagccatttctttagtgaccctgctgttgctgggtagaaaatgccactcaaaaggactcagggctcatggaaaactccctgcaatgagtcgaaaggctcatgttgtttgatctaaagagaactattataaagtgacccaaaaaacctcggatccatatgtgtccaggctgcgaatgagaggagcccattatctggaatctttcagacttttacacaatacggtggagctctgtcatgccagataatttgtgctggccagtctatatgttattttcaaaaaatagaaaagaaagatttttttccacctatacaacaaatcgcatataattaatgactagttatattttatttggagaaatagcagttttacaaatatattttgtaatgatgttttcagtgatcgggatcctcaacacagtagtg

SEQ ID NO: 275463 - DNA, 163 bp, Homo sapiens
aattgtctgtttaaatcttttgtatttttctactgaaattttttcttactgatggaacatttccttccttccttccctccctccctctctccctcccttcctcccttcctttcttccctccctcctcctctccctccctctctccctccttccctcctctcct

SEQ ID NO: 275464 - DNA, 366 bp, Homo sapiens
tgagctgagattgtgccactacactccagcctgggcgacagagcaagatccgtctcaaaagagaaaatgttgtctttgccaggcagtgtggtaggcccaagagatatagcaattagagttgactaagacagtgtccctatcctgttcttgagctccagttctagtgggagttcttgagcttggtaagatgatgtgagtccatcagtggcccaggactctaagcatgtatgttttagtcccagctgtaaatgaggattccattaaccccatcttctccaatgtatggaggatgcaagaagctttaaaatgtccttttctcacagtgacttcccttgaccatgccttagtttcctcagccagaaattg

SEQ ID NO: 275465 - DNA, 343 bp, Homo sapiens
gagccaccgtgcctggcccacagctatttcttgaaaatgagttcaacaatgtggaccttctgtgtgtgcaagggaatatgccttatattcatcctctattctatcacctgacaagaacgaaacagagttcaatggtctaaatttgcattcacgtgcagggttcctagaaatgatgatcctgcataattgttgtggaaatcatttgtcttctattggattcatgaaggcttaaacacatggtcaggggatcagactcactaatagctcttttatgtttcttccacttattgagataaaatctttttttttttttttgaaacaaggtttcactctgtcacccagg

SEQ ID NO: 275466 - DNA, 540 bp, Homo sapiens
cagtagatgctcccattcagaaaggacaggaattaagcatagaggaggcctctccattttgaactgtttcagatcctttggacttccttgaaagctctatgggtttcccatgtaccagatttgggactgctctattaaacaaaagctgaaatcacagtcagacaggcctcacatctttggcaaggtgtcggtgctatgggacaatgcccataagaatctcagaagcctttttgtccagcgtggagactccactaggcatccccttaacacttcagaggttctaaagtttgggtcttttagccaaacttttgattcgaactttactctgagtttatttttttattttgagacatgtgctggctggagagactgaagatgtaaaataattttatttccaagctagcaagtcctgacttgtctatatttcctctgaattacgcttgcaatgagccgagaccacgtcattgcactccagcctaggtgtcagagtgagactatctccaaaaaataaagaataaataaaataaaaccaaaaaaaaa

SEQ ID NO: 275467 - DNA, 541 bp, Homo sapiens
taaataaaagtaaagagacatacatgcgtaattgttcagtgatgtggatgaagggcagggacagcacagatgcctgtgatttcaaatggttagggaggcctcctagaagtagggctgtctcaattgcccctgactggtttgttaagttggagattggggggaaggcattccagtgggaggcggcaaggaagcatagatagtttcagaggctggactctcagtgtggaaggattatggtggccagtggacttgcttaagattgaattttttttttttttttttttgagaccgagtctcactctgtcatccaggctggagtgcagtggcgccatctcggctcgctgcagactctgcctcccaggttcacaccattcttctgcctcagctacttgggaggctgaggcgggagcaggagaatcgcttgaacccaggaggcagaggttgcagtgagccgagaccacgtcattgcactccagcctaggtgtcagagtgagactatctccaaaaaataaagaataaataaaataaaaccaaaaaaaaa

SEQ ID NO: 275468 - DNA, 366 bp, Homo sapiens
gattctatctaattttagatagaaactattggtttatctatgtccaggacattttatttatgaggataaccaattttcattccttatttaaatgtgatatccttgtatttttaatttttggaactaaatcattttcatttcatttggcatttattaacagagtcattaaaatatagtgttatatttcaactatattagaaaaatcagcaatttgaatatcactagtaatattactattttgctgtttccaaaagttaaacctaatagttgtcaattaaaataagaattttaaaaatatagtgcaagatttttcaaagacaaagttaaaaaataaggatacttataaatgaatttgatgttgtattc

SEQ ID NO: 275469 - DNA, 355 bp, Homo sapiens
aagaaccttaaatattattgatatttttggataaagacagaattttttaaatgatcaaataaatgtgctatctattctcttgtccaaggcctatgcttattactaaacctcagcatctagaacaacttctgacacacagtaagaactcagaaaaaatgttttttcaagcaggacacagtggctcaaacctgtaattccagaactttgggaggctgagatgagaggatcacttgagcccaggagttgctaaaaggttggtgtgaaagtgatgggggtttgggtaggtggtagattggtgcctgattgccttgtgctgcaagggtccagacagtctaactactcctcatagactttg

SEQ ID NO: 275470 - DNA, 355 bp, Homo sapiens
gggattatagatgtgagccactgcacccggccaaaaatagatttaaattgcatatatcctttaatttggcaattcttcttctaatactgtattctaaggatatatgagcagcattgctcataatagcaaaagtttgaaaacagcctaatggagagctgtttagataaatcatgggaaaagtcgtgctgccccaggctcttctggagctcagcactgtgtgggaagctgctgggtaagttgctcttgggtgcaaggtgtagtaggctgaataatgcccccaccaaatatgtccatattctaatccccagaagctgtgaatcttattttatttttatttttgattagagacagtgtc

SEQ ID NO: 275471 - DNA, 685 bp, Homo sapiens
ctgtcggcggtgcactgactgactgctactgatcgctatacgtatttatccataccaattccaaaatgcaggttattttgaagagcatattttacaatatttagagatttattcgattttcagttaaatacacataatcaagcactcttcaagaaagatgacatctgcaacacaaaggataccaattcaaaggaaaactaagaaggtcaacagagaggaggacattcaggctctataattagcagataaaaaatatacacatttctgccaaaaaagatccagagttgcctgagactatgaacaattcccctagggctgagagacttctggaagcctgccacatcaaagaacaatatggactaatgaatagtccttcataaagtacaggctattggaaaagtcccagaacagatgaggagggtctgctctagggcagggttaaggggactgaagaggagaaaacagaatggagaaaacagaagaaaagaaaatctaaaaataaacttatctaattcatgtgtgtaaacaactcaagcaactgctgtaggatgtacatttatcttctatttgtagaaatatttcatattaataacagtgccaaaaaccctaacaacgtatctctctaaaaggggcaggagaaatagaataaacaactgaataagccaagaccacacataacaagggt

SEQ ID NO: 275472 - DNA, 342 bp, Homo sapiens
agaaatggtttagagtaaacattttattataaaatctgcttttctcataacttgtcatgtccagctttggatactgtaacacacaggtttgcctggttctttcttaagggtgcgtgtactgcatttcttagtgcacgtggttgcctaggttttctgtattttcacaattatgattaatattgcataatattattctcatgcatctatgctcaagttatgcatatccttccacagcaaaaatttctggaagtggacctgctaggtcaagagcaatgagcactgaataccttgatggttattgttaaaggttcttcacatcggacgcaccagcttagactctcg

SEQ ID NO: 275473 - DNA, 1328 bp, Homo sapiens
cacagagccaaaccatatcagtggctgtaccataatttagttattgctcagtggttgaacatttaggttgcctctagatttttctatttattagaaacattcagggtttctagatttttcagttttataaggaacattccagtgaacactttcgtggaagacttttgcaggaatttcaacacctaattttgttacaaccctaactttctccatttgttttgatgagtagtaaatttttattttgaaaaagtcttaaggcaaaataaatgtaatgcacttatatttcaaaaatataattgccatatactacctataaaataggagtatttcaggaaatcaaacaaaaacaatgatttttctcaagcataaagaactatgcctggtatgacctgctccttttgaattattaaagtataaaaagttgaccagtatttactgaatgagatttattgcctgccttgattgtaaacacctttggctgatgctgggaattggcacaaatgtgaggatggctgtgtttattttgctggttgggcacaatgaactcttattaactcttattttagaataagaactgaatcccaccttcccttctccctccatcatggaaaaaccacagagttcagcaaaatcatgcaggaaagataatttcccttttagtaacctttggtcttgcttcctgtttcttttctgcttcctacttcctgttaacttccagcagcctccactttgcaagctattgtctcctgtctctcccctagaacagttctcatgctttcaaaaaatctcccaccaccacctctggcattgccaccacacctattcttctgccagagttttctaaaattacacattcctttcccaccttctttcccattaaaacactcaggagggattccttcttggggagatgattgaaaacaaagcgaggctttatctaagatgaagagcaaggtatgagtggcaggtgcaagtgactgacaggtaggaccatccagggtattttaaataaggatattgctaactcaaataaatgcatcctttatagttaagaagtgctagagaaatatatgaagggctttctattggtctaggctttctccagtctaggctgactttcccacttatcaagagagccagcattggcagattgtgaccaccctcttatgaaggcataaaactcccagcaggactcctgacatagcaagaaggaccttaactttgggggacttgggctccagatgaaaggatgctttaaggcctaaactacattgcatgtaactaaggctattttctctacagtgaaggggaattcctgaaaaaaaaaa

SEQ ID NO: 275474 - DNA, 451 bp, Homo sapiens
acaagatactcaaagagctggaagaatttgtgaagcagaagaaatctgaaaccacagacactggatctgatctgaggcctatgttagaaccaaagggagggatcctggaggccggttctcctagttaaagtgatgggagcttggcagacggcatggagcactcaagggcaagcagcaatcctgcttggctacttccaaaaacatccactgcctacagcattagccatggggcactgatgcctaagaataacctgtatcaacatccacctgcccaaatagctaatgatgagacacattcaactacctgttttagccctggtaggcctgtttggggcaaaggtgaattgaatgttctggaagagtcccctgactcttggacaaggctgtttttcaacacataaggttggtcaagagtaccttatgaaactctcacatgcccagggctccaacc

SEQ ID NO: 275475 - DNA, 589 bp, Homo sapiens
ccttacatttgtatggtttctctccagtatgaatcctcctatgtctttcaagatgtgatttgcgactgaaaactttgtcgcattcttcacatctgtaaggtttctctccagtatgcagtctatgatggtacacaaggtgtgatgtctgactaaaggtcttgccacactcattacacttataaggtttctctccagtatgacttctatgatgacatgcaagggttgctttttgatcaaaaaccttgccacattcattacatgtgtaatgtttgtctcccctgtgaattctagtatgttttgccaggtgtgaatcatgcttaaaagccttgtcgcaaaccttacatttgtatggtttctctccagtatgaattatcctatgtatttcaagatgtgatttgcaactgaaaactttctcacattcttcacatttgtaaggtttctctccagtatgaattctcctatgtcttcgcaaatgcaaatgaaatcttgattcaagctgacctttaataggcttgtttccagcatgcctttgatcatatcggtctgtactactagtcaacttttttatttctgtcatagctgtttcatg

SEQ ID NO: 275476 - DNA, 444 bp, Homo sapiens
agacacagagagacaatctactgcacacatgcctgaatcagctattggaaaaggcgatctatctaataacatggagagaacaaaagacaatagaggtaggcccaagtgtctttgaagtggagaacacaagtcaacctctattttatatgaaaaaaaaaatgggctgggcacggtggctcactcctgtaatccaaatactttgggaggccgaggctggcggatcacctgaggtcaggagttcaagaccagcctgaccaacatggtgaaacgccgtctctactaaaaatacaaaaattagccaggtatggtggcagcgcctgtagtcccagctactcaggaggccgaggaaggagaattgcttgaacctggaaggcggagtttgcaataagccaagatcacaccactgcactccagcctgggtgacagagggagactcagtctcaa

SEQ ID NO: 275477 - DNA, 345 bp, Homo sapiens
gaaactagtaccatttgatcggacatgcagctataccacagtatgacacacacatatttatcaccaagagaaaagtggctttttaaaaatgtgttagctataagaaaagataaccagctttctgggagctctaaatatatacatatctagggaatgatttaactatttaatcacagatgtctaattttaagaggcaactcacttgccaaattatagtaatagtgcttcaccagtgtggttagctcttggtgggggaggataagggtggaatttacaaggtgaagcaggggtttttttgattgcttgcttttttttctctttaaataagttaaggccaatcccatc

SEQ ID NO: 275478 - DNA, 569 bp, Homo sapiens
ccagtttatcctggtggaccaatatctggcccagcctggggagcagttcctgccaccccttctctcttctggagaacatagctatctagaggcaagtcaagaacttggatattcaggccaggtgaagtgcctcacgcctgtaattccaacactttggaaggaggccgagacctagagatcacttgaggtcaggagttctagaccaccctggccaacatgacgaaaccccgtattctactaaaaaaatacaaaaaattatctgggcatgatggcacacacctgtagtcccagctactcgggagtctgaagcaggagaatcgcttgaacccaggaggtggaggttgcagtgagctgagatcacaccactgcactccagcctgagcaacagagtgagactccatctcaagaaacaaaaacaaaaaaagaacttggataggcaagtaaggtatttgtgcagtgtctagagagctaaactcccctggtttcgtgcccattttgtgatttgcatctaaaattgaaccccagtgtagccactaccagctccaataacatgaattcatacccccatc

SEQ ID NO: 275479 - DNA, 1238 bp, Homo sapiens
cctgccggccccgcggcctgggggccagggagacccagacaacagagggcaggagacgctggagggtcgggcgcaccgcctgcccaggggacacggggcacactccagggggatccaccagccagccacagaacagtaggagggtgtaagtactgcgaccgctccttcagcatctcttcgaacctccagcggcacgtccggaacatccacaacaaggagaagcctttcaagtgccacctgtgcaaccgctgcttcgggcagcagaccaacctggaccggcacctcaagaagcacgagcacgagaacgcaccagtgagccagcaccccggggtcctcacgaaccacctggggaccagcgcgtcctctcccacctcagagtcggacaaccacgcacttttagacgagaaagaagactcttatttctcggaaatcagaaactttattgccaatagtgagatgaaccaagcatcaacgcgaacagagaaacgggcggacatgcagatcgtggacggcagtgcccagtgtccaggcctagccagtgagaagcaggaggacgtggaggaggaggacgacgatgacctggaggaggacgatgaggacagcctggccgggaagtcgcaggatgacaccgtgtcccccgcacccgagccccaggccgcctacgaggatgaggaggatgaggagccagccgcctccctggccgtgggctttgaccacacccgaagcatatgcaatgatgctgtcctttccgaaggaaactcctcttcaaaaccactccaaggggtatcttcatggaacgccatgaggttgagaaggtcactgggcagcccaggtacgggaagtcttggaacatattaacaccccaatataagcacaacctttgaaggggatagtgaagaccagggggggccagatggcctaaaagaggaagggaccaacacagagaaaaggaacacgaagacggggacgggggccaccggagtgaaaaccagtataccaaggtgagtagtgcacaaaccaccagaaaaacactcacaccgacgcaggatcatcaccaaatatcacatgaggacaattggatgcgaaagagacatcaaagaagaagagagaaactcaaccacaccagaaaggtagtaaaaaactgatatgatggagagcgagggagtgaacacgagagacaaagagcgcatcaaagaaatgtgcacagggaaaagacagaagaaagtggcaaacgaagg

SEQ ID NO: 275480 - DNA, 888 bp, Homo sapiens
gaagatagtgtgtggctgcttctggactcaaggaggaggagagagattccgcgagccgacaccatgcgatccaaggcgagggcgaggaagctagccaaaagtgacggtgacgttgtaaataatatgtatgagcccaaccgggacctgctggccagccacagcgcggaggacgaggccgaggacagtgccatgtcgcccatccccgtggggtcaccgccccccttccccaccagcgaggacttcacccccaaggagggctcgccgtacgaggcccctgtctacattcctgaagacattccgatcccagcagacttcgagctccgagagtcctccatcccaggggctggcctgggggtctgggccaagaggaagatggaagccggggagaggctgggcccctgcgtggtggtgccccgggcggcggcaaaggagacagacttcggatgggagcaaatactgacggacgtggaagtgtcgccccaggaaggctgcatcacaaagatctccgaagacctgggcagtgagaagttctgcgtggatgcaaatcaggcgggggctggcagctggctcaagtacatccgtgtggcgtgctcctgcgatgaccagaacctcaccatgtgtcagatcagtgagcaggtaatgaaagtgaaattggagtgaaggaaaattgggcttgaggcgcatagaaggacggtctttccgtccccttctggggctcagatttgcagagtgtgtccttagtcgtccgttgggaagctgacgggcaggggcaccgcggggctgggccagggctgtgcttttgtgagatgcaaactatagtaatgaagggcccagattttttttatctaagaaataaatgtttattagaacttttgaactaaacttaag

SEQ ID NO: 275481 - DNA, 8711 bp, Homo sapiens
  misc_feature (1663)..(1663): n is a, c, g, or t
  misc_feature (1964)..(1964): n is a, c, g, or t
  misc_feature (6061)..(6061): n is a, c, g, or t
  misc_feature (6380)..(6380): n is a, c, g, or t
  misc_feature (6390)..(6390): n is a, c, g, or t
gaagatagtgtgtggctgcttctggactcaaggaggaggagagagattccgcgagccgacaccatgcgatccaaggcgagggcgaggaagctagccaaaagtgacggtgacgttgtaaataatatgtatgagcccaaccgggacctgctggccagccacagcgcggaggacgaggccgaggacagtgccatgtcgcccatccccgtggggtcaccgccccccttccccaccagcgaggacttcacccccaaggagggctcgccgtacgaggcccctgtctacattcctgaagacattccgatcccagcagacttcgagctccgagagtcctccatcccaggggctggcctgggggtctgggccaagaggaagatggaagccggggagaggctgggcccctgcgtggtggtgccccgggcggcggcaaaggagacagacttcggatgggagcaaatactgacggacgtggaagtgtcgccccaggaaggctgcatcacaaagatctccgaagacctgggcagtgagaagttctgcgtggatgcaaatcaggcgggggctggcagctggctcaagtacatccgtgtggcgtgctcctgcgatgaccagaacctcaccatgtgtcagatcagtgagcaggtaatttactataaagtcattaaggacattgagccaggtgaggagctgctggtgcacgtgaaggaaggcgtctaccccctgggcacagtgccgcccggcctggacgaggagcccacgttccgctgtgacgagtgtgacgaactcttccagtccaagctggacctgcggcgccataagaagtacacgtgtggctcagtgggggctgcgctctacgagggcctggctgaggagctcaagcccgagggccttggcggtggcagcggccaagcccacgagtgcaaggactgcgagcggatgttccccaacaagtacagcctggagcagcacatggtcatccacacggaggagcgcgagtacaaatgcgaccagtgtcccaaggccttcaactggaagtccaacttcatccgccaccagatgtcccacgacagcggcaaacgcttcgaatgtgaaaactgcgtgaaggtgttcacggaccccagcaaccttcagcggcacatccgctcgcagcacgtgggcgctcgggcccacgcctgccccgactgcgggaagaccttcgccacgtcctccggcctcaagcagcacaagcatatccacagcacggtgaagcctttcatatgtgaggtctgccacaagtcctacacgcagttctccaacctgtgccggcacaagcggatgcacgccgactgccgcacgcagatcaagtgcaaggactgtggccagatgttcagcactacctcctccctcaacaagcaccggcgcttctgcgagggcaagaaccattacacgccgggcggcatctttgccccgggcctgcccttgacccccagccccatgatggacaaggcaaaaccctcccccagcctcaatcacgccagcctgggcttcaacgagtactttccctacaggccgcacccggggagcctgcccttctccacggcgcctcccacgttccccgcactcacccccggcttcccgggcatcttccctccatccttgtacccccggccgcctctgctacctcccacancgctgctcaagagccccctgaaccacacccaggacgccaagctccccagtcccctggggaacccagccctgcccctggtctccgccgtcagcaacagcagccagggcacgacggcagctgcggggcccgaggagaagttcgagagccgcctggaggactcctgtgtggagaagctgaagaccaggagcagcgacatgtcggacggcagtgactttgaggacgtcaacaccaccacggggaccgacctggacacgaccacggggacgggctcggacctggacagcgacgtggacagcgaccntgacaaggacaagggcaagggcaagtccgccgagggccagcccaagtttgggggcggcttggcgcccccgggggccccgaacagcgtggccgaggtgcctgtcttctattcccagcactcattcttcccgccacccgacgagcagctgctgactgcaacgggcgccgccggggactccatcaaggccatcgcatccattgccgagaagtactttggccccggcttcatggggatgcaggagaagaagctgggctcgctcccctaccactcggcgttccccttccagttcctgcccaacttcccccactccctttaccccttcacggaccgagccctcgcccacaacttgctggtcaaggccgagccaaagtcaccccgggacgccctcaaggtgggcggccccagtgccgagtgcccctttgatctcaccaccaagcccaaagacgtgaagcccatcctgcccatgcccaagggcccctcggcccccgcatccggcgaggagcagccgctggacctgagcatcggcagccgggcccgtgccagccaaaacggcggcgggcgggagccccgcaagaaccacgtctatggggaacgcaagctgggcgccggcgaggggctgccccaggtgtgcccggcgcggatgccccagcagcccccgctccactacgccaagccctcgcccttcttcatggaccccatctacagggtagaaaagcggaaggtcacagaccccgtgggagccctgaaggagaagtacctgcggccgtccccgctgctcttccacccccagatgtcagccatagagaccatgacagagaagctggagagctttgcagccatgaaggcggactcgggcagctccctgcagcccctcccccaccaccccttcaacttccggtccccacccccaacgctctccgaccccatcctcaggaagggcaaggagcgatacacgtgcaggtactgtgggaagatcttccccagatcagccaatctcaccagacacctgaggacgcacactggggagcagccgtacaggtgtaagtactgcgaccgctccttcagcatctcttcgaacctccagcggcacgtccggaacatccacaacaaggagaagcctttcaagtgccacctgtgcaaccgctgcttcgggcagcagaccaacctggaccggcacctcaagaagcacgagcacgagaacgcaccagtgagccagcaccccggggtcctcacgaaccacctggggaccagcgcgtcctctcccacctcagagtcggacaaccacgcacttttagacgagaaagaagactcttatttctcggaaatcagaaactttattgccaatagtgagatgaaccaagcatcaacgcgaacagagaaacgggcggacatgcagatcgtggacggcagtgcccagtgtccaggcctagccagtgagaagcaggaggacgtggaggaggaggacgacgatgacctggaggaggacgatgaggacagcctggccgggaagtcgcaggatgacaccgtgtcccccgcacccgagccccaggccgcctacgaggatgaggaggatgaggagccagccgcctccctggccgtgggctttgaccacacccgaaggtgtgctgaggaccacgaaggcggtctgttagctttggagccgatgccgacttttgggaaggggctggacctccgcagagcagctgaggaagcatttgaagttaaagatgtgcttaattccaccttagattctgaggctttaaaacatacactgtgcaggcaggctaagaaccaggcatatgcaatgatgctgtccctttccgaagacactcctctccacaccccctcccagggttctctggacgcttggttgaaggtcactggagccacgtcggagtctggagcatttcaccccatcaaccacctctgacgggctgggcagccgggggccggtggccagagcgagggcaccagccacgaaggacggaggcgggcggggccccggagaaccctgtccctgcgtgtggccactcctcagcatcctccccacccaccatggttcattccgacttttccaatggaaactcagatcccaaaagtccctaaagcagtcgtagagtctcaccatctccaaggattggtcttgagaacactgttcagtgacggccatgcaggtggccgtccaaagacagccaacggagctgcctcgcagaatcagccagtgggcaggtggacgctctgctgagacagaagctggtggccactgccgggtgcccgcgtggggtcgcggaagggaatggatagactggtgtgctcaaaagagagagatcactcaaatgatttttataatgaaatgacaagaataacccttttggtaaccgtattgactgcagagtctatttaagcatgtggttttaaaaatagacagtattttttaaaaatcaaaaaatgacttgcaaattgttttttaaaagtaattttgcattgctttgaaatttgagctcatttgcaaacccgagtctgcctgggaacccgcactgtgcctgggtgtattctttatactgtagataatggagaaattttctatctctgtccctatttgtataagccaaggtgatgctgggtgccccgaggcagaacaagaggcgcggggccacacccgtgaaccatgcagacggccgaagaagtcttaggcagggcgccctgggctgcaggcctgcccgaggctgggatgggaagtgtgcctgccctcgtgtgacatggaattggtgtcaggaccgccacgtggccttcagaggaatccacaggtccccacccaagatccctcaattatatggggaagtcgagggcctgtggcttggatccgccatgcagagatgtggccgggcacccatcttccttccctcctctgtccctgcctcggccaccccacgcgggaacccagcgccgtcctctgaaggcagggccttggccacgtcctgggtctcccacctcccacctgaccccagcggctccggtgtcctccacgtggctgccctggggagcaatcccagcggatcgctccgggccaccaagccgcacctgtgcctgagactccggatggacgacacagtcgtcacgtcgctcttcctgcgggttcttggcgagacacagcttgagaacagaagggcgtcgggggaacctgccgcaaggagcagagacagcacagccccccgggcccagccgcctccctctcttgggacgcaacttcttccccactcggatgggctttaaattattcccataggggccaatttcaaataataatttttttccctgatggaatttaccttaatctgtatataacttgtaattttttctaattcatttcttttcttattttatttcctccttaacagtatttttggcattagacattcttattgtgaagaaataatgttaatataagtatctggtgaaggaccaaaaccgtgtgataaggttgtgtgtcgtgtgggagtggggcgattttttatgtgccaaatacccccgtcccccccatgaatcctgctgtccctgctgccgtttaccagacaatcatatgtttttgttaaatttgcgtttcagttacatttgcatttaagacaagtgttctatttatttcttgtattgtttggaagaaaaaatgatgatagagtcccaaaaagaagagaaaaaaaatgcccaagttgccctttaaaaaaaaagagcgtaaatacaaacaggagtggtgcaagccgccttggtgtgggtttgtgtcacgcgtggacatctcctcaggctttgtgtcacgcgtggacatctcctcaggctgtccccagcggtgacgggaggtgtcctggctgctccaggacaaaagacaatcgtctctgtgggtgccgggcggtccaggcttgcactgaagacgtgccacggggaggctcctgcaggaggctcaacccgacggatcacagtgaaagggattcctcccacgccagatctgcacaacgaggcaagacaggacccacctgtgcgtgcgctggggccatggggtggccccccccggggcagcgggggagctgcctgcagaagagccagcnggcgtgtcgggaaggatccaggatctgcaaacacaaccgctcaggccttctcacgcgtttccacaacatcccctgggtcagacccaccaggtaccccgtaggaatttccagtttcccttgatctagatgggattcttataaaaattcaacctcagacataaacaccccatttctgtaaacccaaattatatggtttcttctgcgaaagagtaaggtgtgtgcttttttttttgcaatatggccccgtctctctgaagtgggacattcggacggatggagccctcagcgtgtcttttcagcaggagcagaaccgatgagngccgcccttnccgttggtctccggatcccccagtcccatcccgccgttttcggctgtcttcctaaccgtcctgtcttctcttggcgctctttccttccacctttcccaagagtcctggttgcacgttttaagtcatatattttcgtccccctgaaaatgatggcaagcccagtttctcctgagcattcagacccccaggccccagcacttggcgttttcaggaggccctgttcttagagcccctgacaaaggcagcacttatttcctgggctggtgcgccccaaaacacggccccgacacttagtgtggccccaggccccagcgagcctcgccctcccagttttgctctgcccagcagtgttggtgcccagagatgacaagggccagggagcctggcccgggtgtgagaattcagagattctggcctccagctgtcaccacaccgtaacggggccatgtaactgtgcagcatggacagggatgcgacggggcagctggctgtgtccatggccaggtggccagggtcagggctgcaagccaggggtccagggcccttccgttcagcccaaatgctgccccaatgctaactccttggattgtcaacccccatcccccaaatggaaattccgaaggaggcctcctcgcacctgccctccgctgctcctcagaccccagcccccagcgagccgacgtccccacccgttcctgctctcatccccaggttgggcacgtggggttcctcctctgtgggcctggcagacccttcatgagtgggacccaagatatcactgacttcaacccagaggatcgagcccctgcaccctgcctggggccctggggtgtggagcagtggctggggtgggcgtggtgtggcctgagagactgcccagctggagaggccttcctttacaaggccacgcgtgcagctgtcccatccagaccccgactggccaagacctccacgtccccagagtccagccctggaaattccaagggccctggcgtcctctgccttccccgcttccccgtgagcgtctgcaaaacacttgcctgaatacatatcacgtattttagactcgaagcctcgaagcactggattgtggtcccctgccccctctgtcccgtccccctgcccaagtgactgaaacctactgagctatattcactgtgctgtcctagggggagggagagcagagctcgcccctgcactgcagccttgtgggggagggcaaggctctcctcccagccagggacgccaggacatagctgctcctggtcagtggaggtcagccgggtatcaaaagccatgaaactgtgtctctgtagcaatgagtgatactgtgacaaaaccatccttgcattcttcctagaagagttcctctgctccttccattccatttttgtgtttgttttgttcttttctgtcactgatccgtattaccacttttggaaaaaaataaataaataaataaataaaaggcagcttgagtttccaaacgtgtgattcacttgtgaacaaaagtcattctaacaattgccttcagcgtcacgtgcattgccactgcgctttcggcacgagggatgctgagccctggtgtcagagtcgtaatttaaagcgtgtgtgtatatggactttgtcccttaaggtcgatataaagaatcctcgcagaatcacagacctgtgccgcccgccaccttctgccattgttacattacagatttggtttagtttcgttttgttttgttttttctcttagaactgtatagtattgaaaaagaaatcaaatgtaaatgtctggttttcatataatgtttaaaaagaccattgagaaggaggctggcgctcgccccatgtcccccttgattgtaaattgcttctgttctgtttataagtaaactgtgcatgactcctgcttagcggtcattatcgtgtctgttggtgaaatttttattaaaaggaaaattctgtagatgcacttattgaatatgtgattaggatctacgtctgagactaggagtcctgaactgctgacgcgaaagaggcgcagttcccaattaatacggaaatcgctgtgggagaagaatgaaataagacgtgaagtgtaggaaatcatgaaaagaacaattttgcaaattgcattctgatgcttgtgatgaacacaaatgtacttgtgtagagacatttccttaagagaaagcctaggagaagccgatttggaggttaatgctgtagaataggactgtataccaaatgtaatctttccaatgctccaatgaatttatacatgagattgatatgcaataaatctgtgtgcttttctaagcctcggt

SEQ ID NO: 275482 - DNA, 8536 bp, Homo sapiens
  misc_feature (1663)..(1663): n is a, c, g, or t
  misc_feature (1964)..(1964): n is a, c, g, or t
  misc_feature (5886)..(5886): n is a, c, g, or t
  misc_feature (6205)..(6205): n is a, c, g, or t
  misc_feature (6215)..(6215): n is a, c, g, or t
gaagatagtgtgtggctgcttctggactcaaggaggaggagagagattccgcgagccgacaccatgcgatccaaggcgagggcgaggaagctagccaaaagtgacggtgacgttgtaaataatatgtatgagcccaaccgggacctgctggccagccacagcgcggaggacgaggccgaggacagtgccatgtcgcccatccccgtggggtcaccgccccccttccccaccagcgaggacttcacccccaaggagggctcgccgtacgaggcccctgtctacattcctgaagacattccgatcccagcagacttcgagctccgagagtcctccatcccaggggctggcctgggggtctgggccaagaggaagatggaagccggggagaggctgggcccctgcgtggtggtgccccgggcggcggcaaaggagacagacttcggatgggagcaaatactgacggacgtggaagtgtcgccccaggaaggctgcatcacaaagatctccgaagacctgggcagtgagaagttctgcgtggatgcaaatcaggcgggggctggcagctggctcaagtacatccgtgtggcgtgctcctgcgatgaccagaacctcaccatgtgtcagatcagtgagcaggtaatttactataaagtcattaaggacattgagccaggtgaggagctgctggtgcacgtgaaggaaggcgtctaccccctgggcacagtgccgcccggcctggacgaggagcccacgttccgctgtgacgagtgtgacgaactcttccagtccaagctggacctgcggcgccataagaagtacacgtgtggctcagtgggggctgcgctctacgagggcctggctgaggagctcaagcccgagggccttggcggtggcagcggccaagcccacgagtgcaaggactgcgagcggatgttccccaacaagtacagcctggagcagcacatggtcatccacacggaggagcgcgagtacaaatgcgaccagtgtcccaaggccttcaactggaagtccaacttcatccgccaccagatgtcccacgacagcggcaaacgcttcgaatgtgaaaactgcgtgaaggtgttcacggaccccagcaaccttcagcggcacatccgctcgcagcacgtgggcgctcgggcccacgcctgccccgactgcgggaagaccttcgccacgtcctccggcctcaagcagcacaagcatatccacagcacggtgaagcctttcatatgtgaggtctgccacaagtcctacacgcagttctccaacctgtgccggcacaagcggatgcacgccgactgccgcacgcagatcaagtgcaaggactgtggccagatgttcagcactacctcctccctcaacaagcaccggcgcttctgcgagggcaagaaccattacacgccgggcggcatctttgccccgggcctgcccttgacccccagccccatgatggacaaggcaaaaccctcccccagcctcaatcacgccagcctgggcttcaacgagtactttccctacaggccgcacccggggagcctgcccttctccacggcgcctcccacgttccccgcactcacccccggcttcccgggcatcttccctccatccttgtacccccggccgcctctgctacctcccacancgctgctcaagagccccctgaaccacacccaggacgccaagctccccagtcccctggggaacccagccctgcccctggtctccgccgtcagcaacagcagccagggcacgacggcagctgcggggcccgaggagaagttcgagagccgcctggaggactcctgtgtggagaagctgaagaccaggagcagcgacatgtcggacggcagtgactttgaggacgtcaacaccaccacggggaccgacctggacacgaccacggggacgggctcggacctggacagcgacgtggacagcgaccntgacaaggacaagggcaagggcaagtccgccgagggccagcccaagtttgggggcggcttggcgcccccgggggccccgaacagcgtggccgaggtgcctgtcttctattcccagcactcattcttcccgccacccgacgagcagctgctgactgcaacgggcgccgccggggactccatcaaggccatcgcatccattgccgagaagtactttggccccggcttcatggggatgcaggagaagaagctgggctcgctcccctaccactcggcgttccccttccagttcctgcccaacttcccccactccctttaccccttcacggaccgagccctcgcccacaacttgctggtcaaggccgagccaaagtcaccccgggacgccctcaaggtgggcggccccagtgccgagtgcccctttgatctcaccaccaagcccaaagacgtgaagcccatcctgcccatgcccaagggcccctcggcccccgcatccggcgaggagcagccgctggacctgagcatcggcagccgggcccgtgccagccaaaacggcggcgggcgggagccccgcaagaaccacgtctatggggaacgcaagctgggcgccggcgaggggctgccccaggtgtgcccggcgcggatgccccagcagcccccgctccactacgccaagccctcgcccttcttcatggaccccatctacagggtagaaaagcggaaggtcacagaccccgtgggagccctgaaggagaagtacctgcggccgtccccgctgctcttccacccccagatgtcagccatagagaccatgacagagaagctggagagctttgcagccatgaaggcggactcgggcagctccctgcagcccctcccccaccaccccttcaacttccggtccccacccccaacgctctccgaccccatcctcaggaagggcaaggagcgatacacgtgcaggtactgtgggaagatcttccccagatcagccaatctcaccagacacctgaggacgcacactggggagcagccgtacaggtgtaagtactgcgaccgctccttcagcatctcttcgaacctccagcggcacgtccggaacatccacaacaaggagaagcctttcaagtgccacctgtgcaaccgctgcttcgggcagcagaccaacctggaccggcacctcaagaagcacgagcacgagaacgcaccagtgagccagcaccccggggtcctcacgaaccacctggggaccagcgcgtcctctcccacctcagagtcggacaaccacgcacttttagacgagaaagaagactcttatttctcggaaatcagaaactttattgccaatagtgagatgaaccaagcatcaacgcgaacagagaaacgggcggacatgcagatcgtggacggcagtgcccagtgtccaggcctagccagtgagaagcaggaggacgtggaggaggaggacgacgatgacctggaggaggacgatgaggacagcctggccgggaagtcgcaggatgacaccgtgtcccccgcacccgagccccaggccgcctacgaggatgaggaggatgaggagccagccgcctccctggccgtgggctttgaccacacccgaaggcatatgcaatgatgctgtccctttccgaagacactcctctccacaccccctcccagggttctctggacgcttggttgaaggtcactggagccacgtcggagtctggagcatttcaccccatcaaccacctctgacgggctgggcagccgggggccggtggccagagcgagggcaccagccacgaaggacggaggcgggcggggccccggagaaccctgtccctgcgtgtggccactcctcagcatcctccccacccaccatggttcattccgacttttccaatggaaactcagatcccaaaagtccctaaagcagtcgtagagtctcaccatctccaaggattggtcttgagaacactgttcagtgacggccatgcaggtggccgtccaaagacagccaacggagctgcctcgcagaatcagccagtgggcaggtggacgctctgctgagacagaagctggtggccactgccgggtgcccgcgtggggtcgcggaagggaatggatagactggtgtgctcaaaagagagagatcactcaaatgatttttataatgaaatgacaagaataacccttttggtaaccgtattgactgcagagtctatttaagcatgtggttttaaaaatagacagtattttttaaaaatcaaaaaatgacttgcaaattgttttttaaaagtaattttgcattgctttgaaatttgagctcatttgcaaacccgagtctgcctgggaacccgcactgtgcctgggtgtattctttatactgtagataatggagaaattttctatctctgtccctatttgtataagccaaggtgatgctgggtgccccgaggcagaacaagaggcgcggggccacacccgtgaaccatgcagacggccgaagaagtcttaggcagggcgccctgggctgcaggcctgcccgaggctgggatgggaagtgtgcctgccctcgtgtgacatggaattggtgtcaggaccgccacgtggccttcagaggaatccacaggtccccacccaagatccctcaattatatggggaagtcgagggcctgtggcttggatccgccatgcagagatgtggccgggcacccatcttccttccctcctctgtccctgcctcggccaccccacgcgggaacccagcgccgtcctctgaaggcagggccttggccacgtcctgggtctcccacctcccacctgaccccagcggctccggtgtcctccacgtggctgccctggggagcaatcccagcggatcgctccgggccaccaagccgcacctgtgcctgagactccggatggacgacacagtcgtcacgtcgctcttcctgcgggttcttggcgagacacagcttgagaacagaagggcgtcgggggaacctgccgcaaggagcagagacagcacagccccccgggcccagccgcctccctctcttgggacgcaacttcttccccactcggatgggctttaaattattcccataggggccaatttcaaataataatttttttccctgatggaatttaccttaatctgtatataacttgtaattttttctaattcatttcttttcttattttatttcctccttaacagtatttttggcattagacattcttattgtgaagaaataatgttaatataagtatctggtgaaggaccaaaaccgtgtgataaggttgtgtgtcgtgtgggagtggggcgattttttatgtgccaaatacccccgtcccccccatgaatcctgctgtccctgctgccgtttaccagacaatcatatgtttttgttaaatttgcgtttcagttacatttgcatttaagacaagtgttctatttatttcttgtattgtttggaagaaaaaatgatgatagagtcccaaaaagaagagaaaaaaaatgcccaagttgccctttaaaaaaaaagagcgtaaatacaaacaggagtggtgcaagccgccttggtgtgggtttgtgtcacgcgtggacatctcctcaggctttgtgtcacgcgtggacatctcctcaggctgtccccagcggtgacgggaggtgtcctggctgctccaggacaaaagacaatcgtctctgtgggtgccgggcggtccaggcttgcactgaagacgtgccacggggaggctcctgcaggaggctcaacccgacggatcacagtgaaagggattcctcccacgccagatctgcacaacgaggcaagacaggacccacctgtgcgtgcgctggggccatggggtggccccccccggggcagcgggggagctgcctgcagaagagccagcnggcgtgtcgggaaggatccaggatctgcaaacacaaccgctcaggccttctcacgcgtttccacaacatcccctgggtcagacccaccaggtaccccgtaggaatttccagtttcccttgatctagatgggattcttataaaaattcaacctcagacataaacaccccatttctgtaaacccaaattatatggtttcttctgcgaaagagtaaggtgtgtgcttttttttttgcaatatggccccgtctctctgaagtgggacattcggacggatggagccctcagcgtgtcttttcagcaggagcagaaccgatgagngccgcccttnccgttggtctccggatcccccagtcccatcccgccgttttcggctgtcttcctaaccgtcctgtcttctcttggcgctctttccttccacctttcccaagagtcctggttgcacgttttaagtcatatattttcgtccccctgaaaatgatggcaagcccagtttctcctgagcattcagacccccaggccccagcacttggcgttttcaggaggccctgttcttagagcccctgacaaaggcagcacttatttcctgggctggtgcgccccaaaacacggccccgacacttagtgtggccccaggccccagcgagcctcgccctcccagttttgctctgcccagcagtgttggtgcccagagatgacaagggccagggagcctggcccgggtgtgagaattcagagattctggcctccagctgtcaccacaccgtaacggggccatgtaactgtgcagcatggacagggatgcgacggggcagctggctgtgtccatggccaggtggccagggtcagggctgcaagccaggggtccagggcccttccgttcagcccaaatgctgccccaatgctaactccttggattgtcaacccccatcccccaaatggaaattccgaaggaggcctcctcgcacctgccctccgctgctcctcagaccccagcccccagcgagccgacgtccccacccgttcctgctctcatccccaggttgggcacgtggggttcctcctctgtgggcctggcagacccttcatgagtgggacccaagatatcactgacttcaacccagaggatcgagcccctgcaccctgcctggggccctggggtgtggagcagtggctggggtgggcgtggtgtggcctgagagactgcccagctggagaggccttcctttacaaggccacgcgtgcagctgtcccatccagaccccgactggccaagacctccacgtccccagagtccagccctggaaattccaagggccctggcgtcctctgccttccccgcttccccgtgagcgtctgcaaaacacttgcctgaatacatatcacgtattttagactcgaagcctcgaagcactggattgtggtcccctgccccctctgtcccgtccccctgcccaagtgactgaaacctactgagctatattcactgtgctgtcctagggggagggagagcagagctcgcccctgcactgcagccttgtgggggagggcaaggctctcctcccagccagggacgccaggacatagctgctcctggtcagtggaggtcagccgggtatcaaaagccatgaaactgtgtctctgtagcaatgagtgatactgtgacaaaaccatccttgcattcttcctagaagagttcctctgctccttccattccatttttgtgtttgttttgttcttttctgtcactgatccgtattaccacttttggaaaaaaataaataaataaataaataaaaggcagcttgagtttccaaacgtgtgattcacttgtgaacaaaagtcattctaacaattgccttcagcgtcacgtgcattgccactgcgctttcggcacgagggatgctgagccctggtgtcagagtcgtaatttaaagcgtgtgtgtatatggactttgtcccttaaggtcgatataaagaatcctcgcagaatcacagacctgtgccgcccgccaccttctgccattgttacattacagatttggtttagtttcgttttgttttgttttttctcttagaactgtatagtattgaaaaagaaatcaaatgtaaatgtctggttttcatataatgtttaaaaagaccattgagaaggaggctggcgctcgccccatgtcccccttgattgtaaattgcttctgttctgtttataagtaaactgtgcatgactcctgcttagcggtcattatcgtgtctgttggtgaaatttttattaaaaggaaaattctgtagatgcacttattgaatatgtgattaggatctacgtctgagactaggagtcctgaactgctgacgcgaaagaggcgcagttcccaattaatacggaaatcgctgtgggagaagaatgaaataagacgtgaagtgtaggaaatcatgaaaagaacaattttgcaaattgcattctgatgcttgtgatgaacacaaatgtacttgtgtagagacatttccttaagagaaagcctaggagaagccgatttggaggttaatgctgtagaataggactgtataccaaatgtaatctttccaatgctccaatgaatttatacatgagattgatatgcaataaatctgtgtgcttttctaagcctcggt

SEQ ID NO: 275483 - DNA, 382 bp, Homo sapiens
gttgtagagtaaatcctattatatcgagatattggtcaggcaagaatttttcttttaaaataatttattgtaaatgaaccataaaatttttacctttgtgccatcttctaggctataaaatagtcttataaagaatcagattgttaagagtatatgaaatgtggatatggatgtggaagatccataacgaggatgatgaaagcacattaagaagctttctgatgggtacaaaaaatagaatgaagaagatctagtatttgagagcacaacagggtgactatagtcaacaataatttattgtgcattttcacataactaaaagtataattggattgtaacagaaaggataactgcttgaggtgatggataccccatttaccct

SEQ ID NO: 275484 - DNA, 200 bp, Homo sapiens
ggaagtcatagaagcgttttaagcgggagtgacatgactgaattaagagacagggtcttactctgttgccctggctagaagtgtagtggcacagtcagagcgcactgcaacctcaaataagtcctaggttcgagtgaacctcccaccttagcctcccgagtagttggaactaaaggcatgcaccgccaggcctggctaat

SEQ ID NO: 275485 - DNA, 379 bp, Homo sapiens
cctgtgctgggagagggtcactgggctgagattggtaggtggctctgggagctgagggcctaaacctatgaccacaaggaactgaattcatcccaaagccagagaggtggaagacgactcagaagatgcagatgccaatgccacatcctggtaaaggttctcggaaggacccaatgagactgggctcactgggataatccaggatcatctcccatctcaaggttcttcatcgcatacttgcaaagccccttttgccatgtcaggtaacttgttcacaggtttgaagattagaatgtgggcatgtttggggggcataattaggcctagcacaatgcccatgtacccatctccttgcttaaacattaaacactttgccaat

SEQ ID NO: 275486 - DNA, 324 bp, Homo sapiens
cagaatgagttatcatgggttagctttccagtggattaatgtaaaagggaggacttgaactgagcttcaaaggtaagtaaaattttaccaggaggtgagggaaagactacagaaaagggtgcaatagcagaaatctttttttttttttttttttttttttttttttttttaaaaaaaaaaagtttttttttttaccccgggttggggggcgggaatttagaaataattttttgaacctttaacctccggggtaaaagagaacttttggcttcttttttggggggaccctggaaaaaaaggaatttgcttttttcccgggttaat

SEQ ID NO: 275487 - DNA, 404 bp, Homo sapiens
aacgcagtggagactcaaaaaacagaaagcacagtaggaataagggagtagaaaactaggaggctgtggtgggagaagaattctgagctcatggctttagagaaggagctggcccaggggataatcaggtccaagctctggtcatttgtggtcacatgggttaataaagtagaaggtctcacacacagactgggtttgactagtaaatggttcatcaacatgaatatcaactgaaccgaagttgcccaaggcgatgccaagtaacaggagagaggaaaagaggtgtcaaagatgggcagataacaagaatgggaagagggaatataaccagatggcaaaggattcaaaggaacgaagactgttggaagctggtaggtactttccctgaggctgtgatgctgccg

SEQ ID NO: 275488 - DNA, 1593 bp, Homo sapiens
ttatgcctgagttggtgagatggaatgatgtatcatatctcttccccttttattaaccagatcgtttaccagattgtacctggtgatgctgcagccagccctcttccggcccctatttctgcttaccgtgttaccagagagcctgggggtctggatcctatctggccccgtcagggtggattaccaaatgagcagttctcttgccccagtccctttcctgtgctataaataagccccatgtttattttcttatgttattgaaatgagcacttgtgatttgggcctcttttgaggagtccagagagcgtccatccggtgcctggtgagggccctgcatggctggctgctgtctgaagctatttggagtcctctccctgtgttttctatgtggcttaatttcaatagaaagggttatatgcaaccctgtatctgctgattttcaggtttcaactttctgccagcgtcactgcctgcttagaagtaaagttatgtttctcattaaggggataacagccacaattgaggtaattaacgaaaattgtacatggtggcagcacctcctataggatttccaatagtctttctctagtagatcattgggggctcaccttgatctcctctcttctgtctaccctgcaccaaaataccttgtcctgttttctggatatagttccaataatttttttcctaacagcctttttgtcaccagttggtttgatatcttacaacttggccaaatgagggttccattaactccatcttgtctaatgcatggagaattcaaggattttttttttctcttttcatagcaccttccagttgccagttgtaccctggcccttctttggaagtcataatgatgaatatccattaataagagattgatgctctttcaactctcatgtcatctataccatctcagtggagaggatgactttggatgaggttggaatagaaaggaaacatttggaagtccactgcagtgtattatatgctgtgtggaagtctgggggttaggaaatacctggagggagaacttcctaagaaatgatttttggttcttttaggccttaacagcacaataaaagtatcccatgagaccattatgagcaggacacgacattgtttcacaccttgggctgtgactatttacttctcggtacagattactctggttaaatcactcagtaaagaaatcttttcatgctcacaatctgaacctgaaggctattactgaagagaattgcatctgacaacaaaatttaatttacttccagagaaaggaccagaagaaagtaaattttcatttatgtttttaagtctattgtcttaaaaagattcttttcccttaaaaaataaaaaaacctgatgtgatgggttccttcagtcaacaaatacttattgagcagttattgtgtgccagatactgttcttggtgtgaggatatggcactgaacaaaacaatgtacctactttcgtcaagcttacattctagtgaggaagataaccaaaacaagtgactgaatataatttcaaatgtcaataaatgctgtgaagaaaataaagcagagtattatatgtggataatgactt

SEQ ID NO: 275489 - DNA, 311 bp, Homo sapiens
aatcccttttcccaaaattcactggaagagctcgaggaaaactttcccttgcagctgtctcagtctttacagtgcttagttacgaagacagtcttaacagtcccatctttcgccctgtaattcaaggtcatttttcattctttctgtttaataattgcaaataatttgggtaggaatttcgttgagcctcacaaatcgttgctgagttgcacagtgacaatcttgccacccttttaaagccttttactttatgggttcctagaaaaccactcatcgtcattattaacattcattagatgtttctcttaaat

SEQ ID NO: 275490 - DNA, 509 bp, Homo sapiens
aaatagatcatttaaatatttctataactattgagaacttgaattcaaatgtagaaattcttcaaaaagaaatctctagacccaggtattttcactagagacttctgctagaggtttaagaaatcattaacatcaattctatacaatctcttctggaaaagagaagaggaaacacttcccaattctttacctcaaactagtattaccttgatactaaaaccaacaaagtaccaacagtatcaaaacaaagtaaacttcagactgatatcccttgcgaatataaacacaaaattcccaaacaaaattgcaaaaatagatttcaataatatattaattatataccatgaccaaatgaggttttcttccagggatgcaaggctgtttcaatattcaaatacatcatattacatgttaagaggcaaaataagaaaaatcacataatcatataaattggtacagaaaaaaaaatttgaaagaattcaatacccattcatggtaagaactctcag

SEQ ID NO: 275491 - DNA, 492 bp, Homo sapiens
tttcaacccaggtgattgcattgtacaaccaaggctgagaaccatcgcattaggagacagattggtggtaaacttgacagaggattaggctgccactacctgcattgcctgatagatcttagcaaccctgaaagttgtaatgtgaaaggtgtgatgtacatggcaccattcataaagtatgctacccacaaaggcttgacctgaaagcttttagctataaccttctgcttaaagaaatagtgtatttagaggaataagtaaatgacatgagaaaaccatcagataaattcaggatgtggaacaacttaaaagtgtattgctgcagtttcctcagttcatcaaaaacatgaaaatgaaggaatgggtgcccctttctaaattgagggacttaaatcagttgtactcaaatgcaatcaggaaaccttatttcagcttgacgagtacaagccaactgaagaaacacatttccaagacatctgaaaaatttgaatt

SEQ ID NO: 275492 - DNA, 382 bp, Homo sapiens
cataaaagtacatttctcaaatcagtttctccttcaaagtatgaatgtgacattaataatgttcccctttcagcatttgtgacacctgggtgtaccatggttccttttcgttgctgaagtttaatttagcttttcttaggaggcttggaatatagactgagatttgcattttcctgattgtcatatgtatcctccaagaaagacattagttgtggctttaaaaaatacatatagaaaaagctataatataatgtaaacactatgggctcatttctctaaagaataatgtgcaacattttttaaaaacttgatggattttcttgaaaattaacattgattttctttgagttctgggacaatatatattttctggcttttgtgt

SEQ ID NO: 275493 - DNA, 512 bp, Homo sapiens
cagcagttctataagaaatgcttgagggagtcttacacctggaacaaagggacaatatctgctgtcatgaagacacatgaaagtataaaacttactgatagagcaagcacacaaatgaggaagaaaaataactcaaatgtaccattacagaaaaccaccaaaccacaatcataataagaaagaatgaaacaaagaacataaaaacaaccagatatcaattaataaaatgacaggaatacactctcacgtgtcaatagtaactttaagataaatggattaaactttctacttaaggaggctgatccaagatggccgaataggaacagctccagtctacagctcccagtgtgagcaatacagaagatgggtgatttatgcatttccaactgaggtaccaggttcatctcactgggacttgttggaaagtgggtgcagcccaaggagtgtgagccaaagcagggtggggcatagcctcacccacaaagtgcaaggggtcagcgaattccttttcc

SEQ ID NO: 275494 - DNA, 298 bp, Homo sapiens
gtaatagctctgggacaatcccaggaggagtcaggaaataggatatgtgacatcagttttgtcatgtcaacagtatgcccaaaacgaaacctattccactccaaacctgcttctgcttagagactggcattaacatcctcccagtcacccagacttggaactgcagaatcagcttcacctctttcttctcctcacaaaccattgtccattctatcaacaaattatctaatccccaaatttgaagtctaatcccaacacctggtccatggtagtgtttatataaactgaaattaatgca

SEQ ID NO: 275495 - DNA, 407 bp, Homo sapiens
tttttccatagttcacatgtccacactccatgtagtattcacgcagtccatgtgtcatcgatacacaacttctccttagctcagcgaaaacctgggttcttatcccacaaccaggaagaagttaggcacgtgaacacgctgaaaggtgaggaaagcagaatttactaacaaaaagctctcagcaaaagaagaggtcctgccaacaggctctcaccacacagattgaattccaggccaccacacatgagccagagacaaggctccccgtgcataaggcccaaacttcccatggctccaccgcatcttcccagtatgcaggtgggtccccagtccgttgtgggcatgtgcagacaaagccctgggcagcttccctcatctgtctcctgcagctgtcattccccctctaa

SEQ ID NO: 275496 - DNA, 337 bp, Homo sapiens
taaacagcttcagaatattcatactgatttgtgctgcaatgctatcttatcaggccttacagcaagcaaaaaaaaaaaaaaggtatttgcttcttagatatttctggttattaaatccagttgaattatactgactattaatcataacccagaaattataatcaaagtttttgggtgcagtaacctaaaagaatgagatatttttattctgtgttagttagcgtaggttttaaaaacaaatggctattaggcagcttcaaagacaataaagctaaggtaatgaaagtttgaaatgaagcactagtcttgtgtcaacaagctgattacagaacacagg

SEQ ID NO: 275497 - DNA, 969 bp, Homo sapiens
aaaccattagtcaaaaaataccattcattcaaaataattcattaatgtcctcctactctgttccaaacactaggctgagttcagaggcctcacagaatagtgaaatgcgttcttagccaaatcaggcaaatcttctccctcactatgtccctgaagaaatctcttcatctgatatatttactattcatctactttctacagcactatgttagggtcttccggggattcagagaaaagtgtctgtgagccattaagaaactcacagatcaggtaataaacactttttctaatgcattccagtgtctcagagcctgcataatcactttatactacttcattaaattgacaggacatctaaggtgacaaaagagatgtttctacctgttggtaaggttgatgcaactgtcataattagatgttcttggtttttaatagatgcagcaatgagagagtacattgctaaagtcagaacttaatttgaattaaattttcaagtttccaccaagtatttgaaaacttagaaattgtatttcgtaattacacatgcagacatttaaatttttattaagcaccacgatggaactcaatctaaaggaataatggcacctgataattactaacaacctttgtttatataagaccttgtgcaaactgtgtgataacgtatgtttgcattctgtctttaaaataaccctgtaaggtgcgttattttaatttttagattttaaaacttagcttcaagagaaattaagtgattagtctatagctacaaatcctgtaaatggcagagtcaggaattaccactgagcatgactccatggactcttaattgttttcctgcctcttaataaattgaccatccttgagactgactagccttcagatttttcatgatggagctatcataacttctcagtggatacatatattatcatttatggcaaataaagggaacattttagaagcctc

SEQ ID NO: 275498 - DNA, 443 bp, Homo sapiens
acttggggacccgggggagctgagatacagttggcagtgctgggcctggctgagggccctgtgtgctcactgaaggctgaggggcctcagtttacccagcatcctctatgggaaagacaacacgcacctacctggaggacatgagcacatggggcctggaggtgggtttcgcccgcacacccctgtgggcatttgcacatgttccaaggctacgcgctcccctttctagaagcccatattagcctcaagccttctaatgagtccttgctgtcctggattttgatgatggaaggggataccttggctgccctatggctgtcgcttggtgagtgagtgcattaatgtcccttcgtgcaaagctctcaagtgggtgacgtgtgccggaccttctggccgccgtcctggtgccctggccaccttctccacctgttctgtgtccccag

SEQ ID NO: 275499 - DNA, 473 bp, Homo sapiens
agtggcaagagataaatgaggaagaagtaaaagcggaaacacctgataaaaccatcagatctcgtgagatttactatcacgagaatagcacagaaaagaccagcccccatgattcagttacctccccttgggtccctcccacgacacgggggaattctgggagatacaattcaagttgagatttgggtggggacacagccaaaccatatcaactatcttgtccaagctggtcttgaactcctgggctcaagcgatcatcctgcctcagcctcccaaagtgctgggattataggaataagccactgcccccagttcaaaaaaactttttaacgagtatcaggtcatgcatacaagagtgttcatgtgagcactctttttaataccaaaacctgaaaacaacccaaatgcccattaacaggcaagggaatagacaaattaattagaagctcctggaggacagggaccacctctac

SEQ ID NO: 275500 - DNA, 309 bp, Homo sapiens
gtcaatttacagaagagaaattatagtagacaaaggaatatgacatacagttgaaaaaaaatgaatactgacacatgcgaccacactaaaggatgtcacagtcacaacattcagcaaaagactatgaaattcaacaacaggcagtattaatttctaataataagagtcagaatagtggttacttgaggggggcctgtaactgagagaggataatggaatattatattttttatctgactggtggttactcaaatatattcacaggaaatattaatcgcactttacacttaggattcaggttctttatat

SEQ ID NO: 275501 - DNA, 311 bp, Homo sapiens
taagataaaaatttaattggaaatagacatatccttaacctgataaagagtatctgcaaaaagtttagagcaaatatcatacttactggagaagtgttggaagcatttccctgtctcatatttttgtgaagcaaagcccataaatatttcagtatttgtctctaaaagatggattcttaacctaaaatgtagttaacatatttcttcatatcagcaaacatctggttttcaaatttcttgttgtctcataagtaacttcattttttacatcagtttatagactcaaaaacctaataaaattgacatgttgt

SEQ ID NO: 275502 - DNA, 186 bp, Homo sapiens
ttaaaaattgttaccaaaagtacttgaagattacgaggagttgacacctccacacacatgcatatcccctccaccttgggctccttgcttatggccaccaatccctcactaagggaggatcttgccagttctaaatgatggggactacaaaaattacaaaaattacccggcgtggtagcgcgtgcc

SEQ ID NO: 275503 - DNA, 162 bp, Homo sapiens
gcaagcgctgaaatattttaaaaatcctcaggtgggctggacacagtggctcacacctgtaatcacagcactttgggaggccgaggtgggaggattgcttgagtccaagagttcaagaccagcctgtgcaacatagcaaaacctgtctccatttaaaaaagc

SEQ ID NO: 275504 - DNA, 406 bp, Homo sapiens
agagagaggacattgatcctgatctggctgtaataatgtagtaggtagaactgctggtgtggacacccgagcaaggaagggaagctggtgtctcaaggggtcccgctgagagtgaaaggggtcagggcccagactgtggatgtcacctggacccaaccaccatgtctcagaagaagaaatgaccctcccctcctggtgctgcccaaaacaaggagcttagcagtgttgcacacaggatagtccttgcaggagacatgtttgacaagttgctgaggtgcctgatggggccaggctcttctcatgaaatgagtttgaatcctgaggaagcctctttattggaaacctggcagggatccaatttcccctttgccttaaccccgtaagagaacagtagacaggggaggag

SEQ ID NO: 275505 - DNA, 109 bp, Homo sapiens
aggtccagtcgctgacatttgctgaatgaatggatgctggatgcgcgaagacctgggcgaggagcgtatgaacgggcgtgtgtgtgtggacgcggggaagggcaggagg

SEQ ID NO: 275506 - DNA, 435 bp, Homo sapiens
aagattttttttaacctgcaaaagaatcatttcttaaaatgctgcattaaaagtccttgacacagcatcagacaaaaatggtaaatacagacataggcacaatagatgactaaatatatctcacctcacctcaatagactttttggtatttagtttttcagtgatctgttaaatgctctgcacatttttttttttttttttttttttgatgacagagtgagactctgtctaaaataaacaaattaaattaaataaatttcagaagctgacagacaaaataggcagtatggagaagaatgtactgacctgacagagctgaaaagcacactacaaaaatttcataatgcaatcacaagtattagcagcataatagaccaagtggaggaaagaatctcagagcttgaagaccatctttctgaaataaaacaggcagag

SEQ ID NO: 275507 - DNA, 529 bp, Homo sapiens
atccagagaaatcagagagccaggttatacaggatattgctctaaaaacaagagaaatctttaccaacctagcaccattttcagaagtttcggctgatggagaaaagagagtccttaatttggaggcgctaaagcaataacgatttccaccagcaacagaaaacttcctttatcatctagcagcagccgaacaaatgctgaaaatctgactgtgtgacagaacgtatcactgatgactgatagaaagccctctttcactctgattacccactcactacatgaagtcctgaaaataacagagaaactgttatatctttttaatgatttatttgcaagtattgagatttgacctgaaaaacaatgaaacacatgaacacacttccgattttctcctcgctgattagcttcctgcctgctgtcagtgctggacgaagtgctataactactttatgtaacattacagaacagctagaggtcctgggtaagaggaaaaaagcacatcacgacaaatgtgaaagccttcattatt

SEQ ID NO: 275508 - DNA, 1010 bp, Homo sapiens
ctccaagggagacgcctagaagatggaggcccagattcttgagacgtttctctttctgatctagcaggagggacaaagagctcctccactccctcattccccaagaaggcccccagcctacccagtttccgtgaccattccgccctgggaaagcggcttcccagacctccttatctatttttcttgaatcatgagagatgaaattgcaacaacagttttctttgtcacaagattggtgaaaaaacatgataaactaagtaaacagcaaatagaagactttgcagaaaagctgatgacgatcttgtttgaaacatacagaagtcactggcactctgattgcccttctaaagggcaagccttcaggtgcatcaggataaacaacaatcagaataaagatcccattctagaaagggcatgtgtggaaagtaatgtagatttttctcacctgggacttccgaaggagatgaccatatgggtagatccctttgaagtatgctgtaggtatggtgagaaaaaccatccatttacagttgcttcttttaaaggcagatgggaggaatgggaactatatcaacaaatcagttatgcagttagtagagcctcatcagacgtttcctctggcacttcctgcgatgaagaaagttgtagcaaggaacctcgtgtcattcctaaagtcagcaatccgaagagtatttatcaggttgaaaacttgaaacagccctttcaatcttggttacaaatcccccgcaaaaagaatgtggtggacggccgtgttggcctcctgggaaacacttaccatggctcgcagaagcatcctaagtgttacaggcctgctatgcaccggctggacagaattttataacccacatctgggaatgaatttgcagcacctggtagaagaaggcaccttggaaggcactgccttgggcttccatggcaggaagatgagaagaaatcttcagggtgatttctggagcctgaaaagaataaaaaacaaaaccaaacctatc

SEQ ID NO: 275509 - DNA, 274 bp, Homo sapiens
atcgcccttgtaaatgcttcctcaggagtggcctctatcgaactcaatattctcctcctctggggtaggaggatgcagccattaggtggtgtttttcttctcgaaatcacgtttatatccaagatggatagctgtttgtgcctcttacacacctgtgtgcagcaacagctttatgaccaaaatttggtctcttctgttgttcctgagcagaactatgtctgtatttttttaaatttatcaattgtcaaaataaaatatgtgggaaatataattc

SEQ ID NO: 275510 - DNA, 1151 bp, Homo sapiens
cctctactactgtgcataaaacttgaagagttggaggccatgttcaccagcccagaagatatacgtacacttgggatttttgagttgtgtggtggacggaggggttagtcttaaacactactgatgaacctatgtgattgctgcctgtttcccgccaaataacagggcagtcacggcttatcctttctggctccccttttaccaccttctcctggaatttacctgacctcctcttctcacagcttggcaggctctagagagactgacctctgcagatggtttaaagggagaagctcaagggtccacagttcacagggctgccaatcaggcctgtgcagaaaactcaacagtctaaaagaatatatgaagacagaacctcaacctagaagaaatggacaaattcccagacacatcaaggaattcctagacaaactatcaaaactgaatcatgattagatagaaaatctgaacagatcaatataagtaaagagattaaagcagtaataaactctcccatcaaagaaaagctcaggacctgatggcttcactgctgaattctaccaaacgtttaaagaactaacaccaatgattctcaaactctttttaaaaattgaagatgagagaacacttccaaattcatatcacgaggccagcattaccctgataccaacgccagacaaagacactataagaaaaggcaattatggaccaatatccctgataaacatggatgtaaaaatcctcatcaaaatactagcaaatgaaattcaaccacaaatttaaaaaagcattcaccatgatcgagtgggatttatccctgggatgcaggaagtttcaacatacacaaatccataaacatgatacaccacatcaacaagatgaaggacaaaatctttataatctcaatagatgcaggaaaagcatttaacagaattcagcaccctttcatgatttaaaaaaactcaacaaaatatagaaggactgtaccccaacacaataaagaccagatatgacaaacccacagctaacattctcaacagtgaaaagttaaaagcttttcttctgagatcaggaacaagacaataatgctcactctctcgacttctgttcatcgtaacgttggaagttctagacagagcaattagacaaaa

SEQ ID NO: 275511 - DNA, 425 bp, Homo sapiens
gattctttcatttcctggcttctcagttccttgagggccattacatatgatattttttaaatttggcttacagtcagaggcttatccaattaatttactatgttaaaccagtatttaacaaataaaagaagaaagaatacagcaggaatggattttaaaaaccatcagggtgtattgtgtgaaatgggtattatggcattcctgggaatgtgaagctctcttgtccattcatatagcaagcacctataatcccacactttttgaattcctgaagcactttcttctttgcatcttccataggacatttataaattctgtagtccttctagtagaatagaaaatccttgggaaaaaggaatcttttatgtgtgattcttcattatatccccagaatccggaacagttcctggtaataattagacaaa

SEQ ID NO: 275512 - DNA, 513 bp, Homo sapiens
aaattcctcatatttaagctgttgggagtcccttgcaattccatatacacttgagaatctacttttatttctttgaacagggctgttggaattttgataggcattgtgttgaatctgtagatcactttgggtagtattgacatcttaacaatattaagtcttcctatccatgaatatgggatgtctttccatttatttaggtgttctttaatttcttttagcaatcttttctattttcagcatacgagtctttcacctccttggttagacttatttctgagtatttaattcttttagatcttgttgtaaatggcattgtttacttaatttcctgtttgaattgttcaatactgatgcacagaaacaaatgaattttgcgtgttggtcttgatgtgttgatcttgtaactttgctgaatttgtttatgagctattgtaccttcttgtgggttcttttggattttctatatgtaggattatgtcatcttcaaatagagatcgttttaccacttcc

SEQ ID NO: 275513 - DNA, 386 bp, Homo sapiens
tggagcggttttccgatgtacgtggctgttactgcagcaggtgtggtgctgcggcagcatttgtggaggccagcacaggcctataccccgcagacacaccacgcagggtcatggtcccctcccacagccccaggcaagtcccatctccctcctggagctccttggtgtggggagccagaggaccagacctgaggttgtcggaagggcaggggtttcctccctattctgccctgtgtatccttgggcaagtgacttatctctctgaacctcacatcccctgctctgcccaatgctcatggctgcagggagtattcgaggcagaaatgaatggagagggtaaggcctggagataacctcaggccgagtgcaacttgaacgtggttccc

SEQ ID NO: 275514 - DNA, 367 bp, Homo sapiens
gaggaggtgggggacactggtgctgattggagaaaggtggcaaaatccctaggggaaaaaagtacagatttgaaggaggcatcagatgaatccgtgcatagaagcttgagccccaaactcagttctcaggctgcgttatcctttacgacacccagagtccctctgtcttttaagatccacacacaactctccaggccaatagctcttggcgcctgcgattcccaagtgggattctacacgtgtcttgctgcccagctcggggggatctgtttttggggggtctcggggcgggtgcagggtcctggctgtggctttggctagtgcaggccggctcggcactattacagtgacgaggtgggacgcacaa

SEQ ID NO: 275515 - DNA, 191 bp, Homo sapiens
aagttattcatgttgctcagaaatgtttctctgtagccatgttagaaagttagtgggctcaaaatagatcaagacctaaatttaagacctaaaactatgaaaacctgtggaagaaaacattgggcaaaagcttcacgacactggttttagcaatggcttcttggctatgacaccaaaggcacaggctacga

SEQ ID NO: 275516 - DNA, 260 bp, Homo sapiens
  misc_feature (31)..(31): n is a, c, g, or t
  misc_feature (52)..(52): n is a, c, g, or t
ggggttggaattcgggaacccccgaacggcntgcccacggccttcccgccgntcccgcgctcccgagcttccaccacatcgggcccgctcggagcagggagtgctccgaggcgtacggcccagggcccacgatcctgggacgccctccggtcctccgccctgtcgcggaggcagcgttttggatccctcgccgcacaggggctcctgcgaggccccctcttgccccacccacccagagccgtcagggctggccgaaggcg

SEQ ID NO: 275517 - DNA, 371 bp, Homo sapiens
tgaagtgggtttgccttaatataacactgttgtatttgtaaggggcatttttaaagttgtactttaaaaaataataattcttagattcgtttgaaggttttttgtttgtttgtttgtttgtttttgagatggaggctcgccctgtcacccaggttgcagtgagctgagatagcgccactgcactccagcctgggggacagtgagactccatctcaaaaaaaaaaacacaaaaaaagaatagaataactcttgtttaggtgttacaaaatccaggccagaccaatctaaactttaatctcatacccagttcctagatgagtcccttctccagctcaggttccgcctaagcctcagggttccttacttggtgg

SEQ ID NO: 275518 - DNA, 233 bp, Homo sapiens
atcgcttgagcccaggagatcaaggctgcagtgagctgtgatggcgccacttcactccagtctgggtgtcagagcgagaccctgtgtcaacaaataaattttaaaaatcttatatttaccacacaaaaccaataccaattactagaccagcttctaaggtagaaacactctggtctgaacccctggcagggaacttgcacccagtaagccccagttcaacaccaaatccttgt

SEQ ID NO: 275519 - DNA, 478 bp, Homo sapiens
ctcttgttgcccaggctggagtgcagtggcgcaatctcggctcactgcaacctccgcctcccaggttcaaacgattctcctgcctcagactcctgagtagctgggattacaggcatacaccaccacgtccagctatttttttgtatttttagtagagcctggatttcatcattttggccaggctggtctcgaacacctgacctcaggtgatccaactgcctcggcctcccagagtgcagagattacaggtgtgaaccactgtgcccagcccatatctcctttaaaatcccaatacatcagtatcatcaggtgttagactgttaaaatagagctcttgttgagtgtaacccttttggtttttgtgaagatcttccctaccctatccattggaaagactattttaatattgtttcttctcagaatattatatgaatacaatcttgtattaaaaatggtgttcaggcctcgaggtgatggc

SEQ ID NO: 275520 - DNA, 530 bp, Homo sapiens
cctggcttggggctcaggccctggtccaggctgggatcctcgagcgcttcctgctgacagttaatcatagttaattgtgacccccagctttcccaggggccaccgcccagctctcgtctgatgtcattcacgttcagcagtgtgcatcttgccacgatcacgtggtctctcattttcctcctggatccagccttcccagcgggctccaagtggctgggcctgtgagatgctgcgactcttcgagagcttcctatttctgtgaagacgctcaggccacggcctcatgttcctcatccagctttctgaggacaatgcgggaaagatctcaagttcgtatcaaggctgaatccgactctatccacgtgacttctattggaatccgagagttggacccaatggagggtccagccgccacccggaacgacctggtcattttccagatgaggggacctacgtttagatgagatgaagacaatgaggctgagagatgttcagttactaggtcaaattacaaatatgtgcacttcaaa

SEQ ID NO: 275521 - DNA, 532 bp, Homo sapiens
agccatggaattttcccccaatgatatattcacatgcatttagtctttatgtaacactataattaatagaagtttttgagcacttgtgatatgtcaggcactgtgctaagcattttactctcattcacgattttcaagataaacaatggaagatcagagcagtcaagtagtttgttcatggttacacatccaagtgagtgcagagctattgctcaagttagtaatcactttaagtgcttgggttttttttttagttactgaaatggaagaaagtttttcctatgtgttttggttaagtgggttggtgttcatattttccatgctgcaccaagatttcccagcacttcctgggttgcacaggtcttttttttttttttgagatgaacctaggtgataggctgaatcttggtgataggctgttgagttataatttgtcttcgggtgggagattggagggatggtggggcttttctttttaaggatttactttgttgcttattaacattaattttatttaagtggcgtattacca

SEQ ID NO: 275522 - DNA, 100 bp, Homo sapiens
agtctagtgaagatgttgtcattatgtacaatacataactagtttaattaactatgtgatgttaactattattaataaattttaacattttccaaaataa

SEQ ID NO: 275523 - DNA, 434 bp, Homo sapiens
aacaaaggacattatcaagaaagtgaaaagactacctacaagatgggagaaaatatttgaaaatcatatatctgataaatattcaatatccagaatatataaagaattacaattcaacaacaaagggacaatccaataaaatttttgtaattggcttaagtttacatttcttcaaataatatttataaatgcgcaataagcatatgaaaagatgctcaacatcattaatcatttgggaaatggaaatcataatcaatgagatattacttcatgcctactaatatggttataataaaaaatatttaattaattaagaaactaacaaatttccaggatgtgccgaaattagaacactcataaatttcagatggaagtgtaaatagtgcagttgctgtgaaaaatagcttgatggtgtctcaaaaagctaaatacct

SEQ ID NO: 275524 - DNA, 230 bp, Homo sapiens
tcattcccaatattttgagcactttaaggtcttttaaacacttaacagcatttaagcacttttaaggcctgtttaagggctttgggtaattaagaggaataaaattgatccatttcccttatggttttaagcgggtaagtgtatgattgtgtaccaaaggttgtttttttgtttgtttgtttgtttcccttgaactttgctaaaatttattaaaacagagtttggatcta

SEQ ID NO: 275525 - DNA, 683 bp, Homo sapiens
tgcccgttaagcagctttgcggtggcggaggctgggctgccgtctctccgacatcccgggacggaggaagagatgaaggctctgcagcccccgccgcccgatttacgcttgagaaagcgaaggcgagagaggtcgtccagcccctgggggcccagccctagagagcggggcgcgggctgcggggcccggcggcctggacggcggagcgttgaaagctcccccagggataggaagtgcagccgaaatcaacgattgagggtctgagcacctccctcatgcagacagagccccggctcccatgttcaccatgctgagaaagacctgcgggggacagcaggaggacagccggggaatgggcccgcacttgcccaggatactgtgttttaccccagccgcccacctggagagcctccgaggggtcgcgggcgctcctccggggcctgccggcatctgaagcagaggagcagaggcctagacctcccttcgcccccaacacctggcgacggacatttgccggctctcagcagcgatgcgggaattttacattgcgcgtctggatatacacccaccacctgagtgtgccattcacatgttactggactttgtcacatctagttaatcctccctgctttgatcccttttattttttatgcatttccaagtaaattatagacctcaggcgg

SEQ ID NO: 275526 - DNA, 466 bp, Homo sapiens
tggggggcgggggtgggtgaggaagtcctgggccaggcaccccctgttttgaggacgctccgtgtctcccctcgcccagtgccacattctgctctctgccccttctttccacaacttgatccatcccccgtaaggcttggccacttctccctcaggatactgtgttttaccccagccgcccacctggagagcctccgaggggtcgcgggcgctcctccggggcctgccggcatctgaagcagaggagcagaggcctagacctcccttcgcccccaacacctggcgacggacatttgccggctctcagcagcgatgcgggaattttacattgcgcgtctggatatacacccaccacctgagtgtgccattcacatgttactggactttgtcacatctagttaatcctccctgctttgatcccttttattttttatgcatttccaagtaaattatagacctcaggcgg

SEQ ID NO: 275527 - DNA, 1871 bp, Homo sapiens
tgcccgttaagcagctttgcggtggcggaggctgggctgccgtctctccgacatcccgggacggaggaagagatgaaggctctgcagcccccgccgcccgatttacgcttgagaaagcgaaggcgagagaggtcgtccagcccctgggggcccagccctagagagcggggcgcgggctgcggggcccggcggcctggacggcggagcgttgaaagctcccccagggataggaagtgcagccgaaatcaacgattgagggtctgagcacctccctcatgcagacagagccccggctcccatgttcaccatgctgagaaagacctgcgggggacagcaggaggacagccggggaatgggcccgcacttgcccagaggcagagctcgtgcatgcccgacctcgctcctcacggctccctgggcagcagcgccctggcagttggaactggaaggcttatcagagtccacgcagccccaccgccctccccactctcgggggtgggcatcgggggacagggccagggcagggaggaagacagggcccggctcaccccacagctcagcccatgagggtgcgcagagcagggctggcaggagtgggccactccacacccagccctgttgaagagaaagaacagaaatagggaacagaaagttgtcgattgctgtgtaacaaattgcccgcagtttagtgccttcaaacaaacgtagctgcacagtgtctgtgggtcagacatccaggcccggggaaggagcctctgcctcaaggtccctcccgaggcctcagtcagggcccggccggactgtgagtagattgcacgctccgtgcggggaggctcggcttctctgctggccccgcgcctgtgggcaggattcagttcctcatgggctattagagtgagggcctcgatcttttctgctgtttggctggaggcctcgctcagttctctgctgcacggacctttccttggcacagctcccgcatagctgagcaagccgcgaaggcgggctcctgcagccgaagggaattctcccctgtttctgctgtgttctgtttgtgtaggttcagccccggggaggaggttccacaggacagacagaccaggagttgggggcgttgagggccatctcacaggctgcccaccacagcccccacgcagccacctgtgtctgtgttcttgccactgtccctaccctccaggagtgggtctggtctcatcagggagggcagcgctctcttcactctgtccttactctggtgtttcactgtgattttaaaaactgaaactgcacttgttaccccttgacagagctgcaccctgagagggcctctgcgacgcccctccttctcttaagcctttccaagctgtctgacgatttttaaatcccatttcctgagtgacacagagcatcttttcttaagcttatgagtgacttatttgtgttttcctcaaagctagaggggacccccaatctgtttgtttccagagtccctgatggtgtcgtcttgggagtggaggaacctgagggaaaagcccagggacgagtcaggggagagctctgccctggtgctcttgcacgtatccacatgggccacagctgcacccggctctcagcagagggcatcgccatgctcctgggcacagccgggccctctcgcctccctgcggctcctgatgcctcccaggctccgctgaggtcaccttgggcacttagcgtggctgcagctctttgcagccccgtgtcctgtcatccatgtggccgtcatgtggtcacttttgggcattgccctgcgcaaggtccatggggactgggcacctttggccattctttctttggttgtctgtgcaagtaataaactaaatctgaaaagg

SEQ ID NO: 275528 - DNA, 758 bp, Homo sapiens
tgcccgttaagcagctttgcggtggcggaggctgggctgccgtctctccgacatcccgggacggaggaagagatgaaggctctgcagcccccgccgcccgatttacgcttgagaaagcgaaggcgagagaggtcgtccagcccctgggggcccagccctagagagcggggcgcgggctgcggggcccggcggcctggacggcggagcgttgaaagctcccccagggataggaagtgcagccgaaatcaacgattgagggtctgagcacctccctcatgcagacagagccccggctcccatgttcaccatgctgagaaagacctgcgggggacagcaggaggacagccggggaatgggcccgcacttgcccagagtccctgatggtgtcgtcttgggagtggaggaacctgagggaaaagcccagggacgagtcaggggagagctctgccctggtgctcttgcacgtatccacatgggccacagctgcacccggctctcagcagagggcatcgccatgctcctgggcacagccgggccctctcgcctccctgcggctcctgatgcctcccaggctccgctgaggtcaccttgggcacttagcgtggctgcagctctttgcagccccgtgtcctgtcatccatgtggccgtcatgtggtcacttttgggcattgccctgcgcaaggtccatggggactgggcacctttggccattctttctttggttgtctgtgcaagtaataaactaaatctgaaaagg

SEQ ID NO: 275529 - DNA, 489 bp, Homo sapiens
ataacctttgttacttttcagtagctttactgaataataactggcatacaataaactgcacacatttaaagtgtacaatttgatacatcttgacatatgtttacaccgagaaaccatcatcataatcaaggtaatgaacataccattaccccgcaaaagtgtcctcatgctcctctgtaatctcctcctcctgtccccaccaacccccatgtccttaggtcagccactgatctgctttctgtttctagagattagtttgcaatttctagaattttctataaaggaatcatacagtatgtattctcttttgtgtcattctttcactcaacataattttgttgagaatcatctatgtcctaacagcatttatcaataattcatcgcttgttattgctgaatttgcactccagttccttgttacaggacatcttggtggtttccagtttttggctattacaaataaacctgctatgaacattagtgtacaag

SEQ ID NO: 275530 - DNA, 433 bp, Homo sapiens
acctaatttgtatgaaattttaccaattgaagttatttagtaaacattgtcctcctgagagtatagggtaggatgggggtggtaaagatattatccatttactttagtatgagctaatgtgaacattctattcctctaccacttggctagattaagtgagaatggtagctttgtagggagataagtaagagtggcagcatgttggctaggccagaagaagcagtgatttagtaactctggggaactgtttaattgagagttgaaacaggatatttggggcagccagtgagcaatatgcagactcagacagactgaatattttggggcggggggtaagagtatctggacacgagaaaagcaggtgatgagatagaaaaggtgttccagaaagcaagtaaagaaaagaacagtaaaaggaagattgagatataaa

SEQ ID NO: 275531 - DNA, 257 bp, Homo sapiens
agacaccatctgtgaggaacaggctctcagcagataccaaatctgccggccccttgatagtgtatactttccagcctccagaactgtgagaaatcaatttctattaattacctagtctgtggtgttttgtgatggcagcctgaataggctaagacaatgatatattagaattatctgaaaaagattttaaagctgctatgataaaatttctccaaagagcatttaatgaatatgaagcaaatgaaaaagacaccttc

SEQ ID NO: 275532 - DNA, 1166 bp, Homo sapiens
aatttttaattgtgataaaatacatgtagcaaaacttactatcttaaacatttttaagggtactgctcagtagtgtaaagtatattcatattgttgtacaaccagtctccaaaactttttcctagccattaaacaagtacttaatacttcccctacccttggcagtcaccattctactttctgtttctatgaatttgactactctagatagctcatgcaagtggaatcatatagtgtttgcccttttgtaactggtttgtttcacttagcacaatgttctcaaggtccatactattttgtgacttttgaatactttactttgtttattatccatttttaaaagagcactaaagtaaaaagacatgaccttattcagagctgattaattacatggtaaaaagttgaaggctggcgtgtcttattcatttcaaccaatattaaatgccagtttgggcagcaaaacaactttctgccaaagtgccatttgaagcctggtttatgacatgtttctccttttgtcatctttgggtgccacccaaaatgcaggctcaaggccgcagcctcttgactctgttcaacagtttccccccttggcttattgtccaacattggcctactcttccaaatccacctctttatcccaggaacaagctgcttctatgccaagggcatggcttcctctttgcagattgtctcatatctctgacctggaaaaaagggggtttttcattctgctagctttttagtgctgctttgagatcattattctagagccctctgcagtaatgttttttctcatggattgaaattcattgtttccagtaggatttttgactagacgtggaaacagaaggacaaattgaaatgactctgaagcttatgggaggactgagtatcattaactggcacagagggagaaaggcaggctctaggtggaaggtatgtgacttgcttttgaaaacagtggtgtgagattctggcctgtgaaaacagctggagttacgagatagaaatggtcgccaatccggatgggcgaccatttcaacatgagggacccactgacagatggtccgtataataaagtatacaagaacctaaaggagtttctcaaaatggagagaattctgcaaacggtcacatcggttctcagcaagggcaacctggaa

SEQ ID NO: 275533 - DNA, 269 bp, Homo sapiens
ttttttttaaaggtgatatggttgttttattcatttgtacttaaaccaggcaaactagtactgatgtcattgtgatgtagcaaatacaagaccgctgtctataaatattagcataaccaaccaattaggggctatagtaaaacacagagccaaaggggctgatgaaatcagtgaagtatgttacagcttaatccttcaccttaataattgggtttttaacagtaagtaaggccaggcacggtggctcatggtgtaatcctagcactttg

SEQ ID NO: 275534 - DNA, 422 bp, Homo sapiens
cagtggcttaaaaaggaaggacttttgcggggaggggttgagattgtactttctaatttcgcttgcttcagacttgactttggaatgaagttcgaaggcatcacaattgacctggacattccaaaaacaaaactgaagaggcagcatttctcttccgtagtccagtcagctcatttggtagatgcgctttttcctcctttgcgcttattcatccataaggatatataatttgcatatatatttcatatgcgtgcatatgtgtgtgtatgtgtgaactggcaggtgttgatttcataaggacaaaattgttctgcaaaccttgcaccaattatggggtgtttcaacggaaaaacttcaccaaatgatctgtgtgttctttcaaagagaagttatgtctaattaaaatgtgtaacggacaaatt

SEQ ID NO: 275535 - DNA, 369 bp, Homo sapiens
cagatgagaatttcacaaaatgccacgttatcacaaatttctgaagaggctgacaggttattaatcaggataaaccacattgaataaagtattcctgttaagtggttctgcagcctctgaatcggctgggaagttgttggacatgagaattcttaggctcctgcccagatctaacaaatcacaacctcaggaggtggggcccagcaccttgtatgttcgtaagttctccggctgactggatgctgacacttgctctcaggaatctacactggtcccccattgatgccagggggtgcaatgggcatcctacttctaatgtcttgatcatgtttcttcatttagaataaacttcttttcttgctaatcaaa

SEQ ID NO: 275536 - DNA, 393 bp, Homo sapiens
tcatgtctaaaatggggatagtgcccactccacatggttgtgaagattgacggtgccaggcagacaataagcatgtcatatacacctgttatatacatgttagctattgcttttgtggttcaaccaccccgtggcccgcatcaagacggtgcctcccattgggggtccgtatctgcagctgggcacccctggctcagcctccgttctgctctggaggttcctggtacactactctgagaaaggtactcctggtccctcaatctgtattggataaagcccaaactccatttacggcctggcattcaaggtctttccctgtcaggcctgtccttgcctttctgcatccatctcctgctgtagcttcatctacctatgctcaaaccagatatgata

SEQ ID NO: 275537 - DNA, 425 bp, Homo sapiens
ccatgtccccagtgtgtgtgtgggtggtaggtgtgtgagtatacagacgttggtgttggcgtactcagagtgggaatgcatctctgagtgtacacatagatacttagtacagggcacatgactccctgcatccctgctgagggctttgggtatggataggatcttgcaggaggttccccctgctctacattgaccccttccctatacttctgtttgtaggggctgggaggccagggcccggattggaccccatagggccaaatggtctgtgagcctaacccgttagatttgctcactggataccccagagataagaaaggatgtatttggccacagtctaaatgctgagatgagaaaaccctgcacagtgaatgttttgataggattcattacttgctccataaatgtcaattttggatcattga

SEQ ID NO: 275538 - DNA, 415 bp, Homo sapiens
aggagtctcagttcataattctacagactgagcaacattgccatctgttggtgtaaatcaatggctgatttcctttattaggggcaaaacctatagattggtatgtggtcttatttataagaggagggggccaggcgcggtggctcatgcctataatcctagcactttgggaggccgagacgggtggattgcttgaggccaggagttcaaaaactagagtggccaacatggtgaaaccccgtctctactaaaaatacaaaaaattagccggacgtggtggcaggcacctgtaatcccagctactcaggaagctgaagcaggagaatcacttgaacccgggaggtgggaggttgcagtgagctgagagcacgtcactgcactccagcctgggcaacaagagcaaaactccgtctca

SEQ ID NO: 275539 - DNA, 393 bp, Homo sapiens
aaactttatgtaaaagtatatttttcagccaggcgtggtggctcacgcctgtaatccctgcactggcctcctataaattttattttacagtatataggtttacataaagggaatcatatatgctgttccaaaatctgttttttttttttaaactttatgtaaaagtatatttttcagccaggcgtggtggctcacgcctgtaatcccagcactttgggaggctgaggagggagcatcacttgcgcccaggagttcaagaccagcctgggcaacatggtgaaaccccgtccccacagaaaatgtaagaattaaccgggcatagtggcgcaggcctgtattctcagctacttgggaggctgaggtgggaggagcacttgaacctgggaggcctct

SEQ ID NO: 275540 - DNA, 379 bp, Homo sapiens
cctgtagtctcagctgcttgggaggctgagacacatgaatcgcttgaacctgggaggtggaggttgcagtgagccgagatcttgctactgcactccagcctgggttacagagtgagactccgtctcaacacaaaaacaaaaacaaaaaagaagaagacatcatctttgaagcaagaccttaccagacactgaatctcttggcgccttgatcttagacttcccagactccagaactgtaagaaataaatttccaggctggatgcggtggctcatacctataatcccagcactttagaagtcagaggttgtacacatagcttaagcccaggagtttgagatcagcctgggcagcctgtatctcagagaaaccccgtctctt

SEQ ID NO: 275541 - DNA, 590 bp, Homo sapiens
  misc_feature (565)..(565): n is a, c, g, or t
atggctgcttcttgaggatccactgacgagacacaggcacatccaaagacacacagaggagatccgcccatctggggcagaagccactgcaaccacagattgctaataacacttaaaaggtaacttccacaaagctagaatttcagtgtggattggcctaagggtcagaaactcctgaggattctagtcttagggggacctttaaacttctgtgggcttgagccccaggaaccccagaaggttctcccagtgaagatgtgtgaaactcccggatggctctgctggagcaagggaagagtaatcattgtgaaatacacctagagccttctccagaacaaagaccttcctaggaccttatcctagctgggggaaagtcatttctcccactggagcaagccccttgagtctcctaggctcacatgagggagccttcaaacgtgctgggattatagctgtgagccaccacacctgggcggaaattttagaatcactttgtcacttttacagaaaaaaagcctgcaagattttgattgggattgtgttaaatctatagatcaattttggngagagttactatcttaacaatatta

SEQ ID NO: 275542 - DNA, 623 bp, Homo sapiens
atggctgcttcttgaggatccactgacgagacacaggcacatccaaagacacacagaggagatccgcccatctggggcagaagccactgcaaccacagattgctaataacacttaaaaggtaacttccacaaagctagaatttcagtgtggattggcctaagggtcagaaactcctgaggattctagtcttagggggacctttaaacttctgtgggcttgagccccaggaaccccagaaggttctcccagtgaagatgtgtgaaactcccggatggctctgctggagcaagggaagagtaatcattgtgaaatacacctagagccttctccagaacaaagaccttcctaggaccttatcctagctgggggaaagtcatttctcccactggagcaagccccttgagtctcctaggctcacatgagggagaaataaaaattcatagtcaacaagaatcaagactttagggaaatacatctggaatgctatatccagggaggggaataggaagcagggagggggaaaaactattccactagagacacccttaagagagtcacagcctaaagatacagacctactaaatactaaagactaagaaacttctaatattgaaatgcaaag

SEQ ID NO: 275543 - DNA, 306 bp, Homo sapiens
gatggtgcccaaccccattgagggtgggtctgcctctcccagtccactgactcaaatgttaatcttctttggcaacatcctcacagacacagccaggaacaatactttgtatccttcaatccaatcaagttgaccccatcacacaaggcaaaccactgtccccaaaatgtagagacacaggcacatccaaagacacacagaggagatccgcccatctggggcagaagccactgcaaccacagattgctaataacacttaaaaggtaacttccacaaagctagaatttcagtgtggattggcctaag

SEQ ID NO: 275544 - DNA, 337 bp, Homo sapiens
ttgagaatcactgctttgttgaaaggtatggagagattgagatggaaaaatatagggtagaattaaaacaaaatactttatcataggacagacagtttattatagaaatgggcaagggtgaggaataatgtcaaataagaatgagagagttgggactctagatttccaaaaaaatcaagaactgtattaaaggtggtaaagctgcagaagaacatcagtttgtacttgtctcaaggggaagcagtagtttcacctttaagaaggagatgaagtgaagggctatactggcatatataataaagtatttttctacaggtaactgtattgttacttggcg

SEQ ID NO: 275545 - DNA, 455 bp, Homo sapiens
agtgactgctaaaatggaagagttaaataggatccagggtctcctctcataataccagaaatgtccaggatataatttaaaaatcatacataatatgaacaaccagaaaaatcacaacttgaatgagaaaagccaatcaacaatctaacactgagatgaaagattttagaattatctgacaaagatctaaagtagccatcataaaaatgtttcaccaagcaagtagaaattccttgcaaagatgggaaagaaaagaaaatctcaccaaagaaatggaaagtatgttcttaaagaatcaaatgaaaatgataaaactgaaaaatacaataactaaaataaaaactcactggaaaggctcaagagcagagcaactatgacaaaggaaataagaagtgaacttgaagatagaacaataaaaattacccaatccaaaaaacagagagacaatcaacttt

SEQ ID NO: 275546 - DNA, 373 bp, Homo sapiens
atattcatatttgattctataccaaaactcaataagcagtagtttctatgaaggttagttgcaatgtgaaacctaaaaccttatcaataaactcttcatacttttacattagagttcatcatttggctgggcgcggtggctcactcctgtaaccccaggactttgggaggccaaggcgggcggattacctgaggtcagtagtctgagaccagcctggctaacatggcaaagccccatctctactaaaaacacaaaaactagctgggcatggtggtgggcccctgtagtcccagctacttgggaggctgaagccatagaatcacttgaacctgggaggtggagtttgcagtgagcccagattgcgccactgcac

SEQ ID NO: 275547 - DNA, 376 bp, Homo sapiens
tcaaatgtcaagtcgtttaggtttgttatccttcttcactccaagtgttccattgcttagttccaaaccattatcctctatgaaaagtgttaccagaaatatttggatttgctaagaggtctctgcatgacggttcatgtaaaagccctggctttggaataaggcagaccagagtttcatcagttcagccatgtgttagttgtgtgatctgaagtaagtttcttcacctctctgagcctcgttttccccacatatgagttagaaacatgtatttatttatgaaataggctctccttctgtcacccaggctgaagccatagaatcacttgaacctgggaggtggagtttgcagtgagcccagattgcgccactgcac

SEQ ID NO: 275548 - DNA, 443 bp, Homo sapiens
ctcaattaccacaaccatatcgctaaaaatccctgaagaattctttaactaggctatccttacattacttcaaacctagactacctcaactcttcaggttccccaaaaatcaacatccttccttacttcatttctgatatgaactaagtgaccttttgactccttcaatttttcccatatgtctgtgtcaaactgccaggttttgtcagttcttcaacaccattgtataactgtccctagatatccatgggtgattggttcaagcatctcgcttgaataccaaaatctgcagatactgaagtccttgatataacacaacatagtatttgcacataacctaagcatatcctcctctattcttctaatcaggggtccctaagcctccaggttatggacaggctccggtccttggcctgttaggaaccaggctgcacagcaggaag

SEQ ID NO: 275549 - DNA, 526 bp, Homo sapiens
atcagatttgaaagatagcacgcaaaattgaaaacaaatatgttaggatgagattataggtgttgtttaaacacttaaaaaatattactgcagcataatttttagttagaaatttaattattgaattcaattccctcaattcttcagtgaaataaattgggttccagagagactgagtactgccaaaagttacagtaaaaacaattgaagagtaagagctacaatccaggatgcttgacttctagcccagttctcttcttgagacactggaagtgtctcaagagcaacaaattaaaaacttttggaggtaacaatacttttttccccttctggagagattaatataaataagacattgtagggaaaatagatataattaaagttactgatataaagatttatactgatataaagttactgatataaagttttctattttaaacagccaatacataagtataaaattagtatttaaagcaaaagagctaaaagccctggtatttttctcaatactttgctcatttgg

SEQ ID NO: 275550 - DNA, 208 bp, Homo sapiens
gaggactcccaggacactgtctgagcccagtgggaggaggacacacagccctgatctgccagtcagtggggctgagggtcaagctgtgcgccttgtgtgctggcggcgtcccgcctgggatggatggagatggtctgtactttcatgggtgaattgtagggcccctgaattgtatgtatctcaataaagctgctaaagaataaatgta

SEQ ID NO: 275551 - DNA, 431 bp, Homo sapiens
tgttttgttttgttttttaataaaggggcaacttcatctgtgaaggcagataaaccgggcccagcatggtcaggccgggagcaggccatgggatctcccccaggtccaggcaaggcttgttttacgtctggagagatctggcggtaccagcaccccttccccaaggccacagggatctcaggattgagcccccaaagctgggctctgggtcctcccgccacgtcctctgccgaggcgcggtccccacagggctcctctgtggaatcggaggtctcgccctctcagcgaatggatgcctcagccccaggctccttgggacgaaggcgggcagctgctgtgaagaatcccgctgggtggcagggtgctaacacccgctgtgcacactgagcaccagctgtgtaccaggcaccgtcccaggcctcacagtaggg

SEQ ID NO: 275552 - DNA, 406 bp, Homo sapiens
atacacacatttgttctttctggaaaaagccaattccaaccccagtttataaattaatgcccaggtctcttatgttcttggagcagcgcctcaacggtgacatccagtggcagggctgggttattactgctgggtatatcaagggaagttggagtgatttaattgattcagcagatactgattggatgtctctgtgctcggtgctttagagataagggaaagaggctcagtttttccttctgagagtttataatgtagtagagatgtctctttgtcttattcccttcaaaccttttagcaaaaaggcaaatgcaagtaaatgacaattagactagcccttaacattttgtattagtctcttctcactctgctaataaagacatacctgagactgggtaatttataa

SEQ ID NO: 275553 - DNA, 363 bp, Homo sapiens
agtcactctccaacctggatgaaaagaggaagatatttgccatatcccaaggaggaagaaggcctctaaagccagaagggaagtcctattctctgatatgaggccattcatatgtatatttattaatagtaatgcaatgccctctacaacagggaaaagcactatattaatcaaattttaattcatcttatttttgttagagatttgcattttattatcgctgatgctttattactgtttgttgtttaactggaacccaaaatgtctaaagctcctctaaccccagcttctgtcaaataataataaggaaaaccaccacttgcaggttatacagtaattactactaaataaaactctgtgatc

SEQ ID NO: 275554 - DNA, 141 bp, Homo sapiens
ataaactacacttctggtcctcaagatttagcccaatttgactgggctgtctttttatgttcagtagaattagactatatcacagaaccaccaaacattttttactagtttatggagagaattaccattttctagaggtag

SEQ ID NO: 275555 - DNA, 642 bp, Homo sapiens
atagctgaaattaaaagtactgagcttaccaagtgttgataaggatgtagaggaactggaactttcatacactgctggtgggaatataaaatggtataaccattttggaatacaacttggcagtttatttgtttgtttaggttgtttttactcaccactatgctaacgaggaacttggcagtttctttaaaagataaacatatatctctggtccgtgcctccaagatgacaaagaaaagaaggaacaacggtcatgccaaaaagggccgcggccacgtgcatcctattcgctgcactaactgtacccgatgcgtgcccaaggacaaggccattaagaaattcgtcattcgaaacgtagtggaggccgcagcagtcagggacatttctgaagtgagcgtcttcaatgcctatgtgcttcccaagctgtatgtgaagctatattactgtgtgagttgtgcaattcacagcaaagtagtcaggaatcgatctcgtgaagcccacaaagaccgaacacccccaccctgatttagacctgtgggtgctgccccacgtcccccaccaaagcccatgtaaggagctgagttcttaaagactgaagacagactattctctggagaaaaataaaatggaaattgtacttaa

SEQ ID NO: 275556 - DNA, 413 bp, Homo sapiens
tatcattcacctaacataaaaatcacccttttaaagtggttttcatatatattcacaaaattgtgcgtccatcactactatctaattctaaacattttcatcacctccacaaagaaacctcatacgcatggtcagtctccacacttctttcccctagcccccagcaaccacaaacctaccttctgtctctctggatttgcctgttctgcacttttgcatagaatggaatcctgtgccatgtggtccctttatgcacgatatccaacccagagaaaggccttgcttcctaagccctcctgagactcaccagccacgagcccgcatctatagcaagttcttttgaaggccctctttactgctggacattcttcctttgtgcaacaagtcaataaacccattttggttcagctaca

SEQ ID NO: 275557 - DNA, 463 bp, Homo sapiens
cattgagtcaagtgtatgaattaatcagattttcttagtcattctctactgggaaaaacttaattttataaacttagtttattgtgatttaaatgtacttttaattccatggactttgagaagactcatttaacgcatggaagtataaaacgcgtttttatgtctggtaatgcagattaagtttgcttactgccttaagtaactaaaataaaacaaaattaaaatactcctcaccttgtttaaggctgtatgctccttggaaaaatagtttttctagatatcagcataggcaatagctttggtttgaaaaccagattggcataaaaatcaaaacccatcaaatgaattcattgccttttagagacagagcttggcaaggagctcatctgcactgtgtgccaccccgcatctcactactctgcagccctgttttgcaacaccaaacattggttacaaatggaaa

SEQ ID NO: 275558 - DNA, 161 bp, Homo sapiens
gttttccttaaaactctctaaatggtctttgagtaaaatctgggaattcatttgggcacaggaaaaaagagtagtttatatggtggttaagaggaatccacacagcaagtctttaaatatatttttgtaagataatggaaaccacaaaaaacaaaaaggta

SEQ ID NO: 275559 - DNA, 445 bp, Homo sapiens
tgggccttttgatgcagctatggaaaagtctttccagaaaaatgcacgtgcacataaaattagaatgtttccaagatacgcatggaccctgtgaaacccactgaagattccatggccccagtctttctcaggctaacctctcaagctcttgaaggttataagagggattgatagtccatgattcaggtcttgagataaaaggcacgaacgtccctcccaaggggaaaccatgttgtgagagacccatgtatggctgaactaaacctgtgtgcatgtgagtgaagcagagcctcaagctccagatggatcttgagatggctgcagcctggcttgactgaaacctcatggatgacctcgagccagaacaaccgggctaaactgcttccagattcctgaccctcagaaacagtgaaataataaacgcttgttgttttaaactgctaaa

SEQ ID NO: 275560 - DNA, 672 bp, Homo sapiens
ttttgtatctttagatacaaaatttagagacgggatttcaccatattggccaggctggtctcgaactaccgacctcgggttctgcccgccttggcctcccaacttgctgggattacaggcatgagctactgcacctggctggttgtcttaatacacctcaaacttggtatatctgagatagagctcctgagactccccactctaaaatcatttctccttcagtcttccttatcccattctctctttcagccagattgctggtagtcattcttacgccctccccaaccattagcagctcttgatcatgtttatatcacatgttgcctcttttctccatgtctttgccacagccatagtctagaccatgctatcctctcccaccaagatgactacagtgacctccaggtccatctttttcttacccttgggtcttcaaagtattctccatttaatagccagaatgttcttgtgaaatgtatgtaaatcagatgtttctttcgttacttagaacctttcagcaacttccccttttatctaaagtaaaatgcccaatcccttagtttgaacgtgcctttcctctgtcacactttattatctcaggcccttttccctgcttatctatccttttctgaccatactgactctcctttcagatccttgtatacactgagc

SEQ ID NO: 275561 - DNA, 380 bp, Homo sapiens
cggacctcaactccccagaaaaggcatgttgcctcttttctccatgtctttgccacagccatagtctagaccatgctatcctctcccaccaagatgactacagtgacctccaggtccatctttttcttacccttgggtcttcaaagtattctccatttaatagccagaatgttcttgtgaaatgtatgtaaatcagatgtttctttcgttacttagaacctttcagcaacttccccttttatctaaagtaaaatgcccaatcccttagtttgaacgtgcctttcctctgtcacactttattatctcaggcccttttccctgcttatctatccttttctgaccatactgactctcctttcagatccttgtatacactgagc

SEQ ID NO: 275562 - DNA, 385 bp, Homo sapiens
tcttcactcctctactcctcaactgatcgactatttcttaacactctatgacaaaaaaatcccgatccagccaagcagttccatggacttgtgcctacaccgtgctcattcttgccctttgctcacgccatacatcccatctaaattgtctcctcccctcttaagcaaccaccaacccacattttcttaaaaggtgactctggacatcttatttttgcttcattactctgcttcctggctcttacttaatccacatgttgaggcgtatctgcattccgcctggggtgcctgtgtttctatatccaaccagaatctgcttaacacagcgagttctgggggtgccttactggtgtctagtagagaaaataaaaccatgaacagcagt

SEQ ID NO: 275563 - DNA, 373 bp, Homo sapiens
tcaatttattactcaagatcaagctggtcgggtgcagtggctcaggcctgtaatcccaatattttgggggggccaacgcgggagaatcagttccagagcagcctggacaacacagggaggccccatctctacaaaaacaaattaaaaatataaaaattagctgagcatgctggcatgtgcctgtagtcctagctacagtctgaggcaagagggtatcttgagcccaggagactgaggctgcagtgagctatgattgcaccactatagtccagcctgggcaacagagcaaaactctgtccctaaaacatgaaaaataatacgttttttcaaaaagatcaagcttgctgatcccaatagttgtgctgtcagtgtg

SEQ ID NO: 275564 - DNA, 718 bp, Homo sapiens
tacaggctttgcttatgaaaatcagccagggtgattacgtcttcctggcatttgaagtcaggaagactgtttgatgttaaagggtttacaggaaaggactcttgtggggttcctttagtctaaggcagctagctgttgatgtagtcaggagaccacaaagaatgatttatcccgcccccggtcctctaacagtttcagtctcctgtgactcatgcttctgtgtcttagaccttggggaaagttactccatttcctaggctgagacagggccagcctgtgcttctgtctcctctgcaagctcggcagataatcctatggccctggggagctttgtcagaggcttctccttcatctgggaacttgcccagatctgcccagcctggctgcagagcacctgggaatcaattcccaaatcttaatgccagaaaaggccttaggggtcttaaagatttgttgagtccagaggttcccaaatctggctgcacgttggaatcacctggacaatgggaaaaaagggctcctcctcatcccctttgagtctaattcagtatgtatggattgagacccagaaatcagtgttcttttatactgtcttaaggtcacttaccatggtatgtggcatttggtgactgctgatctagtctcatctcttaattttatttgattttaaaattgtatatgtgtgtttttactttttaagatggagaattattaagac

SEQ ID NO: 275565 - DNA, 553 bp, Homo sapiens
ataccactttcagggagcacaggcaaaacagttattttttaaagaggcatttcccccgtgtactactcttgttttccttttcctggtgtgcaacctgagatcttactgctcatttctcatatacttctctggatctcagctaccacaacgagcaacgagatgacaaagccatcttcttgtgattcaggcaataaagagcaagaagagtctctaataaattgtatcttttccttgattatgtgtccagcttttcataaactatcaatcatgtgtccattgtgctcacttttaattccacctggcatttcacttttcgattaaaatacccacaggttgtggaactaaggcaataaacccatccatctcaaacaaaaggtactttacaattaagacagttccttacaacctacaaaatgtcttcatcaaatcagcttacatcgagcccgtgagttcttcatatgctgcttttatgttccccctaacccttccttgccttggcaatctattagtctaagaattagcaacttcaaagaatttagcaactctgggcaag

SEQ ID NO: 275566 - DNA, 393 bp, Homo sapiens
cagctggtcccaaaccatggagaattttacccacacaaagcccccatttgccaatgcaaatctggtaattggacacttaattaccctatttgcacacataaatgaggggtgttcctgcaagaaatcagagtccactcttacaactttggccgcaagcaatgaaaccacatgcttttgtcaacagttaagttgattagaattgtgtttatttctgctcgtgttaggccacatgtattttcattggagcctgatgtctattgagttaaaagcttagtttaaaaaacctatgttatgcagaaaacctagatagtaattgccaactatgtgccaagaatcctttcatcatgtagagaatacaaggtctgaataaaaagaaatattctttgcaacctc

SEQ ID NO: 275567 - DNA, 383 bp, Homo sapiens
ttctctgggatctacttctctgggatgcccagcaggttcccaaaggaaccttaggtggctgttaggagaagcttggggcagaggctgcagaacaccgcatttcaagatgaagcactgtccatgcatatgggacaaacccgtgcagagaagaccacagtggtagtagaggggagcgcgagaggacgtgagcacaagagatgtttgatatgggccttttttttttctttttttgagacagtcttactctgttgcccaggctggagttcagtggtgcaatcttggctcactgcaacctccacctcccaggttcaagcaattctcatgcctcagcctcctgggtagctgggattacagttgtgtgtcaccacaactagctaattttt

SEQ ID NO: 275568 - DNA, 437 bp, Homo sapiens
attagccaggcacatgcctgtaatcccagctactcagcaggctgaggcaggagaattgcttgaacccgggaggcggaggttgcggtgagctgagattgtgccaccgcactccagcctgggcaacaagagcgaaactccgtctcaaaaaaaaaaaaaaagaagtgaagttctgacatctgctgcaacatgggtgaaccttgaagacattatgccaagtaacacactccagggacaaatgagcaatattgtgtggttcctcatatgaaatatctggaacaggcaaattcataatgacagaaagcagattggaggttaccggggctgcagggcttcgctgcctgatggctgcagagttcctagttgaggtgacgaagaagttctagaaatgcagagtagagatgacggcacaacagggtgaatgtatttaatgccactga

SEQ ID NO: 275569 - DNA, 274 bp, Homo sapiens
cagatgactccaaatctcaatggcactcctacctcttcctgtcaacttcttatgtgggctcctaactgtgactggttcccagctgtattgcttctctgtcattattagtgcttgatgattatcataattaattagcacacatcacctttttcctcaaacattttacttgaggccaggcaaattctagtggtctttctcagatgacttccaaatctcaatggcacctcctacctcttcctgtcaacttcttatgtgggctcctaactgtgactgg

SEQ ID NO: 275570 - DNA, 438 bp, Homo sapiens
atacactgaaatcctttaacatacaccaaagcaatgggagatctgcagaatgcttttgtccatgtttaaccataatgatcaatgcattttgaatagaatattgttatatctactatttagcttaattgtgatcattaacaaagtgcccagactctctgaacattctacatggcatactatttgtgagaagatcagcatgtaaatagttacctctttgtaagctcttctacaaggtggctaaaagcaagaactagaaccagagtccctgcattcaatgaatttcccattattgcccatatcattctttcttttctttctttctttatttctttctttctttctttctttctttctttctttctttctttctttctttctttcttctctctctctctctctctctctttctttctttcttgctttccttcttctttcttt

SEQ ID NO: 275571 - DNA, 384 bp, Homo sapiens
gcactgcctctgtctctgctgtaaacaaccagcatgaatcatcgcggaagtcagtagtcatctctcccccgtttgcaaagactggggaactgcagcatcacagggtgacccgctggaagccacagagggaagataacctggagggaaaactagagctgaaaagctgcagctgggattgaaggctggaggctggagcagtgagcccttctgttctgagtagggctgggctctcccagcaaagggcctgtgtcaccagcagcgaccgctcaggggagccttggtcgctgaatggctctttgggtggtgtggtctccctctggccagacctacagagtggccctccagcacccagccttgctgagtccctgcaggcctgctctgagg

SEQ ID NO: 275572 - DNA, 373 bp, Homo sapiens
tagccatcatggataggaaggtaagagagatcacagagttgtagtttattggagcagagagtgaagggtgataattgctatgggagtggaagaacataacacaggtacctattatacttaaaaaaagcttttaggccagttgcagtggcacttgcctgtaatctcagcactttgagagaccaaggcataaggatcacttgagtccaggagtttgagaccagcaaggtagtgaaatctcgtatatgtgtgtgtgtgtgtgtgtgtgtgtgtgtatacatatatatgtatgtatatgtatgaatataggtgtggtgcacctgtggtcccagtgagcccagtggctgtgcctgggcgacagtaagaggccttgtca

SEQ ID NO: 275573 - DNA, 359 bp, Homo sapiens
tagacttcgtctcagaaaaaaaagattcgagtttttaaaaaaagaacattcttaagtctttagtatactgaatggtatgagcagcaatagagggttgtggccttctgaaagtaaggaaaattataatgacagtataaggtagtatgaggggcatagtcttttatttctgaccagtgtcatcaaggagggctttattttttttaagacggagtctcgctctgtcaaccaggctggagtgcagtggcacgatcttggcccactgcagcctccacctcccggactcaagagattctcccacctcagtctcccaagtagctgggattacaggcgtgcaccaccacgcctggttaattttttgt

SEQ ID NO: 275574 - DNA, 300 bp, Homo sapiens
gctacttaactttcctgtgcttcattatttccatctgtaaagtgaggaaatgaaaagaatcaggattaaatgagttaatacatccaaattattcatcagtgactgaccctaaataagcactagctaatagctatagttacttttaaattactgtttttatttttaaaactgggctgaagctaatatttttgaagaatgcaatttgaccaagaagtctgttccgctaaaaacctccccacttttgtagactgggtaaacagaaaccaattattgcttctctagaggaatatcaaacttatt

SEQ ID NO: 275575 - DNA, 334 bp, Homo sapiens
tacaagagttcaaatcagcagagactgctgttgtgaatgcttaaagtaggtgtggcagcaccgaacgcacagaaactgaccactctggtcaaacaatagctccctgacattgtagacctgcggatgaacccaccagatttgtttctcttatcactcatccatctccagctttttgtgtattcacgttccaggatgggagagaagcggaggtaattttctgcttctttaaaataccagtgcacagaataaatgcttgccaccacactaatgccccctgctgatatgcttactgttggtggcctaaaatttggaacatactgtgcttttaagaact

SEQ ID NO: 275576 - DNA, 406 bp, Homo sapiens
tcatagtttactgatttctgttagtcaagagtaggtttatacataaactggtcaatttccttaccatgaaaagataggcccagtttagtttatattgtaaatcaaaacatcctttaacaatccagaaggctgcaaagttaagattacccctattaactaacagaaagttatactatttactgattatgttgtaagacaaactactgcactgttctgattctatgtggtagcatagtgtttattgttagagtatgtctcaatatataaaacaaaaaattaactttagtaggtataaggccttgctttgacattttattgacagtgaagtttgaatacctataaatcttctttaaaattcccaaagtcatgatgacttttaaatactcttctgttaagaacttttttt

SEQ ID NO: 275577 - DNA, 445 bp, Homo sapiens
atcaaaagaaaataaaagaatgagatagaagtccagatggcctcaacattcaagcattcagttttcaaacaactaacatactcatatgtgtgtgtgtttgtgtaatactatttccaaacttggatgttcatatctcaggtgaaaaatgagtgctcaaagtcacctcccagccaattgttccattttagcagcctcactatatttgtgtgcactgtactatttatccaattactcattttttacacttttacctattattttataaataagagtaaacaagaaatattaaatgtctgacactggcaataaaatgcatagctttcatacacaatctagttgagtcaaagaaggaacttatcaagcatgccaatagtagaaaatcattagtctgaatcgaattcctgctggacataagtcagttgaatgtgtgttcagttgtaaagaa

SEQ ID NO: 275578 - DNA, 337 bp, Homo sapiens
acacacagcacacttgtactcggcaatctgagctccccagatccacataaactcgctcatggatgacctctaaccacacaatcacaaagattctcgctatggtgggtggaggaggtaaagaccttttctgtttgtatttttttaaaggtggtattctttggctgtaggggatagagtgtaagcttggagcccaacgcaatcctgactaccccttattgtataaccttggcaagtgacttaacctttctgagccgattttctgatcgagaaaacagagataagatatacttctatggagtgttgtgaagaataaataatataacttgtattggctgcc

SEQ ID NO: 275579 - DNA, 1249 bp, Homo sapiens
cattgttgggatgcatctgaggataacatcagatccaatgaggcaaaagtaacaccagagaagcctatgatgacaagcaggtggtcacagagatcatggcaagatgttttattccaactctgataacaactacttcctgggaaagttttcattttattggtcatgagattcgaattactgaggccatggattgttatggtgctgttgtttggccatcggtataatttcatacagaatttgttacattccaattatttttccagccggttttattcattattatgttctatttggaagaagaaaacaggttccatattccttctttgtgacctcaaatagtactatgttttagaaatcatgtgactaggaaattatttctcccaattaattctgtaattctatttcttttcttttctttttttttgagacagagtcttgctctgtcacccgggctggagtgctgtggcttgatctcagctcactgcaacctctgcctcctgggtttaaatgattcccctgctgcagcctcctgagtagctgggactacaggcatgcaacaccacaccaagctaatttttgtaattttggtgggaatggggtttcaaccacgttggccaggctggttttgaactccttgcctcaagtaatccatccacctccacctcccaaggtgctgggattacaggcataagctaccacgctgggcctcaattaattctatttctgactttattgaaatttgtaggattaatacagggtgttgtttacttcttcagtttttaaaataagagtttagagcagtaaacatttttatttccccttttatcagctccatttgagttaaacaattacattgaaatctatatgagtctcacatgtagaatgtcctcaaagaccctcaatcctttaccaactgtcccatgaagagtaatggacccaccaccccacctgccccaatcccacacaccacttggaaatgactagtattatcagaagttgcttcctttaaaaatgatcaaacctaagcaattgaactccacatttttagttatttctcttttcctctcaataatccccaaggaatttttctagcagaaatgttgaacctctcagaggatgcacttttgttcatattttttggagtgatgtacaagtacacacatgagtactctcatgtactcatatgagcacgcatacatagcataacattagcagcatatttgtccaataaagtttaattttactttct

SEQ ID NO: 275580 - DNA, 403 bp, Homo sapiens
aaaggatttgtttacttaatccttattttttcactctttcagattctgggaaatataccagataggttttaccaagataccaaatgactatgaattagacctgattttttcaatgaggtgtacctttcacctgatatactgaaagtttggagaatatctaaacatttttcattttcataaatagttttggataagatttatttttgttatcaggtggttaaattatgtttttgtcaaaatttgcaactgcagatttagctcattcaagttcaaaatctttgtcactgggcacagtgtctcacgcctgtaatcctagcactttgggaggctgaggcgggaggatcggttgagtccagagttcaagaccagcctgggcaacatggcaagaccccacctctacaaa

SEQ ID NO: 275581 - DNA, 1066 bp, Homo sapiens
cacatgggaattatgggagctacaattcaagatgagatttgggtggggaaacagccaaaccgtatcagcccctatgccaaataacatattattagtagaagttactcagagaaatgccgtatactaatacgtgttacaaggtgagtgtaggttgagtatcctttattcaaaatccttgagaccagaagtgttttggatttgggttttttttccccagattttggaatgtttgcattataccaattatgcattcgaaatccaaaaatcagaaatgccctactaagcatctcctttgggcatcatgttggcacttaaaaagtttcagcttttggagaattttggatattcagatttgtgatgcctaacctgtagtatgtagaacaagcagtggttttggtatacagagagaagagatactcagctagaccaaactgctctgcaaaattttcagaaatgtcttaaaagttatttaaagttaccaattagggaagggaggagaggacatcatcctaggcaaaggagagagcatgagctcagtggtacccagcaagaaaaacacagaatgtatttacagggtgtgaggttgacagttctgaaggacatttggtaatttgaagagatgttaaatgttacagataaaatacacatagcttagttaatattccttctgaaactttttatacatacgcaaaccatatacagccatctatatatataggtgtgtgtactcttttttttggatacaaatggaatcagtagggtgtttatttttcagtatatcatgggcagctttccatgtttctacaataataacacttcaggtactgcactgtttggaatataatcatagatgatttcatcaaatgaatgaaaacatttaaacaaaactttacaaaagacccagaaatactaaaagggaaatgaatagggatactaacattcagatagataatctggtttataaaatatctttactttccttcccagcaagccaccctaccttgtttccaagttatctcagtagagccagaagggccaacttttacctaactccttggggaaattt

SEQ ID NO: 275582 - DNA, 321 bp, Homo sapiens
gttagtgctgcttcatcagatatcatgttagcaagcagccagtgcaaaaaaaaaactcaacctacgtgaagcaccaacatattggccatcctggatgtgtgttgtgaaatcaggtgcatgtgacgtagacatacctgtgaaaaattgcattttagatgtatttgttaatgaaactacaaataatgttaaaatttttaatgcaactcaaaaatagtccaacagatggactgtgcaacgaaggaatagaaataaataaaaatcatgaaatgtctcattgttcttccctgctatgaataaaaacaagaattttgaaacactaca

SEQ ID NO: 275583 - DNA, 775 bp, Homo sapiens
cgtggtggcaggcgcctgtagtcctggctattcgggaggctgaggcaagagaatggcgtgaactcaggaggcggagctggcagtgagccgagattgcgccactgcactctagcctgggcaacagagctagactctgtctcgaaaataaaataaaataaaaaattttaaaaaatttaaaaaataataaaattaaaaacaacgaggcatcagcagttatactgcacataaaaactaaatgagtactggatgagaactgtttgcactagaatcgcttacggaacttcccagttcaatactacacattaatagaaaactacttttccaaaaaatctactcttaaaaactcgccccatcacacatttaagcatattttaaaaacaaaatgatcgaaatagattctggttatcacaaggacaaagactagtaaagtcttatcttctctggtacctaccaatcctagcccacagtacataccgtggaaataacagtggtactagtatgggctgtgaggttaggcatccttaggtttgaattgtgtacctcaattgtgtactacttactagtaaattactctgtacctgtttcttcagctgttctaaaggggatgataaaaatacctgtctctcaaagtggctatgagaataaacatgtgaaaatgctggctcactactggcatacagtacacactctaaatatttattaattacagtggaaagacaaatgactactaaagcaataaaagcaaacataaaaagataggccaggcgagatggct

SEQ ID NO: 275584 - DNA, 705 bp, Homo sapiens
tgaaatagtgttattaagtgttgaaagtaccataaaaatataagggaaaataagctttcctagaatttttcagtgttctagtttttaaacagtgatgttttttattaacctatttcatccattcaaagacaggcctttctccacaccacattttcctctaaaatcatgataacacttttaaattgatggtgtcttccagtgtgtatcagccagatggcagtgtgttacagttccaggaaaactcgttcacatcttccgtaagatcaagaaggctctggcatcagataagatcaaatgttgtctttctgttttaaatatgtgccgcaaagagatttgcttacaatctattgagaaagctaaaacagagcagacattgtcctgttgcggggtagatgaatagcctaagaatagtttagacaaattctgaaaacgaatttaccttagaagatgttcatgttagatctggtaaaagtaacatgttatttttctgtcaagccctttttgtacttgccgtttattacatattttagatttattttttattttcgaaacatccaaaaaggaatgctaattagtgaaatggaagaatttccatttcaacaccttaggaaaaaaaaaactgacttgacatacctaagcgttgttacctagataaatgtaggtttgatttcttggaagcatcacttaagactttccattttcttc

SEQ ID NO: 275585 - DNA, 759 bp, Homo sapiens
tgaaatagtgttattaagtgttgaaagtaccataaaaatataagggaaaataagctttcctagaatttttcagtgttctagtttttaaacagtgatgttttttattaacctatttcatccattcaaagacaggcctttctccacaccacattttcctctaaaatcatgataacacttttaaattgatggtgtcttccagtgtgtatcagccagatggcagtgtgttacagttccaggaaaactcgttcacatcttccgtaagatcaagaaggctctggcatcagataagatcaaatgttgtctttctgttttaaatatgtgccgcaaagagatttgcttacaatctattgagaaagctaaaacagagcagacattgtcctgttgcggggtagatgaatagcctaagaatagtttagacaaattctgaaaacgaatttaccttagaagatgttcatgttagatctggtaaaagtaacatgttatttttctgtcaagccctttttgtacttgccgtttattacatattttagatttattttttattttcgaaacatccaaaaaggaatgctaattagtgaaatggaagaatttccatttcaacaccttaggaaaaaaaaaactgacttgacatacctaagaaaaggccaagttgatttactttgtcagtctcttcatttgtgatacgtaaagtccgttgttacctagataaatgtaggtttgatttcttggaagcatcacttaagactttccattttcttc

SEQ ID NO: 275586 - DNA, 345 bp, Homo sapiens
tgatgcacacacatcccactgtgttgccatggctgctggcatccaagtgagcatgaatcctgctgccaccatcttgataaagtgctttggccagcaccacccattaaagtgtaatgaccagcagattgggaacacctcagtccctccagcacagcaggttcctaacctcaaggggccagagagcaaagccagggtcctggtaccagccccccaggagttacaggacacagtccatgagtgatgagctgagccttgttcccctgaaatcttccagaaatgaaaccagttgactgaacccaccctatactacaatcaaacccccaaggacatcaaagaggataagag

SEQ ID NO: 275587 - DNA, 346 bp, Homo sapiens
tttatttttcaagcagaagttacattctctatcaatatgacattacattatagtgctgctagttcttcagggatatgattgattcctatagtagggtggatataggagccttaggcagtgatgctgtatctcaagtgactaagataagatacaggcagctcactgcacagagagccactagccagtttacctagcatgacttacagagcagttttcaccaacactgtacttagactggcatttttagtcctacttttaaatttgaaaagccaaccagtggtcaatcaggaacacattcaatcccatatatttgtaatatttatcttactttatggcaggaattcta

SEQ ID NO: 275588 - DNA, 336 bp, Homo sapiens
gagcattcttgtacatggctcttgtagcacagtgaacacatttctgttgggtgtagagatgtacgtatatgtgtgtgtgtgtgtgtgtgtgtgtgtgtgtgtgtgcatgtatgcttcttaaagagcagctacaatatattgctgtttgcatatacaagcaaaatttctggaaatattaataacaatcatctctgggagtaagatgatgagaatgagaatgctgactttcattttacctttctgaattctaaaaagatttaagcattcagcatgtgttaatgttatttaaaaaaaaactagtttaaaaaataaaatgtttcatccctgagaggtcta

SEQ ID NO: 275589 - DNA, 315 bp, Homo sapiens
gactgcaggcatgtgccactgcaactggtgggtagcgctggagtcttgagcaaatttaacttttagtttctatgcatgttaaatggaaattattaggttggtgcaaatgtaattgcggtttttgcagttgaaagttaggaggccaggcgtggttgctcatgcttgtaatcccagcactttgggcggccgaggtggatagatcacttgaggtcaggagtttgagaccagcccagctaacatggtgaaacccatctctactaaaaatacaaaaattagctgggcgtgatggtcagtgcctgtaatcccagctactcg

SEQ ID NO: 275590 - DNA, 418 bp, Homo sapiens
cagcttatcctcccaaattcagagactggagctagagttcatagccacaactgatacttaaagagagtcttgtagtttacaaagtatttttcatgaccagggaaaacataactgcactcatgcaagaaggaaggagtatcagagggcgaagaagagaacggaggctgtttatataaggatgaattgggatggtatggagccacattcccggggctcttcttggccaagaagtagcttacgcaaggcccatctggctgggtgagttcatttctcagtttgctctccccacgttagtggagatatatggtcggctgctgcctctgctatgcctccctctcctctggcacgcagcaggaggaggatctccacacccagcctctcctcctgagggcccggctcacgtgcacagctgtgtgac

SEQ ID NO: 275591 - DNA, 917 bp, Homo sapiens
cctctgttctaatctgaatcctggtacagtcagactctatcttggacccactggggcgaacccacgagtcttttggtttgcttttaattcctgcaccagctgcggcctttatctgcagccagaaagcagggtttaccgctggccccacagcgccatacggtctggggaaaagaaggaaacccaatagtacacaaacaaaggcccaaagagaaaccttccaagtgctctatgcctcacggtttagcagaaaatatcaagcaactctcaacctagctggtctgtagcttccacaaatgaaatactgtattcattgcagcctttctggttgagatatttcaaatatttggtggagcttttaatgagacggagagacactctcgagtgtggaagaaaaacgtgagggggtgtgaggataaggcgactttaggacagaaaaaacaaagagacaaggaagccacgtaaacgttttcgggtaggcgtgaggcgatgtcagttttgaaccccgttatgttaggtagagagcgcagccctcttctagcacaaacaccgtttcccacattgaagaaatcacagagatcagcaactctagagtgcgatgaagaagcttcactctgggagaacccccttcgtgaccacggtctctttcctgccaggtaagtgggaatgagcgcatgccctgcagggacagcacagcgtcctcgccctggtcggacgctcagggtcaccaccctacccactgcccccttcgccattcttccaaaccactctctgccaaagattccaccgacagtcaccccacacgacaacccaggccgcctttcagcagtggctcccgcccgcaaccacgcgccctctcacccccgcggttctgcccgccgcctctgtccagtctgtgcacttcacctccctggctcccg

SEQ ID NO: 275592 - DNA, 437 bp, Homo sapiens
ggttaggcacagtatgatagggaaaagtgatgcaggccataaaagtgatgcagtatgatagggaaaagtgatgctggctggccctgtgactaagttaggattgcacactgtagcctgaagtttagaggatttggatattaaaagaaattgtgggccgggcgcggtggctcacacctgtaatcccagcactttgggaggccgaggcaggcagatcacgacgtcaggagattgagaccatccaggctaacacggtatttttttctctactgaaaaaaaaaaaaaaaaatttagccaggcatggtggcatgcacctgtagtcccagctacttagcaggctgaggcaggagaatcacttgaacccgggaggcggaggttgcagtgagctgagatcgcaccactgcactccagcctgggtgacagagcaagactccatctca

SEQ ID NO: 275593 - DNA, 607 bp, Homo sapiens
tcaaaaaaaaaaaggaaaagaaaagaaaactaaccaggaaggaaactgcaatccatgtaccttagaccctggaaactccacttttttatttaatcagagctgaaggatgtcagacgtcacagccatggcccagggaatacaggattatgatgggaggaatggtgaccaattgcttctcattgagaaaggaataggcctaaagtatgagtagcaagaaggaaattagatttgaactaagcggaaacttcttaacctgtctaggaaagatgtttcatctcttagaaggggtttgatgtctttttacacatggggaaactgaggctggttatgcatggcctatccagagtcactcagcagagatttggggctcccacccagccacttgaaattctgcaaactttcaagaacagactaaatttttatttacaggagatgatttcatgcttagaagcaaatgatgaaataacttctctggagatctcattcaatactatgattctatgaaatggacaggaaaagaaccaaactagagttggtgacagcacaagaaaaattatggtatccatgctggtctttttttaagaggttagttaccttgaaaagctca

SEQ ID NO: 275594 - DNA, 380 bp, Homo sapiens
tggtctcgatctcctgacctagtgatccgcccgcctcggcctcccagagtgctgagattacaggcatgagtcaccgtgctgggccagcctcttaacattttaacgtctctgaatttagcatgcatcttataattatagtggacagctttctttctttctttctttctttcttttttatgggacgttttaaaggatgtcttattacttttgccagaaaaacagtacatcttttattcagtgacatcctagattcaatgaaatatggtaagttttgaaatctaggtaagaagaacaattttgtagttgaaaataaattcttaaaattgtcctaaaaaatggcagaaaacctgactgagtcagtaagtatagaagatattgga

SEQ ID NO: 275595 - DNA, 1470 bp, Homo sapiens
ccaggatggtctcgatctcctgacctcgtgatccacccgccctggcctcccaaagtgctggggttacaggtgtgagccaccacgcccggcaacacactctttttccctttttaaggaagagaaaggcagagagcaccaagcagataggaggcagggagctggaagtcctccctttgataaaggaggcagttagttgagagtcctctaaagaggctatagattgatgcagctgggaaacggatgggaagaggtgaaggttgcagagccaggaagggcacagttttttttgcctttagaaacctcccttttccttaaccctaatgattctttcatgtttttccctttcttcacaacatcattccctgattccttgaaaatatgaaaaatcctaaaaagaccatgcattgtaattgctttcattttttcaataaaacttctttagtgtttcattatggagaaattaggggaaaaaaagcagataaatgggagaaattaaaaagaagaaaccctctcctctgtatagtcccatcaccaagagataactgttggcaatatccagtaaatattcttcgaatgtttgtcatatatatagttgtttttaagcatttgttttcattccagaaatatacattttaatctaagtgtcatttcttcatacatccagaacaggtatatttacattttctgtcagttgttacagaagatggcccagagcccaaggacaaaggatcattgccacaaccacccattactgaagtggaatcacaggtgttctcagaaaaacttgctactgacacctctacatttgaagctacctctgagggtaccttagaactgcagcagagaaatcccaaagcggagagactgaggtggtcccctgcccaggaggaaagtttcaggcagatggttgtcatccataaggaaattcccacagggaagaaagaccatgaatgtagtgaatgtggtaaaaccttcatttataactcacatcttgttgtccaccagagagttcattctggagagaaaccctataagtgtagtgactgtgggaaaactttcaaacagagctcaaacctcggtcagcatcagagaattcatacaggagagaaacccttcgaatgtaatgaatgtgggaaggccttcagatggggtgctcatcttgttcagcatcagaggattcactcaggagagaagccctatgagtgtaatgagtgtgggaaggcctttagtcaaagctcatatctaagtcagcatcggagaattcacagtggagagaaaccttttatatgtaaagaatgtgggaaagcttatggatggtgctcagagctcattagacatcggagagttcatgccagaaaagagccttcccattgaattgaaggggagaacgtctccagacagaattctacatcggtctaatctactttaggactggatcccataaaagttataagttccttaaaaaaaatc

SEQ ID NO: 275596 - DNA, 2090 bp, Homo sapiens
gcgacgacgacaaggatggggcccatctcttcggagcctaaggatccagcccaggtccagccctgcgcagccgcccaccaagctgccagaagacgagccggacgcccaaggctacgagaggacgattgcagaattgtacaggctagtggttggggaatattttttcgtggaagggaccgtcttccttagctgtggccctctcatcaggtctgggaagaggtaattggaaaatagaactcatggagaagtgttaccacaggccatggacaaggccagaatttccctgacatctgtccgccagcaccgcccttcaggtacaattccacaagagaccccccaaacttgatgaagtcacccgcttacaagggctcactctccacctgcgcaaggactgcaattcccaggggcctccagggcacccggccgctccagtccagtcgtgcaggcggcgcgctctttctcgctccgctcaagtccaggaaccggttcccgggctcccagcctctcggcagcgcccacgcgcctgggccaaagtccgcgaacggaagccggcggcgaggaggattctgggagttggaggccgaggctgcgacctgcgcaggcgcaaacctgcccctggggtgagggctgtaagtggcgcgattcgcggcagcgccccgatggaacctcctggtcctgtgagggggcccttgcaagattccagctggtatgagccttctgcagagctagtgcagactaggatggctgtatcactaacagcagctgaaactctggcccttcagggtacacagggacaagagaagatgatgatgatgggaccaaaggaagaggaacagtcttgtgagtatgagaccaggctacctgggaaccactctaccagtcaagagatcttccgccaacgcttcaggcatctccgctaccaggagactcctggtccccgggaggccttgagccaactacgagtactctgctgtgagtggctgaggccagagaaacacacgaaggagcagatcctggagttcctggtgctggaacaattcttgaccatcctgcctgaggagctccaatcctgggtgcggggacatcaccctaagagtggagaggaggctgtgactgtgctggaggatttagagaaaggacttgaaccagagccgcaggtcccaggccctgcacatggacctgcacaggaagagccatgggagaagaaggaatctctgggagcagcccaggaagcactgagcatccagctccagcctaaggagacccagcctttcccaaagagtgaacaggtatatttacattttctgtcagttgttacagaagatggcccagagcccaaggacaaaggatcattgccacaaccacccattactgaagtggaatcacaggtgttctcagaaaaacttgctactgacacctctacatttgaagctacctctgagggtaccttagaactgcagcagagaaatcccaaagcggagagactgaggtggtcccctgcccaggaggaaagtttcaggcagatggttgtcatccataaggaaattcccacagggaagaaagaccatgaatgtagtgaatgtggtaaaaccttcatttataactcacatcttgttgtccaccagagagttcattctggagagaaaccctataagtgtagtgactgtgggaaaactttcaaacagagctcaaacctcggtcagcatcagagaattcatacaggagagaaacccttcgaatgtaatgaatgtgggaaggccttcagatggggtgctcatcttgttcagcatcagaggattcactcaggagagaagccctatgagtgtaatgagtgtgggaaggcctttagtcaaagctcatatctaagtcagcatcggagaattcacagtggagagaaaccttttatatgtaaagaatgtgggaaagcttatggatggtgctcagagctcattagacatcggagagttcatgccagaaaagagccttcccattgaattgaaggggagaacgtctccagacagaattctacatcggtctaatctactttaggactggatcccataaaagttataagttccttaaaaaaaatc

SEQ ID NO: 275597 - DNA, 2150 bp, Homo sapiens
gcgacgacgacaaggatggggcccatctcttcggagcctaaggatccagcccaggtccagccctgcgcagccgcccaccaagctgccagaagacgagccggacgcccaaggctacgagaggacgattgcagaattgtacaggctagtggttggggaatattttttcgtggaagggaccgtcttccttagctgtggccctctcatcaggtctgggaagaggtaattggaaaatagaactcatggagaagtgttaccacaggccatggacaaggccagaatttccctgacatctgtccgccagcaccgcccttcaggtacaattccacaagagaccccccaaacttgatgaagtcacccgcttacaagggctcactctccacctgcgcaaggactgcaattcccaggggcctccagggcacccggccgctccagtccagtcgtgcaggcggcgcgctctttctcgctccgctcaagtccaggaaccggttcccgggctcccagcctctcggcagcgcccacgcgcctgggccaaagtccgcgaacggaagccggcggcgaggaggattctgggagttggaggccgaggctgcgacctgcgcaggcgcaaacctgcccctggggtgagggctgtaagtggcgcgattcgcggcagcgccccgatggaacctcctggtcctgtgagctgcaagatagaaagcaacatatgcccccaggtggcctccctcaccctggcaatggaaacgaacagccgagcttcaccggacaagactagaaatcgttcctccacccacccagagacaaagcatatttgacttcttcctctactggggcccttgcaagattccagctggtatgagccttctgcagagctagtgcagactaggatggctgtatcactaacagcagctgaaactctggcccttcagggtacacagggacaagagaagatgatgatgatgggaccaaaggaagaggaacagtcttgtgagtatgagaccaggctacctgggaaccactctaccagtcaagagatcttccgccaacgcttcaggcatctccgctaccaggagactcctggtccccgggaggccttgagccaactacgagtactctgctgtgagtggctgaggccagagaaacacacgaaggagcagatcctggagttcctggtgctggaacaattcttgaccatcctgcctgaggagctccaatcctgggtcccaggccctgcacatggacctgcacaggaagagccatgggagaagaaggaatctctgggagcagcccaggaagcactgagcatccagctccagcctaaggagacccagcctttcccaaagagtgaacaggtatatttacattttctgtcagttgttacagaagatggcccagagcccaaggacaaaggatcattgccacaaccacccattactgaagtggaatcacaggtgttctcagaaaaacttgctactgacacctctacatttgaagctacctctgagggtaccttagaactgcagcagagaaatcccaaagcggagagactgaggtggtcccctgcccaggaggaaagtttcaggcagatggttgtcatccataaggaaattcccacagggaagaaagaccatgaatgtagtgaatgtggtaaaaccttcatttataactcacatcttgttgtccaccagagagttcattctggagagaaaccctataagtgtagtgactgtgggaaaactttcaaacagagctcaaacctcggtcagcatcagagaattcatacaggagagaaacccttcgaatgtaatgaatgtgggaaggccttcagatggggtgctcatcttgttcagcatcagaggattcactcaggagagaagccctatgagtgtaatgagtgtgggaaggcctttagtcaaagctcatatctaagtcagcatcggagaattcacagtggagagaaaccttttatatgtaaagaatgtgggaaagcttatggatggtgctcagagctcattagacatcggagagttcatgccagaaaagagccttcccattgaattgaaggggagaacgtctccagacagaattctacatcggtctaatctactttaggactggatcccataaaagttataagttccttaaaaaaaatc

SEQ ID NO: 275598 - DNA, 1990 bp, Homo sapiens
gcgacgacgacaaggatggggcccatctcttcggagcctaaggatccagcccaggtccagccctgcgcagccgcccaccaagctgccagaagacgagccggacgcccaaggctacgagaggacgattgcagaattgtacaggctagtggttggggaatattttttcgtggaagggaccgtcttccttagctgtggccctctcatcaggtctgggaagaggtaattggaaaatagaactcatggagaagtgttaccacaggccatggacaaggccagaatttccctgacatctgtccgccagcaccgcccttcaggtacaattccacaagagaccccccaaacttgatgaagtcacccgcttacaagggctcactctccacctgcgcaaggactgcaattcccaggggcctccagggcacccggccgctccagtccagtcgtgcaggcggcgcgctctttctcgctccgctcaagtccaggaaccggttcccgggctcccagcctctcggcagcgcccacgcgcctgggccaaagtccgcgaacggaagccggcggcgaggaggattctgggagttggaggccgaggctgcgacctgcgcaggcgcaaacctgcccctggggtgagggctgtaagtggcgcgattcgcggcagcgccccgatggaacctcctggtcctgtgagggtacacagggacaagagaagatgatgatgatgggaccaaaggaagaggaacagtcttgtgagtatgagaccaggctacctgggaaccactctaccagtcaagagatcttccgccaacgcttcaggcatctccgctaccaggagactcctggtccccgggaggccttgagccaactacgagtactctgctgtgagtggctgaggccagagaaacacacgaaggagcagatcctggagttcctggtgctggaacaattcttgaccatcctgcctgaggagctccaatcctgggtgcggggacatcaccctaagagtggagaggaggctgtgactgtgctggaggatttagagaaaggacttgaaccagagccgcaggtcccaggccctgcacatggacctgcacaggaagagccatgggagaagaaggaatctctgggagcagcccaggaagcactgagcatccagctccagcctaaggagacccagcctttcccaaagagtgaacaggtatatttacattttctgtcagttgttacagaagatggcccagagcccaaggacaaaggatcattgccacaaccacccattactgaagtggaatcacaggtgttctcagaaaaacttgctactgacacctctacatttgaagctacctctgagggtaccttagaactgcagcagagaaatcccaaagcggagagactgaggtggtcccctgcccaggaggaaagtttcaggcagatggttgtcatccataaggaaattcccacagggaagaaagaccatgaatgtagtgaatgtggtaaaaccttcatttataactcacatcttgttgtccaccagagagttcattctggagagaaaccctataagtgtagtgactgtgggaaaactttcaaacagagctcaaacctcggtcagcatcagagaattcatacaggagagaaacccttcgaatgtaatgaatgtgggaaggccttcagatggggtgctcatcttgttcagcatcagaggattcactcaggagagaagccctatgagtgtaatgagtgtgggaaggcctttagtcaaagctcatatctaagtcagcatcggagaattcacagtggagagaaaccttttatatgtaaagaatgtgggaaagcttatggatggtgctcagagctcattagacatcggagagttcatgccagaaaagagccttcccattgaattgaaggggagaacgtctccagacagaattctacatcggtctaatctactttaggactggatcccataaaagttataagttccttaaaaaaaatc

SEQ ID NO: 275599 - DNA, 1228 bp, Homo sapiens
tgtagggggaggtgccaagttcaaacctctcttgggccaggtagagcagttagtatgtgtttctgtgtctgtcttttctgccctcgagccctgaatgagaaagagactctagctcctcttcttcccttgtgctgactctgaggaggctctctaaagtctccttggaagctttggtccaaggagggtcacatctgcaagtgtccaggcaggggacagaaaccacactagtaatttgaagaaaatttaaactgagtggtgcctgatcacctccaggtcccaggccctgcacatggacctgcacaggaagagccatgggagaagaaggaatctctgggagcagcccaggaagcactgagcatccagctccagcctaaggagacccagcctttcccaaagagtgtgtcatttcttcatacatccagaacaggtatatttacattttctgtcagttgttacagaagatggcccagagcccaaggacaaaggatcattgccacaaccacccattactgaagtggaatcacaggtgttctcagaaaaacttgctactgacacctctacatttgaagctacctctgagggtaccttagaactgcagcagagaaatcccaaagcggagagactgaggtggtcccctgcccaggaggaaagtttcaggcagatggttgtcatccataaggaaattcccacagggaagaaagaccatgaatgtagtgaatgtggtaaaaccttcatttataactcacatcttgttgtccaccagagagttcattctggagagaaaccctataagtgtagtgactgtgggaaaactttcaaacagagctcaaacctcggtcagcatcagagaattcatacaggagagaaacccttcgaatgtaatgaatgtgggaaggccttcagatggggtgctcatcttgttcagcatcagaggattcactcaggagagaagccctatgagtgtaatgagtgtgggaaggcctttagtcaaagctcatatctaagtcagcatcggagaattcacagtggagagaaaccttttatatgtaaagaatgtgggaaagcttatggatggtgctcagagctcattagacatcggagagttcatgccagaaaagagccttcccattgaattgaaggggagaacgtctccagacagaattctacatcggtctaatctactttaggactggatcccataaaagttataagttccttaaaaaaaatc

SEQ ID NO: 275600 - DNA, 1206 bp, Homo sapiens
tgtagggggaggtgccaagttcaaacctctcttgggccaggtagagcagttagtatgtgtttctgtgtctgtcttttctgccctcgagccctgaatgagaaagagactctagctcctcttcttcccttgtgctgactctgaggaggctctctaaagtctccttggaagctttggtccaaggagggtcacatctgcaagtgtccaggcaggggacagaaaccacactagtaatttgaagaaaatttaaactgagtggtgcctgatcacctccaggtcccaggccctgcacatggacctgcacaggaagagccatgggagaagaaggaatctctgggagcagcccaggaagcactgagcatccagctccagcctaaggagacccagcctttcccaaagagtgaacaggtatatttacattttctgtcagttgttacagaagatggcccagagcccaaggacaaaggatcattgccacaaccacccattactgaagtggaatcacaggtgttctcagaaaaacttgctactgacacctctacatttgaagctacctctgagggtaccttagaactgcagcagagaaatcccaaagcggagagactgaggtggtcccctgcccaggaggaaagtttcaggcagatggttgtcatccataaggaaattcccacagggaagaaagaccatgaatgtagtgaatgtggtaaaaccttcatttataactcacatcttgttgtccaccagagagttcattctggagagaaaccctataagtgtagtgactgtgggaaaactttcaaacagagctcaaacctcggtcagcatcagagaattcatacaggagagaaacccttcgaatgtaatgaatgtgggaaggccttcagatggggtgctcatcttgttcagcatcagaggattcactcaggagagaagccctatgagtgtaatgagtgtgggaaggcctttagtcaaagctcatatctaagtcagcatcggagaattcacagtggagagaaaccttttatatgtaaagaatgtgggaaagcttatggatggtgctcagagctcattagacatcggagagttcatgccagaaaagagccttcccattgaattgaaggggagaacgtctccagacagaattctacatcggtctaatctactttaggactggatcccataaaagttataagttccttaaaaaaaatc

SEQ ID NO: 275601 - DNA, 2112 bp, Homo sapiens
ggggctttcaccatgctggccaggctggtctcgaactcctgagcccagctgatccacccgcctcggtttcccaaagtgctgggattacaggcgtgagccactgcgcctggccagaactcagtccttacagaacatcagagaatccatacaaggaattgtacaggctagtggttggggaatattttttcgtggaagggaccgtcttccttagctgtggccctctcatcaggtctgggaagaggtaattggaaaatagaactcatggagaagtgttaccacaggccatggacaaggccagaatttccctgacatctgtccgccagcaccgcccttcaggtacaattccacaagagaccccccaaacttgatgaagtcacccgcttacaagggctcactctccacctgcgcaaggactgcaattcccaggggcctccagggcacccggccgctccagtccagtcgtgcaggcggcgcgctctttctcgctccgctcaagtccaggaaccggttcccgggctcccagcctctcggcagcgcccacgcgcctgggccaaagtccgcgaacggaagccggcggcgaggaggattctgggagttggaggccgaggctgcgacctgcgcaggcgcaaacctgcccctggggtgagggctgtaagtggcgcgattcgcggcagcgccccgatggaacctcctggtcctgtgagggggcccttgcaagattccagctggtatgagccttctgcagagctagtgcagactaggatggctgtatcactaacagcagctgaaactctggcccttcagggtacacagggacaagagaagatgatgatgatgggaccaaaggaagaggaacagtcttgtgagtatgagaccaggctacctgggaaccactctaccagtcaagagatcttccgccaacgcttcaggcatctccgctaccaggagactcctggtccccgggaggccttgagccaactacgagtactctgctgtgagtggctgaggccagagaaacacacgaaggagcagatcctggagttcctggtgctggaacaattcttgaccatcctgcctgaggagctccaatcctgggtgcggggacatcaccctaagagtggagaggaggctgtgactgtgctggaggatttagagaaaggacttgaaccagagccgcaggtcccaggccctgcacatggacctgcacaggaagagccatgggagaagaaggaatctctgggagcagcccaggaagcactgagcatccagctccagcctaaggagacccagcctttcccaaagagtgaacaggtatatttacattttctgtcagttgttacagaagatggcccagagcccaaggacaaaggatcattgccacaaccacccattactgaagtggaatcacaggtgttctcagaaaaacttgctactgacacctctacatttgaagctacctctgagggtaccttagaactgcagcagagaaatcccaaagcggagagactgaggtggtcccctgcccaggaggaaagtttcaggcagatggttgtcatccataaggaaattcccacagggaagaaagaccatgaatgtagtgaatgtggtaaaaccttcatttataactcacatcttgttgtccaccagagagttcattctggagagaaaccctataagtgtagtgactgtgggaaaactttcaaacagagctcaaacctcggtcagcatcagagaattcatacaggagagaaacccttcgaatgtaatgaatgtgggaaggccttcagatggggtgctcatcttgttcagcatcagaggattcactcaggagagaagccctatgagtgtaatgagtgtgggaaggcctttagtcaaagctcatatctaagtcagcatcggagaattcacagtggagagaaaccttttatatgtaaagaatgtgggaaagcttatggatggtgctcagagctcattagacatcggagagttcatgccagaaaagagccttcccattgaattgaaggggagaacgtctccagacagaattctacatcggtctaatctactttaggactggatcccataaaagttataagttccttaaaaaaaatc

SEQ ID NO: 275602 - DNA, 1917 bp, Homo sapiens
gcgacgacgacaaggatggggcccatctcttcggagcctaaggatccagcccaggtccagccctgcgcagccgcccaccaagctgccagaagacgagccggacgcccaaggctacgagaggacgattgcagaattgtacaggctagtggttggggaatattttttcgtggaagggaccgtcttccttagctgtggccctctcatcaggtctgggaagaggtaattggaaaatagaactcatggagaagtgttaccacaggccatggacaaggccagaatttccctgacatctgtccgccagcaccgcccttcaggtacaattccacaagagaccccccaaacttgatgaagtcacccgcttacaagggctcactctccacctgcgcaaggactgcaattcccaggggcctccagggcacccggccgctccagtccagtcgtgcaggcggcgcgctctttctcgctccgctcaagtccaggaaccggttcccgggctcccagcctctcggcagcgcccacgcgcctgggccaaagtccgcgaacggaagccggcggcgaggaggattctgggagttggaggccgaggctgcgacctgcgcaggcgcaaacctgcccctggggtgagggctgtaagtggcgcgattcgcggcagcgccccgatggaacctcctggtcctgtgagctgcaagatagaaagcaacatatgcccccaggtggcctccctcaccctggcaatggaaacgaacagccgagcttcaccggacaagactagaaatcgttcctccacccacccagagacaaagcatatttgacttcttcctctactggggcccttgcaagattccagctggtatgagccttctgcagagctagtgcagactaggatggctgtatcactaacagcagctgaaactctggcccttcagggtacacagggacaagagaagatgatgatgatgggaccaaaggaagaggaacagtcttgtcccaggccctgcacatggacctgcacaggaagagccatgggagaagaaggaatctctgggagcagcccaggaagcactgagcatccagctccagcctaaggagacccagcctttcccaaagagtgaacaggtatatttacattttctgtcagttgttacagaagatggcccagagcccaaggacaaaggatcattgccacaaccacccattactgaagtggaatcacaggtgttctcagaaaaacttgctactgacacctctacatttgaagctacctctgagggtaccttagaactgcagcagagaaatcccaaagcggagagactgaggtggtcccctgcccaggaggaaagtttcaggcagatggttgtcatccataaggaaattcccacagggaagaaagaccatgaatgtagtgaatgtggtaaaaccttcatttataactcacatcttgttgtccaccagagagttcattctggagagaaaccctataagtgtagtgactgtgggaaaactttcaaacagagctcaaacctcggtcagcatcagagaattcatacaggagagaaacccttcgaatgtaatgaatgtgggaaggccttcagatggggtgctcatcttgttcagcatcagaggattcactcaggagagaagccctatgagtgtaatgagtgtgggaaggcctttagtcaaagctcatatctaagtcagcatcggagaattcacagtggagagaaaccttttatatgtaaagaatgtgggaaagcttatggatggtgctcagagctcattagacatcggagagttcatgccagaaaagagccttcccattgaattgaaggggagaacgtctccagacagaattctacatcggtctaatctactttaggactggatcccataaaagttataagttccttaaaaaaaatc

SEQ ID NO: 275603 - DNA, 1343 bp, Homo sapiens
gcgacgacgacaaggatggggcccatctcttcggagcctaaggatccagcccaggtccagccctgcgcagccgcccaccaagctgccagaagacgagccggacgcccaaggctacgagaggacgattgcagaattgtacaggctagtggttggggaatattttttcgtggaagggaccgtcttccttagctgtggccctctcatcaggtctgggaagaggtaattggaaaatagaactcatggagaagtgttaccacaggccatggacaaggccagaatttccctgacatctgtccgccagcaccgcccttcaggtacaattccacaagagaccccccaaacttgatgaagtcacccgcttacaagggctcactctccacctgcgcaaggactgcaattcccaggggcctccagggcacccggccgctccagtccagtcgtgcaggcggcgcgctctttctcgctccgctcaagtccaggaaccggttcccgggctcccagcctctcggcagcgcccacgcgcctgggccaaagtccgcgaacggaagccggcggcgaggaggattctgggagttggaggccgaggctgcgacctgcgcaggcgcaaacctgcccctggggtgagggctgtaagtggcgcgattcgcggcagcgccccgatggaacctcctggtcctgtgagggggcccttgcaagattccagctggtatgagccttctgcagagctagtgcagactaggatggctgtatcactaacagcagctgaaactctggcccttcagggtacacagggacaagagaagatgatgatgatgggaccaaaggaagaggaacagtcttgtgagtatgagaccaggctacctgggaaccactctaccagtcaagagatcttccgccaacgcttcaggcatctccgctaccaggagactcctggtccccgggaggccttgagccaactacgagtactctgctgtgagtggctgaggccagagaaacacacgaaggagcagatcctggagttcctggtgctggaacaattcttgaccatcctgcctgaggagctccaatcctgggtgcggggacatcaccctaagagtggagaggaggctgtgactgtgctggaggatttagagaaaggacttgaaccagagccgcaggtcccaggccctgcacatggacctgcacaggaagagccatgggagaagaaggaatctctgggagcagcccaggaagcactgagcatccagctccagcctaaggagacccagcctttcccaaagagtgtcgttcccgaagatggccagagccaggacaagggtcctgcacaacaccattatgaaggg

SEQ ID NO: 275604 - DNA, 576 bp, Homo sapiens
aaaaaaaagaaaaaacgaaaaggaaaaaagaaaaacgatgacaaggaagacattaccacatctctgttaggcattaaaaagactttatgttgagggagtatactcttctactcagtgagtttgtgtgtgatttgcatttgaatgcaaactaattatatttgctctaaagaaagtacgtatgttgtacttactgtatatactttgtttttctcataaggttgatgaatttttctcattctgttattttgtggggtagctagaagacgaagggttataggagaagcctgcaaattcaaggttaagtcaattggctcagaatgagtttttttcacctttgcctcattagcactactctttaattaagtctattataaatcacaaataacaaagccctttaactttatatatatagaaggagatgtgaatatatatcatatatatgcatatatacacagacacagatatatatacgtaggtacacactgtgtgtgtatgtgtaaaactatgtctatactgatttaattcacagttgttttatactcagagtaatatgtggaggctattttcttgtttata

SEQ ID NO: 275605 - DNA, 409 bp, Homo sapiens
aagttttctaactagatttctggattttctttctttttttctctttttcaatcttctttcttcttttgttgttatggattttgtccatttgttgttgttagttgtttcaggaatttatttgcaatcactttttgctaatttcaataaaggccttagatcaactgttctgacccaagatcaacactacacatcttccagcttttaagatgagacaaaagaaaaagaacagaagtctggggtcccacacatactatgtttccagatgactgtatttttttcaacaaatagtgggacaaactatgctggtccttgtggctagggccagtcctgggaacactaatgagagaaatgaggggaccttagctggaatgaggtcagggcctcctggcactaccacactgcaatctca

SEQ ID NO: 275606 - DNA, 3602 bp, Homo sapiens
taaaacaaagtgaaatgtaatcatacgatgtactttttttaatgccgttgaaacagagttaatttcctttagcacacaagtcttagagacaaaagaaaaaaaggtctgcaacatgaaagtcacaggcatcacaatcctcttttggcccctctccatgatattattatcagacaaaatccagtcttctaaaagagaagtccaatgtaattttactgaaaaaaattataccttgattccagcagatatcaagaaagatgttactatacttgatctcagttataaccaaattactcttaatggtacagacacaagagttctacagacatactttttactcacagagctctatttgattgagaacaaggttactatcttacataataacggttttggtaacctctccagtctagaaattttaaatatctgtagaaactccatctatgtaattcaacagggtgcatttttaggcttaaataaactaaaacagttatatctctgccaaaacaaaatagaacaactgaatgctgatgtatttgtgcctctaagaagcctaaaacttctgaatctgcaaggcaatttgattagctatttggatgtaccaccactatttcatctggaattaataactttatatggaaacctatggaactgctcttgcagtctatttaatttgcagaactggttgaacacatcaaatgtgacattagaaaatgagaacatcaccatgtgtagctaccccaacagcctgcagagctacaatatcaaaacagtacctcataaggctgaatgccactcaaaatttccttcatcagtaactgaagatctttatattcattttcagcccatcagcaattcaatatttaatagctcttcgaacaacttaacaagaaattcagaacatgaacctcttggaaaaagttgggcttttcttgttggtgttgttgtcactgtactgacgacttcacttctcatttttattgctatcaaatgcccaatatggtacaatattctgcttagttataatcatcatcgcctggaagagcatgaagcagaaacctatgaagatggttttactggaaatccaagctctctttcacagataccagaaacaaactctgaagaaactacagtaatatttgaacaattacattcatttgtggtagatgatgatggatttattgaagacaaatatatagatatccatgaattatgtgaagaaaattaatttctttcaaagtttgctttttaaagcaaagttatcagctcactcagtttagatatggagattttgctatgtgacataacaaaatacagctggcaggcattcatattaatgacaacatacatgaatatcataaaattatgttctttgcattatattgagcaagcaggttcaaatacagtaactgacactcctcggtagttgacagttacatagtctacaatactagcactactattcttagcagtgcttgggtgaccatacgaactagtaaaaaggtctaaattattcatgaattaaaatgaatggattctcatattaacacaggtatttgacataatatgtattaagttatactaatgtttcaatcagtaaagaaataaaagtttaggatttattaatatatggaagtcaaagtgaggaacagagatagcttaaataatacactaagattgattttatgctcccagaataaaatcatagagttggaaaatatttttttgaaatgcttcctgaaatagcacaataaatttcccttaaaatttcatagcaatttaaagcacaagcacaatgttcaggcataatccctaataagtcactattgattctggttataaagaaaggctgtcaccataatgcaggatcactacagtttaatgtcatactggcttccaaagtgggcatcacaattatctataaatcttgttttaaaaatacatatttctacctctctctgggagatttttattcaaattggtctgtgctgacactaaggaatcttcatgtggtccatggacagctatttctatctattcagtagatagagcaatgtttcccaaattgtttttctagaatactaatttccagagagacattcacaagtatttacagaagaagaaggaggtacatggtcaaattactacaggaaaaactagtagtttaaacaaggtgaaacaagattctttttcttttttttttttttttttttgagacaaagtctcgcactgtctcccaggctggactgcagcagcgcagtctcagatcactgcaacctccgcctcctgggttcaagcaattcttctgactcagcctcccgagtagctgggagtacaggtgcacaccaccatgcctggctaatttctgtatttttagtagagacagggtttcaccatgttggccaggctggtctcgaacgcctgacctcatgatctacccgcctcggcctcccaaagtgctgggattacaggcatggagcaccgtgcctggccaagattctttacaataggatttatgtaaaactttactaagctaaactgctctctgattattcaagagcaaagtattaaaaatttctcaaacttacttgacaacaaaacccattctttcagttacatctactaagagctcgtagttcaataacattccaaagaacgtagtttggaaaacactggcctatcggctgtaataggaagggtctaaagaaaattatttgctgagtcctcataatcaattggctataatcacaatttaataatttatcaatgcaaacagtacattaaaaactgtagcacaatctataatttttaccttcatatgcagagaaattaagaatttacatcttttacaaatatgtatatctctgaaataatgaaatatattgatgggtgaaataatatttctggtattttcttcattataacacgtggaatggaacagtggctagaggtatggatggagcaaggtcaaatatgagctgatggagctgggagctaaataagggtataatatgctacttctgtgtatgttgtgtatggtatagtatgctatttctgtgtatgttcaaattgtttatgtatataataaagttttaaaaatttgtatgtacttgacaattccttagaaaaaagaggctaaaataaaatagatctacgtcataatctatagaatagtcattttaaaagttacataattagtaaattcaatacaaatgtctactgagagaaaataaaaactaggatgatatacctgtaaaatagaagaacttactaatttataatacatatttgcttgtgtttacagacacatgttttcaacaaaggatataagtatattatggctaatgtttctttatatatcaattatactttgttttaaaccttaattataagaatgagatgattataggaacataaaatatctttttctaaacaatgtatcattctgctaaattatttcctaattataagatgcaaatattaatatttgagaaatgtagcaaaatgaaatataattgcaaatgagcaaagactacacttaagcttttatattcaagggcctctgttgaatatggggtattcaataaatatctgactacacaaag

SEQ ID NO: 275607 - DNA, 3157 bp, Homo sapiens
taaaacaaagtgaaatgtaatcatacgatgtactttttttaatgccgttgaaacagagttaatttcctttagcacacaagtcttagagacaaaagaaaaaaaggtctgcaacatgaaagtcacaggcatcacaatcctcttttggcccctctccatgatattattatcagacaaaatccagtcttctaaaagagaagtccaatgtaattttactgaaaaaaattataccttgattccagcagatatcaagaaagatgttactatacttgatctcagttataaccaaattactcttaatggtacagacacaagagttctacagacatactttttactcacagagctctatttgattgagaacaaggttactatcttacataataacggttttggtaacctctccagtctagaaattttaaatatctgtagaaactccatctatgtaattcaacagggtgcatttttaggcttaaataaactaaaacagttatatctctgccaaaacaaaatagaacaactgaatgctgatgtatttgtgcctctaagaagcctaaaacttctgaatctgcaaggcaatttgattagctatttggatgtaccaccactatttcatctggaattaataactttatatggaaacctatggaactgctcttgcagtctatttaatttgcagaactggttgaacacatcaaatgtgacattagaaaatgagaacatcaccatgtgtagctaccccaacagcctgcagagctacaatatcaaaacagtacctcataaggctgaatgccactcaaaatttccttcatcagtaactgaagatctttatattcattttcagcccatcagcaattcaatatttaatagctcttcgaacaacttaacaagaaattcagaacatgaacctcttggaaaaagttgggcttttcttgttggtgttgttgtcactgtactgacgacttcacttctcatttttattgctatcaaatgcccaatatggtacaatattctgcttagttataatcatcatcgcctggaagagcatgaagcagaaacctatgaagatggttttactggaaatccaagctctctttcacagataccagaaacaaactctgaagaaactacagtaatatttgaacaattacattcatttgtggtagatgatgatggatttattgaagacaaatatatagatatccatgaattatgtgaagaaaattaatttctttcaaagtttgctttttaaagcaaagttatcagctcactcagtttagatatggagattttgctatgtgacataacaaaatacagctggcaggcattcatattaatgacaacatacatgaatatcataaaattatgttctttgcattatattgagcaagcaggttcaaatacagtaactgacactcctcggtagttgacagttacatagtctacaatactagcactactattcttagcagtgcttgggtgaccatacgaactagtaaaaaggtctaaattattcatgaattaaaatgaatggattctcatattaacacaggtatttgacataatatgtattaagttatactaatgtttcaatcagtaaagaaataaaagtttaggatttattaatatatggaagtcaaagtgaggaacagagatagcttaaataatacactaagattgattttatgctcccagaataaaatcatagagttggaaaatatttttttgaaatgcttcctgaaatagcacaataaatttcccttaaaatttcatagcaatttaaagcacaagcacaatgttcaggcataatccctaataagtcactattgattctggttataaagaaaggctgtcaccataatgcaggatcactacagtttaatgtcatactggcttccaaagtgggcatcacaattatctataaatcttgttttaaaaatacatatttctacctctctctgggagatttttattcaaattggtctgtgctgacactaaggaatcttcatgtggtccatggacagctatttctatctattcagtagatagagcaatgtttcccaaattgtttttctagaatactaatttccagagagacattcacaagtatttacagaagaagaaggaggtacatggtcaaattactacaggaaaaactagtagtttaaacaaggtgaaacaagattctttttcttttttttttttttttttttgagacaaagtctcgcactgtctcccaggctggactgcagcagcgcagtctcagatcactgcaacctccgcctcctgggttcaagcaattcttctgactcagcctcccgagtagctgggagtacaggtgcacaccaccatgcctggctaatttctgtatttttagtagagacagggtttcaccatgttggccaggctggtctcgaacgcctgacctcatgatctacccgcctcggcctcccaaagtgctgggattacaggcatggagcaccgtgcctggccaagattctttacaataggatttatgtaaaactttactaagctaaactgctctctgattattcaagagcaaagtattaaaaatttctcaaacttacttgacaacaaaacccattctttcagttacatctactaagagctcgtagttcaataacattccaaagaacgtagtttggaaaacactggcctatcggctgtaataggaagggtctaaagaaaattatttgctgagtcctcataatcaattggctataatcacaatttaataatttatcaatgcaaacagtacattaaaaactgtagcacaatctataatttttaccttcatatgcagagaaattaagaatttacatcttttacaaatatgtatatctctgaaataatgaaatatattgatgggtgaaataatatttctggtattttcttcattataacacgtggaatggaacagtggctagaggtatggatggagcaaggtcaaatatgagctgatggagctgggagctaaataagggtataatatgctacttctgtgtatgttgtgtatggtatagtatgctatttctgtgtatgttcaaattgtttatgtatataataaagttttaaaaatttgtatgtacttgacaattccttagaaaaaagaggctaaaataaaatagatctacgtcat

SEQ ID NO: 275608 - DNA, 3494 bp, Homo sapiens
taaaacaaagtgaaatgtaatcatacgatgtactttttttaatgccgttgaaacagagttaatttcctttagcacacaagtcttagagacaaaagaaaaaaaggtctgcaacatgaaagtcacaggcatcacaatcctcttttggcccctctccatgatattattatcagacaaaatccagtcttctaaaagagaagtccaatgtaattttactgaaaaaaattataccttgattccagcagatatcaagaaagatgttactatacttgatctcagttataaccaaattactcttaatggtacagacacaagagttctacagacatactttttactcacagagctctatttgattgagaacaaggttactatcttacataataacggttttggtaacctctccagtctagaaattttaaatatctgtagaaactccatctatgtaattcaacagggtgcatttttaggcttaaataaactaaaacagttatatctctgccaaaacaaaatagaacaactgaatgctgatgtatttgtgcctctaagaagcctaaaacttctgaatctgcaaggcaatttgattagctatttggatgtaccaccactatttcatctggaattaataactttatatggaaacctatggaactgctcttgcagtctatttaatttgcagaactggttgaacacatcaaatgtgacattagaaaatgagaacatcaccatgtgtagctaccccaacagcctgcagagctacaatatcaaaacagtacctcataaggctgaatgccactcaaaatttccttcatcagtaactgaagatctttatattcattttcagcccatcagcaattcaatatttaatagctcttcgaacaacttaacaagaaattcagaacatgaacctcttggaaaaagttgggcttttcttgttggtgttgttgtcactgtactgacgacttcacttctcatttttattgctatcaaatgcccaatatggtacaatattctgcttagttataatcatcatcgcctggaagagcatgaagcagaaacctatgaagatggttttactggaaatccaagctctctttcacagataccagaaacaaactctgaagaaactacagtaatatttgaacaattacattcatttgtggtagatgatgatggatttattgaagacaaatatatagatatccatgaattatgtgaagaaaattaatttctttcaaagtttgctttttaaagcaaagttatcagctcactcagtttagatatggagattttgctatgtgacataacaaaatacagctggcaggcattcatattaatgacaacatacatgaatatcataaaattatgttctttgcattatattgagcaagcaggttcaaatacagtaactgacactcctcggtagttgacagttacatagtctacaatactagcactactattcttagcagtgcttgggtgaccatacgaactagtaaaaaggtctaaattattcatgaattaaaatgaatggattctcatattaacacaggtatttgacataatatgtattaagttatactaatgtttcaatcagtaaagaaataaaagtttaggatttattaatatatggaagtcaaagtgaggaacagagatagcttaaataatacactaagattgattttatgctcccagaataaaatcatagagttggaaaatatttttttgaaatgcttcctgaaatagcacaataaatttcccttaaaatttcatagcaatttaaagcacaagcacaatgttcaggcataatccctaataagtcactattgattctggttataaagaaaggctgtcaccataatgcaggatcactacagtttaatgtcatactggcttccaaagtgggcatcacaattatctataaatcttgttttaaaaatacatatttctacctctctctgggagatttttattcaaattggtctgtgctgacactaaggaatcttcatgtggtccatggacagctatttctatctattcagtagatagagcaatgtttcccaaattgtttttctagaatactaatttccagagagacattcacaagtatttacagaagaagaaggaggtacatggtcaaattactacaggaaaaactagtagtttaaacaaggtgaaacaagattctttttcttttttttttttttttttttgagacaaagtctcgcactgtctcccaggctggactgcagcagcgcagtctcagatcactgcaacctccgcctcctgggttcaagcaattcttctgactcagcctcccgagtagctgggagtacaggtgcacaccaccatgcctggctaatttctgtatttttagtagagacagggtttcaccatgttggccaggctggtctcgaacgcctgacctcatgatctacccgcctcggcctcccaaagtgctgggattacaggcatggagcaccgtgcctggccaagattctttacaataggatttatgtaaaactttactaagctaaactgctctctgattattcaagagcaaagtattaaaaatttctcaaacttacttgacaacaaaacccattctttcagttacatctactaagagctcgtagttcaataacattccaaagaacgtagtttggaaaacactggcctatcggctgtaataggaagggtctaaagaaaattatttgctgagtcctcataatcaattggctataatcacaatttaataatttatcaatgcaaacagtacattaaaaactgtagcacaatctataatttttaccttcatatgcagagaaattaagaatttacatcttttacaaatatgtatatctctgaaataatgaaatatattgatgggtgaaataatatttctggtattttcttcattataacacgtggaatggaacagtggctagaggtatggatggagcaaggtcaaatatgagctgatggagctgggagctaaataagggtataatatgctacttctgtgtatgttgtgtatggtatagtatgctatttctgtgtatgttcaaattgtttatgtatataataaagttttaaaaatttgaaaaaaaaaaaaaaaacaaaaaaaaaaaaaacaaaccaaacagaaaaaaaaaacaaaaaaacaacaacaacaaaacagagggggggcggcggcgcgccgccgcactaaaaactccccgcgaggaggggcgcccccaccatcgtgtcgcattgccccacccccgccaggttgttgcggtgcaaaaagaggggcgcgccccctgaaggagaggggcggcatattaataacgaaccgaggagagcggaggcgagcgacgttcaaaaacaaacggagtgtcgatggcggggaaaaaaacgccgtcgatcgcaggacgagtcatgtcgggggcaagaagaccaacccaacactcccgcgggggggcgacgacaatctggggggacgaaacccccagcac

SEQ ID NO: 275609 - DNA, 502 bp, Homo sapiens
aaaaatttatcaacattgtgagaaaacattgcatttgccactcaaaagtaactggacaaaagaaccactaaattggtaagataattagaagtgaatgtcttgatttccttcactgagaagaataaaaaattaatattaactgacaacatattaaggagaggttattggtttattaaccattcacaagattataaagtgcttgcactatgctgagtaccctgcacagtggtacagggaaatacaagaggagagcaagaaagttccttctcaagtagcccagaattgtgtgggatcaaataatttgtactgctcagaacaagattattgcatgtcctttgactccttgaaatatcaaaagttttccatacctcaatgtatgtatgggtaagacatcaccatcattgaattttgctacatgataataaatacaccatttgagcttgttcatattgtcatggcaagagcctgacagattattgggataatcaacttattggagtcg

SEQ ID NO: 275610 - DNA, 414 bp, Homo sapiens
catgttaatatcatgctgcaaaaaaatataacttaaaaagtactcaaatttttggtaggtctagcatgaacctattataccataaagaactaccctgagctgggtgcggtggctcacagctgtaatcccagcactttggaaggctgaggtgggaggatgacttgagcccaggagtttgagactggcctggacaacacagtgagaccttgtctttataaaaaatcaaaaggaaaaaacaaaacaaaacaaaacaaaaaacaaaaaaaactatcctgaaccagactcttagtatttactttaatcttcatgggacagagagacagaaaaaatagttgtcacatgatgactaggggaggtacatatcaagtttcttagagatagcagatttagcttttctacccaagagctgctcag

SEQ ID NO: 275611 - DNA, 323 bp, Homo sapiens
cgccgttgcagtccaacctgagcgtccgagcgagactctatctcagaaaataaagacagaatgaaagagcccggcgcggtggcttacgcctgtaatcccagcgctttgggaggccgaggcgggcggatcgcctgaggtcaggagctcgagaccagcctggccgacatggcgaaaccccctaaaaatacaaaaattagccgggcgtggtggcctgcgcctgtaatcccagctacccaggaggctgaggcaggagaatcgctggaacccgggaggtagaggctgcagtgagccgagatcgcgccactgcactccagcctgggcga

SEQ ID NO: 275612 - DNA, 215 bp, Homo sapiens
ctgtggctgtgtttattcttgtgtcatttagatgtctacgtttatatcgtgaggagagtctctttgaccagataagagtataagatatagctcatcctaattgacaaaattagtcacccacaaaattagtttagaggagacatagtcaacatctaccacgtaatggaatggggaaattttgtcctggagagtgaaaaaagaaaaaacaaacaaac

SEQ ID NO: 275613 - DNA, 421 bp, Homo sapiens
caaaaaggaaaatgaaaaaactttaatggtgaaaaaaagaaaaggcttctggtttgctctgattgggggttgttggctgactagaaatggggcaacttatgtgattggtttgaggatctatttggttttctctggttggttctggttggagtgaggcaaaatactggcagtcactgaccattctgggctgatggctgcagaggctgtgggtcagagttctactttcatacatggtctggccattgtctatttgtacattcactctctgacacatattctattattatatctttgcctcctgatttttaagttttaaatcttcagaaaatgtgtctatttaatgagttattattaaagtttttaaattattttttctgtcatgtacaaacattataagagaaaaattctccatattgtatgc

SEQ ID NO: 275614 - DNA, 447 bp, Homo sapiens
tttttctagttctgtgaagaatgatggtggtattttgatgggaactgcattaaatttgttgattgtttttggcagtatggtcattttcacaatattgattctactcatccgtgagctacatgtaaaattctttatatatctagaaacaaattatttatctgctaaatgtgttgtacatattatctcccaatcttgccctttgactttacctacaataaatttttgatatataagaattttcattttgatttagtcaaatgtaagctcataattctatcccttgatttttcatttttagttttagatgtgataatatttaactgttcacacacacacacacacacacacacacacacccctcaactcccaccacctgaataaacccttacttcctcttctcctaaatatggttacatcatcatattggttaaatcaatatttaatgtt

SEQ ID NO: 275615 - DNA, 248 bp, Homo sapiens
ccaaagtgctgggattacaggtgtgagccaccgggcccggcctttgttgtattttaaagcaagagtttactttttcctcctttcagttgggaatcaacttcctcacggtcccccttttcgtgtccggccagtctgtccttcattccccacggacccaggagacagggctgcttctttccagcgtctcccgactaccagatcaagaggcctgagcagggcagcttcaggacacacagccggcgctcccc

SEQ ID NO: 275616 - DNA, 742 bp, Homo sapiens
atttggctcatagaaggatttattaacccagttattcaacttgttattgataataattgatcaaagctctggtctctgtggctccaaccgcactggccgcctcaccgcttctgagactcactcagcatggagccatgcattcctgtccaatcttccagaatgttcttcccccacatgattgcagggctccctcctgactaccctgctctcctgctctgagccctttcccaggctgccccatttaaagtatgaccttttgttattctttatcctcttagccagccttcattttcttcatagcatgtaacattatattcaatacctgtttacagatattgttacttgttgccctagaatgtaagcagagactgtgaaggcagggacatcatatgttttgttcctcactatgtccccagtgcctggatcagagcctggcacttaagagatgctcaggaaatggctgttaaatgaatgaaggaatggatgagtgaatgaatgaacccaaagctcagatagctggttttacttttgatcccatttattggtgtatttgggttaattttataccttttaaaatttttgtatcggtatataaaatttggattttattgttggaaagaagctcttttgagggcatttaatcctatcctctccccagtatagcaatccagcttgctgtttgcagtcttcctattctgtggaagtgttctgagcagcaagtcttcgataccttgcaaatgaa

SEQ ID NO: 275617 - DNA, 1873 bp, Homo sapiens
acctttccattcagtcgcccaacatggctggagcgcggcggaggtgagccggccgcccgcccgcagacgccccagcctactgcgcccgagtcccgcggccccagtggcgcctcagctctgcggtgccgaggcccaacggctcgatcgctgcccgccgccagcatgttgggcgccccggacgagagctccgtgcgggtggctgtcagaataagaccacagcttgccaaagagaagattgaaggatgccatatttgtacatctgtcacaccaggagagcctcaggtcttcctagggaaagataaggcttttacttttgactatgtatttgacattgactcccagcaagagcagatctacattcaatgtatagaaaaactaattgaaggttgctttgaaggatacaatgctacagtttttgcttatggacaaactggagctggtaaaacatacacaatgggaacaggatttgatgttaacattgttgaggaagaactgggtattatttctcgagctgttaaacacctttttaagagtattgaagaaaaaaaacacatagcaattaaaaatgggcttcctgctccagattttaaagtgaatgcccaattcttagagctctataatgaagaggtccttgacttatttgataccactcgtgatattgatgcaaaaagtaaaaaatcaaatataagaattcatgaagattcaactggaggaatttatactgtgggcgttacaacacgtactgtgaatacagaatcagagatgatgcagtgtttgaagttgggtgctttatcccggacaactgccagtacccagatgaatgttcagagctctcgttcacatgccatttttaccattcatgtgtgtcaaaccagagtgtgtccccaaatagatgctgacaatgcaactgataataaaattatttctgaatcagcacagatgaatgaatttgaaaccctgactgcaaagttccattttgttgatctcgcaggatctgaaagactgaagcgtactggagctacaggcgagagggcaaaagaaggcatttctatcaactgtggacttttggcacttggcaatgtaataagtgccttgggagacaagagcaagagggccacacatgtcccctatagagattccaagctaacaagactactacaggattccctcgggggtaatagccaaacaatcatgatagcatgtgtcagcccttcagacagagactttatggaaacgttaaacaccctgaaatacgccaatcgagctagaaatatcaagaataaggtgatggtcaatcaggacagagctagtcagcaaatcaatgcacttcgtagtgaaatcacacgacttcagatggagctcatggagtacaaaacaggtaaaagaataattgacgaagagggtgtggaaagcatcaatgacatgtttcatgagaatgctatgctacagactgaaaataataacctgcgtgtaagaattaaagccatgcaagagacggttgatgcattgaggtccagaattacacagcttgttagtgatcaggccaaccatgttcttgccagagcaggtgaaggaaatgaggagattagtaatatgattcatagttatataaaagaaatcgaagatctcagggcaaaattattagaaagtgaagcagtgaatgagaaccttcgaaaaaacttgacaagagccacagcaagagcgccatatttcagcggatcatcaactttttctcctaccatactatcctcagacaaagaaaccattgaaattatagacctagcaaaaaaagatttagagaagttgaaaagaaaagaaaagaggaagaaaaaaagtgtggctggtaaagaggataatacagacactgaccaag

SEQ ID NO: 275618 - DNA, 6365 bp, Homo sapiens
  misc_feature (4095)..(4095): n is a, c, g, or t
  misc_feature (4097)..(4097): n is a, c, g, or t
  misc_feature (4100)..(4101): n is a, c, g, or t
acctttccattcagtcgcccaacatggctggagcgcggcggaggtgagccggccgcccgcccgcagacgccccagcctactgcgcccgagtcccgcggccccagtggcgcctcagctctgcggtgccgaggcccaacggctcgatcgctgcccgccgccagcatgttgggcgccccggacgagagctccgtgcgggtggctgtcagaataagaccacagcttgccaaagagaagattgaaggatgccatatttgtacatctgtcacaccaggagagcctcaggtcttcctagggaaagataaggcttttacttttgactatgtatttgacattgactcccagcaagagcagatctacattcaatgtatagaaaaactaattgaaggttgctttgaaggatacaatgctacagtttttgcttatggacaaactggagctggtaaaacatacacaatgggaacaggatttgatgttaacattgttgaggaagaactgggtattatttctcgagctgttaaacacctttttaagagtattgaagaaaaaaaacacatagcaattaaaaatgggcttcctgctccagattttaaagtgaatgcccaattcttagagctctataatgaagaggtccttgacttatttgataccactcgtgatattgatgcaaaaagtaaaaaatcaaatataagaattcatgaagattcaactggaggaatttatactgtgggcgttacaacacgtactgtgaatacagaatcagagtccttgtttcttcccctttttcagatgatgcagtgtttgaagttgggtgctttatcccggacaactgccagtacccagatgaatgttcagagctctcgttcacatgccatttttaccattcatgtgtgtcaaaccagagtgtgtccccaaatagatgctgacaatgcaactgataataaaattatttctgaatcagcacagatgaatgaatttgaaaccctgactgcaaagttccattttgttgatctcgcaggatctgaaagactgaagcgtactggagctacaggcgagagggcaaaagaaggcatttctatcaactgtggacttttggcacttggcaatgtaataagtgccttgggagacaagagcaagagggccacacatgtcccctatagagattccaagctaacaagactactacaggattccctcgggggtaatagccaaacaatcatgatagcatgtgtcagcccttcagacagagactttatggaaacgttaaacaccctgaaatacgccaatcgagctagaaatatcaagaataaggtgatggtcaatcaggacagagctagtcagcaaatcaatgcacttcgtagtgaaatcacacgacttcagatggagctcatggagtacaaaacaggtaaaagaataattgacgaagagggtgtggaaagcatcaatgacatgtttcatgagaatgctatgctacagactgaaaataataacctgcgtgtaagaattaaagccatgcaagagacggttgatgcattgaggtccagaattacacagcttgttagtgatcaggccaaccatgttcttgccagagcaggtgaaggaaatgaggagattagtaatatgattcatagttatataaaagaaatcgaagatctcagggcaaaattattagaaagtgaagcagtgaatgagaaccttcgaaaaaacttgacaagagccacagcaagagcgccatatttcagcggatcatcaactttttctcctaccatactatcctcagacaaagaaaccattgaaattatagacctagcaaaaaaagatttagagaagttgaaaagaaaagaaaagaggaagaaaaaaagtgtggctggtaaagaggataatacagacactgaccaagagaagaaagaagaaaagggtgtttcggaaagagaaaacaatgaattagaagtggaagaaagtcaagaagtgagtgatcatgaggatgaagaagaggaggaggaggaggaggaagatgacattgatgggggtgaaagttctgatgaatcagattctgaatcagatgaaaaagccaattatcaagcagacttggcaaacattacttgtgaaattgcaattaagcaaaagctgattgatgaactagaaaacagccagaaaagactgcagactctgaaaaagcagtatgaagagaagctaatgatgctgcaacataaaattcgggatactcagcttgaaagagaccaggtgcttcaaaacttaggctcggtagaatcttactcagaagaaaaagcaaaaaaagttaggtctgaatatgaaaagaaactccaagccatgaacaaagaactgcagagacttcaagcagctcaaaaagaacatgcaaggttgcttaaaaatcagtctcagtatgaaaagcaattgaagaaattgcagcaggatgtgatggaaatgaaaaaaacaaaggttcgcctaatgaaacaaatgaaagaagaacaagagaaagccagactgactgagtctagaagaaacagagagattgctcagttgaaaaaggatcaacgtaaaagagatcatcaacttagacttctggaagcccaaaaaagaaaccaagaagtggttctacgtcgcaaaactgaagaggttacggctcttcgtcggcaagtaagacccatgtcagataaagtggctgggaaagttactcggaagctgagttcatctgatgcacctgctcaggacacaggttccagtgcagctgctgtcgaaacagatgcatcaaggacaggagcccagcagaaaatgagaattcctgtggcgagagtccaggccttaccaacgccggcaacaaatggaaacaggaaaaaatatcagaggaaaggattgactggccgagtgtttatttccaagacagctcgcatgaagtggcagctccttgagcgcagggtcacagacatcatcatgcagaagatgaccatttccaacatggaggcagatatgaatagactcctcaagcaacgggaggaactcacaaaaagacgagagaaactttcaaaaagaagggagaagatagtcaaggagaatggagagggagataaaaatgtggctaatatcaatgaagagatggagtcactgactgctaatatcgattacatcaatgacagtatttctgattgtcaggccaacataatgcagatggaagaagcaaaggaagaaggtgagacattggatgttactgcagtcattaatgcctgcacccttacagaagcccgatacctgctagatcacttcctgtcaatgggcatcaataagggtcttcaggctgcccagaaagaggctcaaattaaagtactggaaggtcgactcaaacaaacagaaataaccagtgctacccaaaaccagctcttattccatatgttgaaagagaaggcagaattaaatcctgagctagatgctttactaggccatgctttacaagatctagatagcgtaccattagaaaatgtagaggatagtactgatgaggatgctcctttaaacagcccaggatcagaaggaagcacgctgtcttcagatctcatgaagctttgtggtgaagtgaaacctaagaacaaggcccgaaggagaaccaccactcagatggaattgctgtatgcagatagcagtgaactagcttcagacactagtacaggagatgcctccttgcctggccctctcacacctgttgcagaagggcaagagattggaatgaatacagagacaagtggtacttctgctagggaaaaagagctctctcccccacctggcttaccttctaagataggcagcatttccaggcagtcatctctatcagaaaaaaaaattccagagccttctcctgtaacaaggagaaaggcatatgagaaagcagaaaaatcaaaggccaaggaacaaaagcactcagattctggaacttcagaggctagtctttcacctccttcttccccaccaagccggccccgtaatgaactgaatgtttttaatcgtcttactgtttctcagggaaacacatcagttcagcaggataagtctgatgaaagtgactcctctctctcggaggtacacagntnctnnaggggcataatcaacccatttcctgcttcaaaaggaatcagagcttttccacttcagtgtattcacatagctgaagggcatacaaaagctgtgctctgtgtggattctactgatgatctcctcttcactggatcaaaagatcgtacttgtaaagtatggaatctggtgactgggcaggaaataatgtcactggggggtcatcccaacaatgtcgtgtctgtaaaatactgtaattataccagtttggtcttcactgtatcaacatcttatattaaggtgtgggatatcagagattcagcaaagtgcattcgaacactaacgtcttcaggtcaagttactcttggagatgcttgttctgcaagtaccagtcgaacagtagctattccttctggagagaaccagatcaatcaaattgccctaaacccaactggcaccttcctctatgctgcttctggaaatgctgtcaggatgtgggatcttaaaaggtttcagtctacaggaaagttaacaggacacctaggccctgttatgtgccttactgtggatcagatttccagtggacaagatctaatcatcactggctccaaggatcattacatcaaaatgtttgatgttacagaaggagctcttgggactgtgagtcccacccacaattttgaaccccctcattatgatggcatagaagcactaaccattcaaggggataacctatttagtgggtctagagataatggaatcaagaaatgggacttaactcaaaaagaccttcttcagcaagttccaaatgcacataaggattgggtctgtgccctgggagtggtgccagaccacccagttttgctcagtggctgcagagggggcattttgaaagtctggaacatggatacttttatgccagtgggagagatgaagggtcatgatagtcctatcaatgccatatgtgttaattccacccacatttttactgcagctgatgatcgaactgtgagaatttggaaggctcgcaatttgcaagatggtcagatctctgacacaggagatctgggggaagatattgccagtaattaaacatgaatgaagataggttgtaaactgaatgctgtgataatactctgtattctttatggaaaatgttgtcctgtacttactaggcaaaacgtatgaatcggattaactggaaaatatatctgaattcaactgctgactataaatggtattctaataaaattgtgtactatcctgtgtgcttagttttaagatcaaccaatagatatatatcctacaattgatatattgctttattcacacttttattgtggctgaatttttgtgcctatctataaaacacactttcaaattatttgaattaccaagacgtctgcttttgtgacagtcagaaaacacacctggaatacgatgcagcccaccattaactcattcatgtagtttattcaagtgatttatgtatttaaactaaatattgaaaatgttagtcaaattgtggtttgcttgtcaggtatttatatcagtctgtagtggattcccaaatttcaaagctcttttaatgtaatggacaaaaataagatatgagaatattattgatgaattttcataaggtggaattgatcttaatctactaacagagaagggtagacagtttgtgttaaatgttggcatttacttgtattgaccaaagttttgcagctctactatattctgtgctcaggactaaaatgctgttaatttttttttttttttccagtgctgtgcatatattctgtgatgggaaacattgttgatgtcctaacagaaatatattttgatctattttcctatggagttgtttctattatgaccatttaattttgtttttatttaatagtagtatttccttcccttttatctaattttttatatgctgctaaatatattttaaatatactatgtttgcgaaccttggtagctatgatgagagctattatcatctgtggtgggaaaagctatgtaaataggtagattgtatagagagactatcttgtgttgtgcctgtatgaatttttaaaagttgttgactggattttgcaaaaggatgtataatatttctgtctgctcagaatattaatttgtaaattctgcaagtttaatttttatgtagatggtataacatttgaaaatattgtcttatgtgattttttcccctgaaaatatttgcttgtaaatgaaaacttagctagggcttaaataaacatgttgctatgaaatta

SEQ ID NO: 275619 - DNA, 5739 bp, Homo sapiens
  misc_feature (3469)..(3469): n is a, c, g, or t
  misc_feature (3471)..(3471): n is a, c, g, or t
  misc_feature (3474)..(3475): n is a, c, g, or t
ctatgtaaggtgaaaattaactggaacgatgtttgtttgctatacttacatagtcaaactttacaagccatgaaattaattgcactctttgtatttgttgttaaatgcctaagaagttttctaaaaattttgtaaaggtactgtgaatacagaatcagagatgatgcagtgtttgaagttgggtgctttatcccggacaactgccagtacccagatgaatgttcagagctctcgttcacatgccatttttaccattcatgtgtgtcaaaccagagtgtgtccccaaatagatgctgacaatgcaactgataataaaattatttctgaatcagcacagatgaatgaatttgaaaccctgactgcaaagttccattttgttgatctcgcaggatctgaaagactgaagcgtactggagctacaggcgagagggcaaaagaaggcatttctatcaactgtggacttttggcacttggcaatgtaataagtgccttgggagacaagagcaagagggccacacatgtcccctatagagattccaagctaacaagactactacaggattccctcgggggtaatagccaaacaatcatgatagcatgtgtcagcccttcagacagagactttatggaaacgttaaacaccctgaaatacgccaatcgagctagaaatatcaagaataaggtgatggtcaatcaggacagagctagtcagcaaatcaatgcacttcgtagtgaaatcacacgacttcagatggagctcatggagtacaaaacaggtaaaagaataattgacgaagagggtgtggaaagcatcaatgacatgtttcatgagaatgctatgctacagactgaaaataataacctgcgtgtaagaattaaagccatgcaagagacggttgatgcattgaggtccagaattacacagcttgttagtgatcaggccaaccatgttcttgccagagcaggtgaaggaaatgaggagattagtaatatgattcatagttatataaaagaaatcgaagatctcagggcaaaattattagaaagtgaagcagtgaatgagaaccttcgaaaaaacttgacaagagccacagcaagagcgccatatttcagcggatcatcaactttttctcctaccatactatcctcagacaaagaaaccattgaaattatagacctagcaaaaaaagatttagagaagttgaaaagaaaagaaaagaggaagaaaaaaagtgtggctggtaaagaggataatacagacactgaccaagagaagaaagaagaaaagggtgtttcggaaagagaaaacaatgaattagaagtggaagaaagtcaagaagtgagtgatcatgaggatgaagaagaggaggaggaggaggaggaagatgacattgatgggggtgaaagttctgatgaatcagattctgaatcagatgaaaaagccaattatcaagcagacttggcaaacattacttgtgaaattgcaattaagcaaaagctgattgatgaactagaaaacagccagaaaagactgcagactctgaaaaagcagtatgaagagaagctaatgatgctgcaacataaaattcgggatactcagcttgaaagagaccaggtgcttcaaaacttaggctcggtagaatcttactcagaagaaaaagcaaaaaaagttaggtctgaatatgaaaagaaactccaagccatgaacaaagaactgcagagacttcaagcagctcaaaaagaacatgcaaggttgcttaaaaatcagtctcagtatgaaaagcaattgaagaaattgcagcaggatgtgatggaaatgaaaaaaacaaaggttcgcctaatgaaacaaatgaaagaagaacaagagaaagccagactgactgagtctagaagaaacagagagattgctcagttgaaaaaggatcaacgtaaaagagatcatcaacttagacttctggaagcccaaaaaagaaaccaagaagtggttctacgtcgcaaaactgaagaggttacggctcttcgtcggcaagtaagacccatgtcagataaagtggctgggaaagttactcggaagctgagttcatctgatgcacctgctcaggacacaggttccagtgcagctgctgtcgaaacagatgcatcaaggacaggagcccagcagaaaatgagaattcctgtggcgagagtccaggccttaccaacgccggcaacaaatggaaacaggaaaaaatatcagaggaaaggattgactggccgagtgtttatttccaagacagctcgcatgaagtggcagctccttgagcgcagggtcacagacatcatcatgcagaagatgaccatttccaacatggaggcagatatgaatagactcctcaagcaacgggaggaactcacaaaaagacgagagaaactttcaaaaagaagggagaagatagtcaaggagaatggagagggagataaaaatgtggctaatatcaatgaagagatggagtcactgactgctaatatcgattacatcaatgacagtatttctgattgtcaggccaacataatgcagatggaagaagcaaaggaagaaggtgagacattggatgttactgcagtcattaatgcctgcacccttacagaagcccgatacctgctagatcacttcctgtcaatgggcatcaataagggtcttcaggctgcccagaaagaggctcaaattaaagtactggaaggtcgactcaaacaaacagaaataaccagtgctacccaaaaccagctcttattccatatgttgaaagagaaggcagaattaaatcctgagctagatgctttactaggccatgctttacaagatctagatagcgtaccattagaaaatgtagaggatagtactgatgaggatgctcctttaaacagcccaggatcagaaggaagcacgctgtcttcagatctcatgaagctttgtggtgaagtgaaacctaagaacaaggcccgaaggagaaccaccactcagatggaattgctgtatgcagatagcagtgaactagcttcagacactagtacaggagatgcctccttgcctggccctctcacacctgttgcagaagggcaagagattggaatgaatacagagacaagtggtacttctgctagggaaaaagagctctctcccccacctggcttaccttctaagataggcagcatttccaggcagtcatctctatcagaaaaaaaaattccagagccttctcctgtaacaaggagaaaggcatatgagaaagcagaaaaatcaaaggccaaggaacaaaagcactcagattctggaacttcagaggctagtctttcacctccttcttccccaccaagccggccccgtaatgaactgaatgtttttaatcgtcttactgtttctcagggaaacacatcagttcagcaggataagtctgatgaaagtgactcctctctctcggaggtacacagntnctnnaggggcataatcaacccatttcctgcttcaaaaggaatcagagcttttccacttcagtgtattcacatagctgaagggcatacaaaagctgtgctctgtgtggattctactgatgatctcctcttcactggatcaaaagatcgtacttgtaaagtatggaatctggtgactgggcaggaaataatgtcactggggggtcatcccaacaatgtcgtgtctgtaaaatactgtaattataccagtttggtcttcactgtatcaacatcttatattaaggtgtgggatatcagagattcagcaaagtgcattcgaacactaacgtcttcaggtcaagttactcttggagatgcttgttctgcaagtaccagtcgaacagtagctattccttctggagagaaccagatcaatcaaattgccctaaacccaactggcaccttcctctatgctgcttctggaaatgctgtcaggatgtgggatcttaaaaggtttcagtctacaggaaagttaacaggacacctaggccctgttatgtgccttactgtggatcagatttccagtggacaagatctaatcatcactggctccaaggatcattacatcaaaatgtttgatgttacagaaggagctcttgggactgtgagtcccacccacaattttgaaccccctcattatgatggcatagaagcactaaccattcaaggggataacctatttagtgggtctagagataatggaatcaagaaatgggacttaactcaaaaagaccttcttcagcaagttccaaatgcacataaggattgggtctgtgccctgggagtggtgccagaccacccagttttgctcagtggctgcagagggggcattttgaaagtctggaacatggatacttttatgccagtgggagagatgaagggtcatgatagtcctatcaatgccatatgtgttaattccacccacatttttactgcagctgatgatcgaactgtgagaatttggaaggctcgcaatttgcaagatggtcagatctctgacacaggagatctgggggaagatattgccagtaattaaacatgaatgaagataggttgtaaactgaatgctgtgataatactctgtattctttatggaaaatgttgtcctgtacttactaggcaaaacgtatgaatcggattaactggaaaatatatctgaattcaactgctgactataaatggtattctaataaaattgtgtactatcctgtgtgcttagttttaagatcaaccaatagatatatatcctacaattgatatattgctttattcacacttttattgtggctgaatttttgtgcctatctataaaacacactttcaaattatttgaattaccaagacgtctgcttttgtgacagtcagaaaacacacctggaatacgatgcagcccaccattaactcattcatgtagtttattcaagtgatttatgtatttaaactaaatattgaaaatgttagtcaaattgtggtttgcttgtcaggtatttatatcagtctgtagtggattcccaaatttcaaagctcttttaatgtaatggacaaaaataagatatgagaatattattgatgaattttcataaggtggaattgatcttaatctactaacagagaagggtagacagtttgtgttaaatgttggcatttacttgtattgaccaaagttttgcagctctactatattctgtgctcaggactaaaatgctgttaatttttttttttttttccagtgctgtgcatatattctgtgatgggaaacattgttgatgtcctaacagaaatatattttgatctattttcctatggagttgtttctattatgaccatttaattttgtttttatttaatagtagtatttccttcccttttatctaattttttatatgctgctaaatatattttaaatatactatgtttgcgaaccttggtagctatgatgagagctattatcatctgtggtgggaaaagctatgtaaataggtagattgtatagagagactatcttgtgttgtgcctgtatgaatttttaaaagttgttgactggattttgcaaaaggatgtataatatttctgtctgctcagaatattaatttgtaaattctgcaagtttaatttttatgtagatggtataacatttgaaaatattgtcttatgtgattttttcccctgaaaatatttgcttgtaaatgaaaacttagctagggcttaaataaacatgttgctatgaaatta

SEQ ID NO: 275620 - DNA, 6166 bp, Homo sapiens
acctttccattcagtcgcccaacatggctggagcgcggcggaggtgagccggccgcccgcccgcagacgccccagcctactgcgcccgagtcccgcggccccagtggcgcctcagctctgcggtgccgaggcccaacggctcgatcgctgcccgccgccagcatgttgggcgccccggacgagagctccgtgcgggtggctgtcagaataagaccacagcttgccaaagagaagattgaaggatgccatatttgtacatctgtcacaccaggagagcctcaggtcttcctagggaaagataaggcttttacttttgactatgtatttgacattgactcccagcaagagcagatctacattcaatgtatagaaaaactaattgaaggttgctttgaaggatacaatgctacagtttttgcttatggacaaactggagctggtaaaacatacacaatgggaacaggatttgatgttaacattgttgaggaagaactgggtattatttctcgagctgttaaacacctttttaagagtattgaagaaaaaaaacacatagcaattaaaaatgggcttcctgctccagattttaaagtgaatgcccaattcttagagctctataatgaagaggtccttgacttatttgataccactcgtgatattgatgcaaaaagtaaaaaatcaaatataagaattcatgaagattcaactggaggaatttatactgtgggcgttacaacacgtactgtgaatacagaatcagagatgatgcagtgtttgaagttgggtgctttatcccggacaactgccagtacccagatgaatgttcagagctctcgttcacatgccatttttaccattcatgtgtgtcaaaccagagtgtgtccccaaatagatgctgacaatgcaactgataataaaattatttctgaatcagcacagatgaatgaatttgaaaccctgactgcaaagttccattttgttgatctcgcaggatctgaaagactgaagcgtactggagctacaggcgagagggcaaaagaaggcatttctatcaactgtggacttttggcacttggcaatgtaataagtgccttgggagacaagagcaagagggccacacatgtcccctatagagattccaagctaacaagactactacaggattccctcgggggtaatagccaaacaatcatgatagcatgtgtcagcccttcagacagagactttatggaaacgttaaacaccctgaaatacgccaatcgagctagaaatatcaagaataaggtgatggtcaatcaggacagagctagtcagcaaatcaatgcacttcgtagtgaaatcacacgacttcagatggagctcatggagtacaaaacaggtaaaagaataattgacgaagagggtgtggaaagcatcaatgacatgtttcatgagaatgctatgctacagactgaaaataataacctgcgtgtaagaattaaagccatgcaagagacggttgatgcattgaggtccagaattacacagcttgttagtgatcaggccaaccatgttcttgccagagcaggtgaaggaaatgaggagattagtaatatgattcatagttatataaaagaaatcgaagatctcagggcaaaattattagaaagtgaagcagtgaatgagaaccttcgaaaaaacttgacaagagccacagcaagagcgccatatttcagcggatcatcaactttttctcctaccatactatcctcagacaaagaaaccattgaaattatagacctagcaaaaaaagatttagagaagttgaaaagaaaagaaaagaggaagaaaaaaagtgtggctggtaaagaggataatacagacactgaccaagagaagaaagaagaaaagggtgtttcggaaagagaaaacaatgaattagaagtggaagaaagtcaagaagtgagtgatcatgaggatgaagaagaggaggaggaggaggaggaagatgacattgatgggggtgaaagttctgatgaatcagattctgaatcagatgaaaaagccaattatcaagcagacttggcaaacattacttgtgaaattgcaattaagcaaaagctgattgatgaactagaaaacagccagaaaagactgcagactctgaaaaagcagtatgaagagaagctaatgatgctgcaacataaaattcgggatactcagcttgaaagagaccaggtgcttcaaaacttaggctcggtagaatcttactcagaagaaaaagcaaaaaaagttaggtctgaatatgaaaagaaactccaagccatgaacaaagaactgcagagacttcaagcagctcaaaaagaacatgcaaggttgcttaaaaatcagtctcagtatgaaaagcaattgaagaaattgcagcaggatgtgatggaaatgaaaaaaacaaaggttcgcctaatgaaacaaatgaaagaagaacaagagaaagccagactgactgagtctagaagaaacagagagattgctcagttgaaaaaggatcaacgtaaaagagatcatcaacttagacttctggaagcccaaaaaagaaaccaagaagtggttctacgtcgcaaaactgaagaggttacggctcttcgtcggcaagtaagacccatgtcagataaagtggctgggaaagttactcggaagctgagttcatctgatgcacctgctcaggacacaggttccagtgcagctgctgtcgaaacagatgcatcaaggacaggagcccagcagaaaatgagaattcctgtggcgagagtccaggccttaccaacgccggcaacaaatggaaacaggaaaaaatatcagaggaaaggattgactggccgagtgtttatttccaagacagctcgcatgaagtggcagctccttgagcgcagggtcacagacatcatcatgcagaagatgaccatttccaacatggaggcagatatgaatagactcctcaagcaacgggaggaactcacaaaaagacgagagaaactttcaaaaagaagggagaagatagtcaaggagaatggagagggagataaaaatgtggctaatatcaatgaagagatggagtcactgactgctaatatcgattacatcaatgacagtatttctgattgtcaggccaacataatgcagatggaagaagcaaaggaagaaggtgagacattggatgttactgcagtcattaatgcctgcacccttacagaagcccgatacctgctagatcacttcctgtcaatgggcatcaataagggtcttcaggctgcccagaaagaggctcaaattaaagtactggaaggtcgactcaaacaaacagaaataaccagtgctacccaaaaccagctcttattccatatgttgaaagagaaggcagaattaaatcctgagctagatgctttactaggccatgctttacaagatctagatagcgtaccattagaaaatgtagaggatagtactgatgaggatgctcctttaaacagcccaggatcagaaggaagcacgctgtcttcagatctcatgaagctttgtggtgaagtgaaacctaagaacaaggcccgaaggagaaccaccactcagatggaattgctgtatgcagatagcagtgaactagcttcagacactagtacaggagatgcctccttgcctggccctctcacacctgttgcagaagggcaagagattggaatgaatacagagacaagtggtacttctgctagggaaaaagagctctctcccccacctggcttaccttctaagataggcagcatttccaggcagtcatctctatcagaaaaaaaaattccagagccttctcctgtaacaaggagaaaggcatatgagaaagcagaaaaatcaaaggccaaggaacaaaagcaaggggcataatcaacccatttcctgcttcaaaaggaatcagagcttttccacttcagtgtattcacatagctgaagggcatacaaaagctgtgctctgtgtggattctactgatgatctcctcttcactggatcaaaagatcgtacttgtaaagtatggaatctggtgactgggcaggaaataatgtcactggggggtcatcccaacaatgtcgtgtctgtaaaatactgtaattataccagtttggtcttcactgtatcaacatcttatattaaggtgtgggatatcagagattcagcaaagtgcattcgaacactaacgtcttcaggtcaagttactcttggagatgcttgttctgcaagtaccagtcgaacagtagctattccttctggagagaaccagatcaatcaaattgccctaaacccaactggcaccttcctctatgctgcttctggaaatgctgtcaggatgtgggatcttaaaaggtttcagtctacaggaaagttaacaggacacctaggccctgttatgtgccttactgtggatcagatttccagtggacaagatctaatcatcactggctccaaggatcattacatcaaaatgtttgatgttacagaaggagctcttgggactgtgagtcccacccacaattttgaaccccctcattatgatggcatagaagcactaaccattcaaggggataacctatttagtgggtctagagataatggaatcaagaaatgggacttaactcaaaaagaccttcttcagcaagttccaaatgcacataaggattgggtctgtgccctgggagtggtgccagaccacccagttttgctcagtggctgcagagggggcattttgaaagtctggaacatggatacttttatgccagtgggagagatgaagggtcatgatagtcctatcaatgccatatgtgttaattccacccacatttttactgcagctgatgatcgaactgtgagaatttggaaggctcgcaatttgcaagatggtcagatctctgacacaggagatctgggggaagatattgccagtaattaaacatgaatgaagataggttgtaaactgaatgctgtgataatactctgtattctttatggaaaatgttgtcctgtacttactaggcaaaacgtatgaatcggattaactggaaaatatatctgaattcaactgctgactataaatggtattctaataaaattgtgtactatcctgtgtgcttagttttaagatcaaccaatagatatatatcctacaattgatatattgctttattcacacttttattgtggctgaatttttgtgcctatctataaaacacactttcaaattatttgaattaccaagacgtctgcttttgtgacagtcagaaaacacacctggaatacgatgcagcccaccattaactcattcatgtagtttattcaagtgatttatgtatttaaactaaatattgaaaatgttagtcaaattgtggtttgcttgtcaggtatttatatcagtctgtagtggattcccaaatttcaaagctcttttaatgtaatggacaaaaataagatatgagaatattattgatgaattttcataaggtggaattgatcttaatctactaacagagaagggtagacagtttgtgttaaatgttggcatttacttgtattgaccaaagttttgcagctctactatattctgtgctcaggactaaaatgctgttaatttttttttttttttccagtgctgtgcatatattctgtgatgggaaacattgttgatgtcctaacagaaatatattttgatctattttcctatggagttgtttctattatgaccatttaattttgtttttatttaatagtagtatttccttcccttttatctaattttttatatgctgctaaatatattttaaatatactatgtttgcgaaccttggtagctatgatgagagctattatcatctgtggtgggaaaagctatgtaaataggtagattgtatagagagactatcttgtgttgtgcctgtatgaatttttaaaagttgttgactggattttgcaaaaggatgtataatatttctgtctgctcagaatattaatttgtaaattctgcaagtttaatttttatgtagatggtataacatttgaaaatattgtcttatgtgattttttcccctgaaaatatttgcttgtaaatgaaaacttagctagggcttaaataaacatgttgctatgaaatta

SEQ ID NO: 275621 - DNA, 6289 bp, Homo sapiens
acctttccattcagtcgcccaacatggctggagcgcggcggaggtgagccggccgcccgcccgcagacgccccagcctactgcgcccgagtcccgcggccccagtggcgcctcagctctgcggtgccgaggcccaacggctcgatcgctgcccgccgccagcatgttgggcgccccggacgagagctccgtgcgggtggctgtcagaataagaccacagcttgccaaagagaagattgaaggatgccatatttgtacatctgtcacaccaggagagcctcaggtcttcctagggaaagataaggcttttacttttgactatgtatttgacattgactcccagcaagagcagatctacattcaatgtatagaaaaactaattgaaggttgctttgaaggatacaatgctacagtttttgcttatggacaaactggagctggtaaaacatacacaatgggaacaggatttgatgttaacattgttgaggaagaactgggtattatttctcgagctgttaaacacctttttaagagtattgaagaaaaaaaacacatagcaattaaaaatgggcttcctgctccagattttaaagtgaatgcccaattcttagagctctataatgaagaggtccttgacttatttgataccactcgtgatattgatgcaaaaagtaaaaaatcaaatataagaattcatgaagattcaactggaggaatttatactgtgggcgttacaacacgtactgtgaatacagaatcagagatgatgcagtgtttgaagttgggtgctttatcccggacaactgccagtacccagatgaatgttcagagctctcgttcacatgccatttttaccattcatgtgtgtcaaaccagagtgtgtccccaaatagatgctgacaatgcaactgataataaaattatttctgaatcagcacagatgaatgaatttgaaaccctgactgcaaagttccattttgttgatctcgcaggatctgaaagactgaagcgtactggagctacaggcgagagggcaaaagaaggcatttctatcaactgtggacttttggcacttggcaatgtaataagtgccttgggagacaagagcaagagggccacacatgtcccctatagagattccaagctaacaagactactacaggattccctcgggggtaatagccaaacaatcatgatagcatgtgtcagcccttcagacagagactttatggaaacgttaaacaccctgaaatacgccaatcgagctagaaatatcaagaataaggtgatggtcaatcaggacagagctagtcagcaaatcaatgcacttcgtagtgaaatcacacgacttcagatggagctcatggagtacaaaacaggtaaaagaataattgacgaagagggtgtggaaagcatcaatgacatgtttcatgagaatgctatgctacagactgaaaataataacctgcgtgtaagaattaaagccatgcaagagacggttgatgcattgaggtccagaattacacagcttgttagtgatcaggccaaccatgttcttgccagagcaggtgaaggaaatgaggagattagtaatatgattcatagttatataaaagaaatcgaagatctcagggcaaaattattagaaagtgaagcagtgaatgagaaccttcgaaaaaacttgacaagagccacagcaagagcgccatatttcagcggatcatcaactttttctcctaccatactatcctcagacaaagaaaccattgaaattatagacctagcaaaaaaagatttagagaagttgaaaagaaaagaaaagaggaagaaaaaaagtgtggctggtaaagaggataatacagacactgaccaagagaagaaagaagaaaagggtgtttcggaaagagaaaacaatgaattagaagtggaagaaagtcaagaagtgagtgatcatgaggatgaagaagaggaggaggaggaggaggaagatgacattgatgggggtgaaagttctgatgaatcagattctgaatcagatgaaaaagccaattatcaagcagacttggcaaacattacttgtgaaattgcaattaagcaaaagctgattgatgaactagaaaacagccagaaaagactgcagactctgaaaaagcagtatgaagagaagctaatgatgctgcaacataaaattcgggatactcagcttgaaagagaccaggtgcttcaaaacttaggctcggtagaatcttactcagaagaaaaagcaaaaaaagttaggtctgaatatgaaaagaaactccaagccatgaacaaagaactgcagagacttcaagcagctcaaaaagaacatgcaaggttgcttaaaaatcagtctcagtatgaaaagcaattgaagaaattgcagcaggatgtgatggaaatgaaaaaaacaaaggttcgcctaatgaaacaaatgaaagaagaacaagagaaagccagactgactgagtctagaagaaacagagagattgctcagttgaaaaaggatcaacgtaaaagagatcatcaacttagacttctggaagcccaaaaaagaaaccaagaagtggttctacgtcgcaaaactgaagaggttacggctcttcgtcggcaagtaagacccatgtcagataaagtggctgggaaagttactcggaagctgagttcatctgatgcacctgctcaggacacaggttccagtgcagctgctgtcgaaacagatgcatcaaggacaggagcccagcagaaaatgagaattcctgtggcgagagtccaggccttaccaacgccggcaacaaatggaaacaggaaaaaatatcagaggaaaggattgactggccgagtgtttatttccaagacagctcgcatgaagtggcagctccttgagcgcagggtcacagacatcatcatgcagaagatgaccatttccaacatggaggcagatatgaatagactcctcaagcaacgggaggaactcacaaaaagacgagagaaactttcaaaaagaagggagaagatagtcaaggagaatggagagggagataaaaatgtggctaatatcaatgaagagatggagtcactgactgctaatatcgattacatcaatgacagtatttctgattgtcaggccaacataatgcagatggaagaagcaaaggaagaaggtgagacattggatgttactgcagtcattaatgcctgcacccttacagaagcccgatacctgctagatcacttcctgtcaatgggcatcaataagggtcttcaggctgcccagaaagaggctcaaattaaagtactggaaggtcgactcaaacaaacagaaataaccagtgctacccaaaaccagctcttattccatatgttgaaagagaaggcagaattaaatcctgagctagatgctttactaggccatgctttacaagatctagatagcgtaccattagaaaatgtagaggatagtactgatgaggatgctcctttaaacagcccaggatcagaaggaagcacgctgtcttcagatctcatgaagctttgtggtgaagtgaaacctaagaacaaggcccgaaggagaaccaccactcagatggaattgctgtatgcagatagcagtgaactagcttcagacactagtacaggagatgcctccttgcctggccctctcacacctgttgcagaagggcaagagattggaatgaatacagagacaagtggtacttctgctagggaaaaagagctctctcccccacctggcttaccttctaagataggcagcatttccaggcagtcatctctatcagaaaaaaaaattccagagccttctcctgtaacaaggagaaaggcatatgagaaagcagaaaaatcaaaggccaaggaacaaaagcactcagattctggaacttcagaggctagtctttcacctccttcttccccaccaagccggccccgtaatgaactgaatgtttttaatcgtcttactgtttctcagggaaacacatcagttcagcaggataaaggggcataatcaacccatttcctgcttcaaaaggaatcagagcttttccacttcagtgtattcacatagctgaagggcatacaaaagctgtgctctgtgtggattctactgatgatctcctcttcactggatcaaaagatcgtacttgtaaagtatggaatctggtgactgggcaggaaataatgtcactggggggtcatcccaacaatgtcgtgtctgtaaaatactgtaattataccagtttggtcttcactgtatcaacatcttatattaaggtgtgggatatcagagattcagcaaagtgcattcgaacactaacgtcttcaggtcaagttactcttggagatgcttgttctgcaagtaccagtcgaacagtagctattccttctggagagaaccagatcaatcaaattgccctaaacccaactggcaccttcctctatgctgcttctggaaatgctgtcaggatgtgggatcttaaaaggtttcagtctacaggaaagttaacaggacacctaggccctgttatgtgccttactgtggatcagatttccagtggacaagatctaatcatcactggctccaaggatcattacatcaaaatgtttgatgttacagaaggagctcttgggactgtgagtcccacccacaattttgaaccccctcattatgatggcatagaagcactaaccattcaaggggataacctatttagtgggtctagagataatggaatcaagaaatgggacttaactcaaaaagaccttcttcagcaagttccaaatgcacataaggattgggtctgtgccctgggagtggtgccagaccacccagttttgctcagtggctgcagagggggcattttgaaagtctggaacatggatacttttatgccagtgggagagatgaagggtcatgatagtcctatcaatgccatatgtgttaattccacccacatttttactgcagctgatgatcgaactgtgagaatttggaaggctcgcaatttgcaagatggtcagatctctgacacaggagatctgggggaagatattgccagtaattaaacatgaatgaagataggttgtaaactgaatgctgtgataatactctgtattctttatggaaaatgttgtcctgtacttactaggcaaaacgtatgaatcggattaactggaaaatatatctgaattcaactgctgactataaatggtattctaataaaattgtgtactatcctgtgtgcttagttttaagatcaaccaatagatatatatcctacaattgatatattgctttattcacacttttattgtggctgaatttttgtgcctatctataaaacacactttcaaattatttgaattaccaagacgtctgcttttgtgacagtcagaaaacacacctggaatacgatgcagcccaccattaactcattcatgtagtttattcaagtgatttatgtatttaaactaaatattgaaaatgttagtcaaattgtggtttgcttgtcaggtatttatatcagtctgtagtggattcccaaatttcaaagctcttttaatgtaatggacaaaaataagatatgagaatattattgatgaattttcataaggtggaattgatcttaatctactaacagagaagggtagacagtttgtgttaaatgttggcatttacttgtattgaccaaagttttgcagctctactatattctgtgctcaggactaaaatgctgttaatttttttttttttttccagtgctgtgcatatattctgtgatgggaaacattgttgatgtcctaacagaaatatattttgatctattttcctatggagttgtttctattatgaccatttaattttgtttttatttaatagtagtatttccttcccttttatctaattttttatatgctgctaaatatattttaaatatactatgtttgcgaaccttggtagctatgatgagagctattatcatctgtggtgggaaaagctatgtaaataggtagattgtatagagagactatcttgtgttgtgcctgtatgaattcttcccgttcgtccttcccctcactcctagcatccttcgctcgttcgtcctcttttgttcagtatgtgtaacttgaagctgatttgtttttatggatatgggactgcagccacagatacagaatctgtattgtttttccttgaacacagcatggtgttaacattaaccttgaatgggcctaacttaacttgataatgtaaa

SEQ ID NO: 275622 - DNA, 350 bp, Homo sapiens
cagaaagaggctcaaattaaagtactggaaggtcgactcaaacaaacagaaataaccagtgctacccaaaaccagctcttattccatatgttgaaagagaaggcagaattaaatcctgagctagatgctttactaggccatgctttacaaggtaatttgctctcaattttagttgaatgaatttgcatggtagctttgctttttgaacatggtatagtatatccctttcccctatggcttgactgaatagatgctatatttactcatgcttttaataattattctttctttaatttgcatgtgtacattttggcgaggtaattattgtcattccaagaaatggttaccaa

SEQ ID NO: 275623 - DNA, 6341 bp, Homo sapiens
  misc_feature (4071)..(4071): n is a, c, g, or t
  misc_feature (4073)..(4073): n is a, c, g, or t
  misc_feature (4076)..(4077): n is a, c, g, or t
acctttccattcagtcgcccaacatggctggagcgcggcggaggtgagccggccgcccgcccgcagacgccccagcctactgcgcccgagtcccgcggccccagtggcgcctcagctctgcggtgccgaggcccaacggctcgatcgctgcccgccgccagcatgttgggcgccccggacgagagctccgtgcgggtggctgtcagaataagaccacagcttgccaaagagaagattgaaggatgccatatttgtacatctgtcacaccaggagagcctcaggtcttcctagggaaagataaggcttttacttttgactatgtatttgacattgactcccagcaagagcagatctacattcaatgtatagaaaaactaattgaaggttgctttgaaggatacaatgctacagtttttgcttatggacaaactggagctggtaaaacatacacaatgggaacaggatttgatgttaacattgttgaggaagaactgggtattatttctcgagctgttaaacacctttttaagagtattgaagaaaaaaaacacatagcaattaaaaatgggcttcctgctccagattttaaagtgaatgcccaattcttagagctctataatgaagaggtccttgacttatttgataccactcgtgatattgatgcaaaaagtaaaaaatcaaatataagaattcatgaagattcaactggaggaatttatactgtgggcgttacaacacgtactgtgaatacagaatcagagatgatgcagtgtttgaagttgggtgctttatcccggacaactgccagtacccagatgaatgttcagagctctcgttcacatgccatttttaccattcatgtgtgtcaaaccagagtgtgtccccaaatagatgctgacaatgcaactgataataaaattatttctgaatcagcacagatgaatgaatttgaaaccctgactgcaaagttccattttgttgatctcgcaggatctgaaagactgaagcgtactggagctacaggcgagagggcaaaagaaggcatttctatcaactgtggacttttggcacttggcaatgtaataagtgccttgggagacaagagcaagagggccacacatgtcccctatagagattccaagctaacaagactactacaggattccctcgggggtaatagccaaacaatcatgatagcatgtgtcagcccttcagacagagactttatggaaacgttaaacaccctgaaatacgccaatcgagctagaaatatcaagaataaggtgatggtcaatcaggacagagctagtcagcaaatcaatgcacttcgtagtgaaatcacacgacttcagatggagctcatggagtacaaaacaggtaaaagaataattgacgaagagggtgtggaaagcatcaatgacatgtttcatgagaatgctatgctacagactgaaaataataacctgcgtgtaagaattaaagccatgcaagagacggttgatgcattgaggtccagaattacacagcttgttagtgatcaggccaaccatgttcttgccagagcaggtgaaggaaatgaggagattagtaatatgattcatagttatataaaagaaatcgaagatctcagggcaaaattattagaaagtgaagcagtgaatgagaaccttcgaaaaaacttgacaagagccacagcaagagcgccatatttcagcggatcatcaactttttctcctaccatactatcctcagacaaagaaaccattgaaattatagacctagcaaaaaaagatttagagaagttgaaaagaaaagaaaagaggaagaaaaaaagtgtggctggtaaagaggataatacagacactgaccaagagaagaaagaagaaaagggtgtttcggaaagagaaaacaatgaattagaagtggaagaaagtcaagaagtgagtgatcatgaggatgaagaagaggaggaggaggaggaggaagatgacattgatgggggtgaaagttctgatgaatcagattctgaatcagatgaaaaagccaattatcaagcagacttggcaaacattacttgtgaaattgcaattaagcaaaagctgattgatgaactagaaaacagccagaaaagactgcagactctgaaaaagcagtatgaagagaagctaatgatgctgcaacataaaattcgggatactcagcttgaaagagaccaggtgcttcaaaacttaggctcggtagaatcttactcagaagaaaaagcaaaaaaagttaggtctgaatatgaaaagaaactccaagccatgaacaaagaactgcagagacttcaagcagctcaaaaagaacatgcaaggttgcttaaaaatcagtctcagtatgaaaagcaattgaagaaattgcagcaggatgtgatggaaatgaaaaaaacaaaggttcgcctaatgaaacaaatgaaagaagaacaagagaaagccagactgactgagtctagaagaaacagagagattgctcagttgaaaaaggatcaacgtaaaagagatcatcaacttagacttctggaagcccaaaaaagaaaccaagaagtggttctacgtcgcaaaactgaagaggttacggctcttcgtcggcaagtaagacccatgtcagataaagtggctgggaaagttactcggaagctgagttcatctgatgcacctgctcaggacacaggttccagtgcagctgctgtcgaaacagatgcatcaaggacaggagcccagcagaaaatgagaattcctgtggcgagagtccaggccttaccaacgccggcaacaaatggaaacaggaaaaaatatcagaggaaaggattgactggccgagtgtttatttccaagacagctcgcatgaagtggcagctccttgagcgcagggtcacagacatcatcatgcagaagatgaccatttccaacatggaggcagatatgaatagactcctcaagcaacgggaggaactcacaaaaagacgagagaaactttcaaaaagaagggagaagatagtcaaggagaatggagagggagataaaaatgtggctaatatcaatgaagagatggagtcactgactgctaatatcgattacatcaatgacagtatttctgattgtcaggccaacataatgcagatggaagaagcaaaggaagaaggtgagacattggatgttactgcagtcattaatgcctgcacccttacagaagcccgatacctgctagatcacttcctgtcaatgggcatcaataagggtcttcaggctgcccagaaagaggctcaaattaaagtactggaaggtcgactcaaacaaacagaaataaccagtgctacccaaaaccagctcttattccatatgttgaaagagaaggcagaattaaatcctgagctagatgctttactaggccatgctttacaagatctagatagcgtaccattagaaaatgtagaggatagtactgatgaggatgctcctttaaacagcccaggatcagaaggaagcacgctgtcttcagatctcatgaagctttgtggtgaagtgaaacctaagaacaaggcccgaaggagaaccaccactcagatggaattgctgtatgcagatagcagtgaactagcttcagacactagtacaggagatgcctccttgcctggccctctcacacctgttgcagaagggcaagagattggaatgaatacagagacaagtggtacttctgctagggaaaaagagctctctcccccacctggcttaccttctaagataggcagcatttccaggcagtcatctctatcagaaaaaaaaattccagagccttctcctgtaacaaggagaaaggcatatgagaaagcagaaaaatcaaaggccaaggaacaaaagcactcagattctggaacttcagaggctagtctttcacctccttcttccccaccaagccggccccgtaatgaactgaatgtttttaatcgtcttactgtttctcagggaaacacatcagttcagcaggataagtctgatgaaagtgactcctctctctcggaggtacacagntnctnnaggggcataatcaacccatttcctgcttcaaaaggaatcagagcttttccacttcagtgtattcacatagctgaagggcatacaaaagctgtgctctgtgtggattctactgatgatctcctcttcactggatcaaaagatcgtacttgtaaagtatggaatctggtgactgggcaggaaataatgtcactggggggtcatcccaacaatgtcgtgtctgtaaaatactgtaattataccagtttggtcttcactgtatcaacatcttatattaaggtgtgggatatcagagattcagcaaagtgcattcgaacactaacgtcttcaggtcaagttactcttggagatgcttgttctgcaagtaccagtcgaacagtagctattccttctggagagaaccagatcaatcaaattgccctaaacccaactggcaccttcctctatgctgcttctggaaatgctgtcaggatgtgggatcttaaaaggtttcagtctacaggaaagttaacaggacacctaggccctgttatgtgccttactgtggatcagatttccagtggacaagatctaatcatcactggctccaaggatcattacatcaaaatgtttgatgttacagaaggagctcttgggactgtgagtcccacccacaattttgaaccccctcattatgatggcatagaagcactaaccattcaaggggataacctatttagtgggtctagagataatggaatcaagaaatgggacttaactcaaaaagaccttcttcagcaagttccaaatgcacataaggattgggtctgtgccctgggagtggtgccagaccacccagttttgctcagtggctgcagagggggcattttgaaagtctggaacatggatacttttatgccagtgggagagatgaagggtcatgatagtcctatcaatgccatatgtgttaattccacccacatttttactgcagctgatgatcgaactgtgagaatttggaaggctcgcaatttgcaagatggtcagatctctgacacaggagatctgggggaagatattgccagtaattaaacatgaatgaagataggttgtaaactgaatgctgtgataatactctgtattctttatggaaaatgttgtcctgtacttactaggcaaaacgtatgaatcggattaactggaaaatatatctgaattcaactgctgactataaatggtattctaataaaattgtgtactatcctgtgtgcttagttttaagatcaaccaatagatatatatcctacaattgatatattgctttattcacacttttattgtggctgaatttttgtgcctatctataaaacacactttcaaattatttgaattaccaagacgtctgcttttgtgacagtcagaaaacacacctggaatacgatgcagcccaccattaactcattcatgtagtttattcaagtgatttatgtatttaaactaaatattgaaaatgttagtcaaattgtggtttgcttgtcaggtatttatatcagtctgtagtggattcccaaatttcaaagctcttttaatgtaatggacaaaaataagatatgagaatattattgatgaattttcataaggtggaattgatcttaatctactaacagagaagggtagacagtttgtgttaaatgttggcatttacttgtattgaccaaagttttgcagctctactatattctgtgctcaggactaaaatgctgttaatttttttttttttttccagtgctgtgcatatattctgtgatgggaaacattgttgatgtcctaacagaaatatattttgatctattttcctatggagttgtttctattatgaccatttaattttgtttttatttaatagtagtatttccttcccttttatctaattttttatatgctgctaaatatattttaaatatactatgtttgcgaaccttggtagctatgatgagagctattatcatctgtggtgggaaaagctatgtaaataggtagattgtatagagagactatcttgtgttgtgcctgtatgaatttttaaaagttgttgactggattttgcaaaaggatgtataatatttctgtctgctcagaatattaatttgtaaattctgcaagtttaatttttatgtagatggtataacatttgaaaatattgtcttatgtgattttttcccctgaaaatatttgcttgtaaatgaaaacttagctagggcttaaataaacatgttgctatgaaatta

SEQ ID NO: 275624 - DNA, 6295 bp, Homo sapiens
acctttccattcagtcgcccaacatggctggagcgcggcggaggtgagccggccgcccgcccgcagacgccccagcctactgcgcccgagtcccgcggccccagtggcgcctcagctctgcggtgccgaggcccaacggctcgatcgctgcccgccgccagcatgttgggcgccccggacgagagctccgtgcgggtggctgtcagaataagaccacagcttgccaaagagaagattgaaggatgccatatttgtacatctgtcacaccaggagagcctcaggtcttcctagggaaagataaggcttttacttttgactatgtatttgacattgactcccagcaagagcagatctacattcaatgtatagaaaaactaattgaaggttgctttgaaggatacaatgctacagtttttgcttatggacaaactggagctggtaaaacatacacaatgggaacaggatttgatgttaacattgttgaggaagaactgggtattatttctcgagctgttaaacacctttttaagagtattgaagaaaaaaaacacatagcaattaaaaatgggcttcctgctccagattttaaagtgaatgcccaattcttagagctctataatgaagaggtccttgacttatttgataccactcgtgatattgatgcaaaaagtaaaaaatcaaatataagaattcatgaagattcaactggaggaatttatactgtgggcgttacaacacgtactgtgaatacagaatcagagatgatgcagtgtttgaagttgggtgctttatcccggacaactgccagtacccagatgaatgttcagagctctcgttcacatgccatttttaccattcatgtgtgtcaaaccagagtgtgtccccaaatagatgctgacaatgcaactgataataaaattatttctgaatcagcacagatgaatgaatttgaaaccctgactgcaaagttccattttgttgatctcgcaggatctgaaagactgaagcgtactggagctacaggcgagagggcaaaagaaggcatttctatcaactgtggacttttggcacttggcaatgtaataagtgccttgggagacaagagcaagagggccacacatgtcccctatagagattccaagctaacaagactactacaggattccctcgggggtaatagccaaacaatcatgatagcatgtgtcagcccttcagacagagactttatggaaacgttaaacaccctgaaatacgccaatcgagctagaaatatcaagaataaggtgatggtcaatcaggacagagctagtcagcaaatcaatgcacttcgtagtgaaatcacacgacttcagatggagctcatggagtacaaaacaggtaaaagaataattgacgaagagggtgtggaaagcatcaatgacatgtttcatgagaatgctatgctacagactgaaaataataacctgcgtgtaagaattaaagccatgcaagagacggttgatgcattgaggtccagaattacacagcttgttagtgatcaggccaaccatgttcttgccagagcaggtgaaggaaatgaggagattagtaatatgattcatagttatataaaagaaatcgaagatctcagggcaaaattattagaaagtgaagcagtgaatgagaaccttcgaaaaaacttgacaagagccacagcaagagcgccatatttcagcggatcatcaactttttctcctaccatactatcctcagacaaagaaaccattgaaattatagacctagcaaaaaaagatttagagaagttgaaaagaaaagaaaagaggaagaaaaaaagtgtggctggtaaagaggataatacagacactgaccaagagaagaaagaagaaaagggtgtttcggaaagagaaaacaatgaattagaagtggaagaaagtcaagaagtgagtgatcatgaggatgaagaagaggaggaggaggaggaggaagatgacattgatgggggtgaaagttctgatgaatcagattctgaatcagatgaaaaagccaattatcaagcagacttggcaaacattacttgtgaaattgcaattaagcaaaagctgattgatgaactagaaaacagccagaaaagactgcagactctgaaaaagcagtatgaagagaagctaatgatgctgcaacataaaattcgggatactcagcttgaaagagaccaggtgcttcaaaacttaggctcggtagaatcttactcagaagaaaaagcaaaaaaagttaggtctgaatatgaaaagaaactccaagccatgaacaaagaactgcagagacttcaagcagctcaaaaagaacatgcaaggttgcttaaaaatcagtctcagtatgaaaagcaattgaagaaattgcagcaggatgtgatggaaatgaaaaaaacaaaggttcgcctaatgaaacaaatgaaagaagaacaagagaaagccagactgactgagtctagaagaaacagagagattgctcagttgaaaaaggatcaacgtaaaagagatcatcaacttagacttctggaagcccaaaaaagaaaccaagaagtggttctacgtcgcaaaactgaagaggttacggctcttcgtcggcaagtaagacccatgtcagataaagtggctgggaaagttactcggaagctgagttcatctgatgcacctgctcaggacacaggttccagtgcagctgctgtcgaaacagatgcatcaaggacaggagcccagcagaaaatgagaattcctgtggcgagagtccaggccttaccaacgccggcaacaaatggaaacaggaaaaaatatcagaggaaaggattgactggccgagtgtttatttccaagacagctcgcatgaagtggcagctccttgagcgcagggtcacagacatcatcatgcagaagatgaccatttccaacatggaggcagatatgaatagactcctcaagcaacgggaggaactcacaaaaagacgagagaaactttcaaaaagaagggagaagatagtcaaggagaatggagagggagataaaaatgtggctaatatcaatgaagagatggagtcactgactgctaatatcgattacatcaatgacagtatttctgattgtcaggccaacataatgcagatggaagaagcaaaggaagaaggtgagacattggatgttactgcagtcattaatgcctgcacccttacagaagcccgatacctgctagatcacttcctgtcaatgggcatcaataagggtcttcaggctgcccagaaagaggctcaaattaaagtactggaaggtcgactcaaacaaacagaaataaccagtgctacccaaaaccagctcttattccatatgttgaaagagaaggcagaattaaatcctgagctagatgctttactaggccatgctttacaagatctagatagcgtaccattagaaaatgtagaggatagtactgatgaggatgctcctttaaacagcccaggatcagaaggaagcacgctgtcttcagatctcatgaagctttgtggtgaagtgaaacctaagaacaaggcccgaaggagaaccaccactcagatggaattgctgtatgcagatagcagtgaactagcttcagacactagtacaggagatgcctccttgcctggccctctcacacctgttgcagaagggcaagagattggaatgaatacagagacaagtggtacttctgctagggaaaaagagctctctcccccacctggcttaccttctaagataggcagcatttccaggcagtcatctctatcagaaaaaaaaattccagagccttctcctgtaacaaggagaaaggcatatgagaaagcagaaaaatcaaaggccaaggaacaaaagcactcagattctggaacttcagaggctagtctttcacctccttcttccccaccaagccggccccgtaatgaactgaatgtttttaatcgtcttactgtttctcagggaaacacatcagttcagcaggataaaggggcataatcaacccatttcctgcttcaaaaggaatcagagcttttccacttcagtgtattcacatagctgaagggcatacaaaagctgtgctctgtgtggattctactgatgatctcctcttcactggatcaaaagatcgtacttgtaaagtatggaatctggtgactgggcaggaaataatgtcactggggggtcatcccaacaatgtcgtgtctgtaaaatactgtaattataccagtttggtcttcactgtatcaacatcttatattaaggtgtgggatatcagagattcagcaaagtgcattcgaacactaacgtcttcaggtcaagttactcttggagatgcttgttctgcaagtaccagtcgaacagtagctattccttctggagagaaccagatcaatcaaattgccctaaacccaactggcaccttcctctatgctgcttctggaaatgctgtcaggatgtgggatcttaaaaggtttcagtctacaggaaagttaacaggacacctaggccctgttatgtgccttactgtggatcagatttccagtggacaagatctaatcatcactggctccaaggatcattacatcaaaatgtttgatgttacagaaggagctcttgggactgtgagtcccacccacaattttgaaccccctcattatgatggcatagaagcactaaccattcaaggggataacctatttagtgggtctagagataatggaatcaagaaatgggacttaactcaaaaagaccttcttcagcaagttccaaatgcacataaggattgggtctgtgccctgggagtggtgccagaccacccagttttgctcagtggctgcagagggggcattttgaaagtctggaacatggatacttttatgccagtgggagagatgaagggtcatgatagtcctatcaatgccatatgtgttaattccacccacatttttactgcagctgatgatcgaactgtgagaatttggaaggctcgcaatttgcaagatggtcagatctctgacacaggagatctgggggaagatattgccagtaattaaacatgaatgaagataggttgtaaactgaatgctgtgataatactctgtattctttatggaaaatgttgtcctgtacttactaggcaaaacgtatgaatcggattaactggaaaatatatctgaattcaactgctgactataaatggtattctaataaaattgtgtactatcctgtgtgcttagttttaagatcaaccaatagatatatatcctacaattgatatattgctttattcacacttttattgtggctgaatttttgtgcctatctataaaacacactttcaaattatttgaattaccaagacgtctgcttttgtgacagtcagaaaacacacctggaatacgatgcagcccaccattaactcattcatgtagtttattcaagtgatttatgtatttaaactaaatattgaaaatgttagtcaaattgtggtttgcttgtcaggtatttatatcagtctgtagtggattcccaaatttcaaagctcttttaatgtaatggacaaaaataagatatgagaatattattgatgaattttcataaggtggaattgatcttaatctactaacagagaagggtagacagtttgtgttaaatgttggcatttacttgtattgaccaaagttttgcagctctactatattctgtgctcaggactaaaatgctgttaatttttttttttttttccagtgctgtgcatatattctgtgatgggaaacattgttgatgtcctaacagaaatatattttgatctattttcctatggagttgtttctattatgaccatttaattttgtttttatttaatagtagtatttccttcccttttatctaattttttatatgctgctaaatatattttaaatatactatgtttgcgaaccttggtagctatgatgagagctattatcatctgtggtgggaaaagctatgtaaataggtagattgtatagagagactatcttgtgttgtgcctgtatgaatttttaaaagttgttgactggattttgcaaaaggatgtataatatttctgtctgctcagaatattaatttgtaaattctgcaagtttaatttttatgtagatggtataacatttgaaaatattgtcttatgtgattttttcccctgaaaatatttgcttgtaaatgaaaacttagctagggcttaaataaacatgttgctatgaaatta

SEQ ID NO: 275625 - DNA, 4573 bp, Homo sapiens
  misc_feature (2303)..(2303): n is a, c, g, or t
  misc_feature (2305)..(2305): n is a, c, g, or t
  misc_feature (2308)..(2309): n is a, c, g, or t
gggaaaagaaagacaggggaagaaaaaaggctacagaactgaaggaaagcatcgagaagaaacaaagtgtggctggtaaagaggataatacagacactgaccaagagaagaaagaagaaaagggtgtttcggaaagagaaaacaatgaattagaagtggaagaaagtcaagaagtgagtgatcatgaggatgaagaagaggaggaggaggaggaggaagatgacattgatgggggtgaaagttctgatgaatcagattctgaatcagatgaaaaagccaattatcaagcagacttggcaaacattacttgtgaaattgcaattaagcaaaagctgattgatgaactagaaaacagccagaaaagactgcagactctgaaaaagcagtatgaagagaagctaatgatgctgcaacataaaattcgggatactcagcttgaaagagaccaggtgcttcaaaacttaggctcggtagaatcttactcagaagaaaaagcaaaaaaagttaggtctgaatatgaaaagaaactccaagccatgaacaaagaactgcagagacttcaagcagctcaaaaagaacatgcaaggttgcttaaaaatcagtctcagtatgaaaagcaattgaagaaattgcagcaggatgtgatggaaatgaaaaaaacaaaggttcgcctaatgaaacaaatgaaagaagaacaagagaaagccagactgactgagtctagaagaaacagagagattgctcagttgaaaaaggatcaacgtaaaagagatcatcaacttagacttctggaagcccaaaaaagaaaccaagaagtggttctacgtcgcaaaactgaagaggttacggctcttcgtcggcaagtaagacccatgtcagataaagtggctgggaaagttactcggaagctgagttcatctgatgcacctgctcaggacacaggttccagtgcagctgctgtcgaaacagatgcatcaaggacaggagcccagcagaaaatgagaattcctgtggcgagagtccaggccttaccaacgccggcaacaaatggaaacaggaaaaaatatcagaggaaaggattgactggccgagtgtttatttccaagacagctcgcatgaagtggcagctccttgagcgcagggtcacagacatcatcatgcagaagatgaccatttccaacatggaggcagatatgaatagactcctcaagcaacgggaggaactcacaaaaagacgagagaaactttcaaaaagaagggagaagatagtcaaggagaatggagagggagataaaaatgtggctaatatcaatgaagagatggagtcactgactgctaatatcgattacatcaatgacagtatttctgattgtcaggccaacataatgcagatggaagaagcaaaggaagaaggtgagacattggatgttactgcagtcattaatgcctgcacccttacagaagcccgatacctgctagatcacttcctgtcaatgggcatcaataagggtcttcaggctgcccagaaagaggctcaaattaaagtactggaaggtcgactcaaacaaacagaaataaccagtgctacccaaaaccagctcttattccatatgttgaaagagaaggcagaattaaatcctgagctagatgctttactaggccatgctttacaagatctagatagcgtaccattagaaaatgtagaggatagtactgatgaggatgctcctttaaacagcccaggatcagaaggaagcacgctgtcttcagatctcatgaagctttgtggtgaagtgaaacctaagaacaaggcccgaaggagaaccaccactcagatggaattgctgtatgcagatagcagtgaactagcttcagacactagtacaggagatgcctccttgcctggccctctcacacctgttgcagaagggcaagagattggaatgaatacagagacaagtggtacttctgctagggaaaaagagctctctcccccacctggcttaccttctaagataggcagcatttccaggcagtcatctctatcagaaaaaaaaattccagagccttctcctgtaacaaggagaaaggcatatgagaaagcagaaaaatcaaaggccaaggaacaaaagcactcagattctggaacttcagaggctagtctttcacctccttcttccccaccaagccggccccgtaatgaactgaatgtttttaatcgtcttactgtttctcagggaaacacatcagttcagcaggataagtctgatgaaagtgactcctctctctcggaggtacacagntnctnnaggggcataatcaacccatttcctgcttcaaaaggaatcagagcttttccacttcagtgtattcacatagctgaagggcatacaaaagctgtgctctgtgtggattctactgatgatctcctcttcactggatcaaaagatcgtacttgtaaagtatggaatctggtgactgggcaggaaataatgtcactggggggtcatcccaacaatgtcgtgtctgtaaaatactgtaattataccagtttggtcttcactgtatcaacatcttatattaaggtgtgggatatcagagattcagcaaagtgcattcgaacactaacgtcttcaggtcaagttactcttggagatgcttgttctgcaagtaccagtcgaacagtagctattccttctggagagaaccagatcaatcaaattgccctaaacccaactggcaccttcctctatgctgcttctggaaatgctgtcaggatgtgggatcttaaaaggtttcagtctacaggaaagttaacaggacacctaggccctgttatgtgccttactgtggatcagatttccagtggacaagatctaatcatcactggctccaaggatcattacatcaaaatgtttgatgttacagaaggagctcttgggactgtgagtcccacccacaattttgaaccccctcattatgatggcatagaagcactaaccattcaaggggataacctatttagtgggtctagagataatggaatcaagaaatgggacttaactcaaaaagaccttcttcagcaagttccaaatgcacataaggattgggtctgtgccctgggagtggtgccagaccacccagttttgctcagtggctgcagagggggcattttgaaagtctggaacatggatacttttatgccagtgggagagatgaagggtcatgatagtcctatcaatgccatatgtgttaattccacccacatttttactgcagctgatgatcgaactgtgagaatttggaaggctcgcaatttgcaagatggtcagatctctgacacaggagatctgggggaagatattgccagtaattaaacatgaatgaagataggttgtaaactgaatgctgtgataatactctgtattctttatggaaaatgttgtcctgtacttactaggcaaaacgtatgaatcggattaactggaaaatatatctgaattcaactgctgactataaatggtattctaataaaattgtgtactatcctgtgtgcttagttttaagatcaaccaatagatatatatcctacaattgatatattgctttattcacacttttattgtggctgaatttttgtgcctatctataaaacacactttcaaattatttgaattaccaagacgtctgcttttgtgacagtcagaaaacacacctggaatacgatgcagcccaccattaactcattcatgtagtttattcaagtgatttatgtatttaaactaaatattgaaaatgttagtcaaattgtggtttgcttgtcaggtatttatatcagtctgtagtggattcccaaatttcaaagctcttttaatgtaatggacaaaaataagatatgagaatattattgatgaattttcataaggtggaattgatcttaatctactaacagagaagggtagacagtttgtgttaaatgttggcatttacttgtattgaccaaagttttgcagctctactatattctgtgctcaggactaaaatgctgttaatttttttttttttttccagtgctgtgcatatattctgtgatgggaaacattgttgatgtcctaacagaaatatattttgatctattttcctatggagttgtttctattatgaccatttaattttgtttttatttaatagtagtatttccttcccttttatctaattttttatatgctgctaaatatattttaaatatactatgtttgcgaaccttggtagctatgatgagagctattatcatctgtggtgggaaaagctatgtaaataggtagattgtatagagagactatcttgtgttgtgcctgtatgaatttttaaaagttgttgactggattttgcaaaaggatgtataatatttctgtctgctcagaatattaatttgtaaattctgcaagtttaatttttatgtagatggtataacatttgaaaatattgtcttatgtgattttttcccctgaaaatatttgcttgtaaatgaaaacttagctagggcttaaataaacatgttgctatgaaatta

SEQ ID NO: 275626 - DNA, 1863 bp, Homo sapiens
acctttccattcagtcgcccaacatggctggagcgcggcggaggtgagccggccgcccgcccgcagacgccccagcctactgcgcccgagtcccgcggccccagtggcgcctcagctctgcggtgccgaggcccaacggctcgatcgctgcccgccgccagcatgttgggcgccccggacgagagctccgtgcgggtggctgtcagaataagaccacagcttgccaaagagaagattgaaggatgccatatttgtacatctgtcacaccaggagagcctcaggtcttcctagggaaagataaggcttttacttttgactatgtatttgacattgactcccagcaagagcagatctacattcaatgtatagaaaaactaattgaaggttgctttgaaggatacaatgctacagtttttgcttatggacaaactggagctggtaaaacatacacaatgggaacaggatttgatgttaacattgttgaggaagaactgggtattatttctcgagctgttaaacacctttttaagagtattgaagaaaaaaaacacatagcaattaaaaatgggcttcctgctccagattttaaagtgaatgcccaattcttagagctctataatgaagaggtccttgacttatttgataccactcgtgatattgatgcaaaaagtaaaaaatcaaatataagaattcatgaagattcaactggaggaatttatactgtgggcgttacaacacgtactgtgaatacagaatcagagatgatgcagtgtttgaagttgggtgctttatcccggacaactgccagtacccagatgaatgttcagagctctcgttcacatgccatttttaccattcatgtgtgtcaaaccagagtgtgtccccaaatagatgctgacaatgcaactgataataaaattatttctgaatcagcacagatgaatgaatttgaaaccctgactgcaaagttccattttgttgatctcgcaggatctgaaagactgaagcgtactggagctacaggcgagagggcaaaagaaggcatttctatcaactgtggacttttggcacttggcaatgtaataagtgccttgggagacaagagcaagagggccacacatgtcccctatagagattccaagctaacaagactactacaggattccctcgggggtaatagccaaacaatcatgatagcatgtgtcagcccttcagacagagactttatggaaacgttaaacaccctgaaatacgccaatcgagctagaaatatcaagaataaggtgatggtcaatcaggacagagctagtcagcaaatcaatgcacttcgtagtgaaatcacacgacttcagatggagctcatggagtacaaaacaggtaaaagaataattgacgaagagggtgtggaaagcatcaatgacatgtttcatgagaatgctatgctacagactgaaaataataacctgcgtgtaagaattaaagccatgcaagagacggttgatgcattgaggtccagaattacacagcttgttagtgatcaggccaaccatgttcttgccagagcaggtgaaggaaatgaggagattagtaatatgattcatagttatataaaagaaatcgaagatctcaggtatagttcatgttctgtaacatataatgcacatgtttgttttggattttgcaatgttataatatttctgtttgttgggcttagtgttcaacagttgtccatggtgatatttcagccctttggttaggttaactttaggagattctttacttacctttcccttgatgtcatattccaagctgttttcctcctttctcttcccatattattctcctactcttactgctatgtc

SEQ ID NO: 275627 - DNA, 454 bp, Homo sapiens
gccgcctcctcaaccttgaaagacccctcacaggccccttccgagaccctcagagtccctaaaagggctgctgacacgcccgctgttcttagcggacagtgattggctacctgaaagatagcgccagcctcctgcctcttctcccgaccctggccttccgcagtccttgtttcccattagccggccgtcccgcctgtccgctgctgacctggtctgattggtagggtgcctccaacctgccgcattcctgccccgctcacctctagctctatttcgattggatttaggacacgccatctactgtgccttcatctctattggctatctcaacttaaagctctgcctcctcaggcctgttcgaccttccttcgaaaccaccccagcctgcgaattcccattggttgcagggtcctctgtgtgttcttgcccctcctgcttaatttaacccagtccc

SEQ ID NO: 275628 - DNA, 922 bp, Homo sapiens
  misc_feature (709)..(709): n is a, c, g, or t
gagatcaggcattgctgagagagtggagaaagaaaaggcacaagcagttgagcaacaggctaagaaacgactggagcagcagaagccgacagtgattgcaacttccactacttccccaacaagcagtacaaccagcaccatctctccagcacagaaggttatggtggcccccataagtggctcagttacaactggaaccaaaatggtactaactactaaagttggatctccagctacagtaacattccaacaaaacaagaactttcatcaaacctttgctacatgggttaagcaaggccagtcaaattcaggcgttgttcaagtacagcagaaagtcctgggtatcattccatcaagtacaggtaccagtcagcaaacctttacttcattccagcccaggacagcaacagtcacaattaggcccaatacctcaggctctggaggaaccacaagcaattcacaagtaatcacagggcctcagattcgccctggtatgaccgtgattagaacaccactccaacagtcaacactaggaaaggcaattattcgaacacctgtgatggtacagccaggtgctcctcagcaagtgatgactcaaatcatcagggggcagcctgtctccactgcagtctccgcccctaacacggtttcctcaacacctgggcagaaaagcttaacttcagcaacgtccacttcaaatatacagtcnttagcctcacaaccccctcgcccccaacaaggacaagtgaagctcaccatggctcaacttactcagttaacacaaggccacggtggcaatcaaggtttgacagtagtaattcaaggacaaggtcaaactactggacagttgcagttgataccttaaggggtgactgtacctccaggcccaagcccaccactaatgcaagctggaatgccaaat

SEQ ID NO: 275629 - DNA, 140 bp, Homo sapiens
acatttcatgcattggtgccctttcctagaagtcactacgttgctggttattttaaatctgaagcttattaaatgtcttataccccattagccaccagccccaccatatcagctccaaactatcccacgatctcaagggt

SEQ ID NO: 275630 - DNA, 536 bp, Homo sapiens
gtgatagctgttcctgaggatccccgttcgacggtgtcatgcggacaaagagactagaaacgcccaagcaaatctggccctggtattattgaaacctgggtagcagaagaagaactggaattgtgggagatcaggtcatttgctgagagagtggagaaagaaaaggcacaagcagttgagcaacaggctaagaaacgactggagcagcagaagccgacagtgattgcaacttccactacttccccaacaagcagtacaaccagcaccatctctccagcacagaaggttatggtggcccccataagtggctcagttacaactggaaccaaaatggtactaactactaaagttggatctccagctacagtaacattccaacaaaacaagaactttcatcaaacctttgctacatgggttaagcaaggccagtcaaattcagacagctgcggcatctgctacaaccattgccagcacaggtcagacgttccaaattacaggcaatccagtcactatggcaggaaaagtaattaccaaac

SEQ ID NO: 275631 - DNA, 391 bp, Homo sapiens
gatggtgaggtatatgctaagagttaagtcttttgacttattattttgaccagcctttcatccttcatattgagtttcattctatagaggaatgagctctcttggcctttaccattgtgctgtgaaagtagttcaaagtggttataatggttgttccataaagaagataaaataatgaatatatatagtattatgcagagcacgtatcactctgccatattctttccattattaactcaattcatttttcatgataaccctgggaagtaggcattattattctccaaaaaatgttcaatatttgccacagtcctgaaactagtaaatggcagagttgaaatctaaacccacctggcccaccctgggaagtttgtggaagtagattctgaat

SEQ ID NO: 275632 - DNA, 296 bp, Homo sapiens
tatatggaaagagctggagctctggtttaagataaagctaaaaaaagaagtagtcatctgaactatggcaaggtgtctgaatttaagagcaacaggaagctggtggagcattttacacaaagctgtaacatgatctgatttattctttaaaatgacactctggcttctttgtggggaaggtatttaagggtagcaatctgaataagtgctaaatttcgattagcttaatgttatttcaaagactgccatgtttcctcttcatctctcttgatataccagatgataggataattagc

SEQ ID NO: 275633 - DNA, 461 bp, Homo sapiens
aaattagatgtgtggtttagtctaccatcttaacccagaaaaccatttagatctacttttgctccttttttaaaaatgaatgaagtagaagtttcaggatactgagataaagaccaaagcgttcttctgtctcctttattttctctccatgacaatgtgaaaccatatttagatcaaacaagtgttcatttaagccctgtgcttttgagaaaaatagttttgaaagtttgagcaatctgagcaaacttggcccttggagctgacccaaaggagttttctacaaaccatgaccaaactttgtggacacagaggctggttgcttaaagaacagacctctcctaggtcagaaatgataggttccactgagagcaaattcaaacaacactgtttcatttgaaggaatttcaatatctaggtttttctctaataaatacattaaacaacaagcttaatttttcttg

SEQ ID NO: 275634 - DNA, 257 bp, Homo sapiens
ggattaagggcacagaggagggtctggctttagacacgagtgtttattatagtcacaggaggaaggcagaatatgtgcgtgaaattgggtaaacatggcactgggagtctgtgggggttcttatctgattacttcaatttctcagtgaagtaggaaacagaggctgcagtagcagttttcaacattagctgtatcataggctggggaaatttttttttttttgtgacagagtctcgctctgttgcccaggctggagt

SEQ ID NO: 275635 - DNA, 338 bp, Homo sapiens
tcaactcttggaatcagctcccgtaatttatgttttcctaggtaattggcttctaaatcttgaataataaacactgaataaacatagtttttcttcagttgttcatttcttcttagggacagattcactaattcacaagtaatttgaattatcataactgatcagttatgaaaaactgttactaattcaaggatattgcattatcagaaatgttttggcaaattttataagcagaggaaaacctcacataacagagataaaaccaaaaactcattttaaagggtcatataacaatatgtttatagatgtttattgaactgctgtgtataacgccctgt

SEQ ID NO: 275636 - DNA, 433 bp, Homo sapiens
tatttcattcaggtttctgttcagaaaaaatccttccctggtgatcctattgtggtagacataaaactgtgccacccagatcccattccagggaagaatatgctgctgagctgttggaagtacaatcagtggaaaaccttggtctgtcagcaacttcaaggtttgcctcctttgcagaaatggtccattcaaagtcatgcccttcctatagcagtctacattcaaccactgagtgaggcagaaataaaaaagtgctgataattttcaacctacaagggcattaatgagcaatacctgctccagagctccacagtgggttctcagaagatgtgtcttgcctgcagcacagcttgactccttccactattcattttttcttcttttccttttacttcagaggcattaaaaatgaataaaaatcttgaactccaga

SEQ ID NO: 275637 - DNA, 499 bp, Homo sapiens
tgctctgtgtgagttagaagatggaactcctcatctgtgaagagggaaagccaatgctccagggctaatggtttactgagaggatgatggacttggtctcttcctttctgctgagttagaggacagggcttattcagaaatgtctagttaatctctgctttttccgacttcaaggacctaatcataacactttgctactggcaactcaagcattatatattctgttatttttaaatattctattattttcttgcttgttttagacagtaacattgtttccttttactgctcagtctgggcatggctcatgattgcccattatagcttcagctgacatggatcctgtgttttagcaactagttctccaagtgtggccgctgacccgcagtatcagatcctctgggaaatgcaatgttagaaatgcaaatttctaggtcctaccccagaccgaatgaatccaacttctagaataaggccaagtaaatcagcgttttaattt

SEQ ID NO: 275638 - DNA, 624 bp, Homo sapiens
acacacaaggatcctcaataagataaggagatctctcatcagaaactttggagggacccactcccaagatggcagccgcaatggctgccagctgttgcggccacagtgaagacaggcagcaaaacaccagctggtcccagattcactgctaagtgctgaggggagtttttctctatcctctgtgacatttccaattttagataatgcctcacatctctgcccccactccagaacccgctgatgcccccatgatcccaaagaagacagcctaccctagaattcacccccaggatgttgcaacaccacattttgtttttacataatttaagagactaatgcattaaaaaaatagatataggttatgtttttagacacacaacgtgtaagatgcaatatcatgacatcaacaactgaaaggggtgagaaatggagctgttgaagaagccgagttttctatgctattgaagttaagctattataaattcaaattacagtgttataacttcaggatgttaaatgtaatgcccatggcaaccacacagaaaatagctaaagaatatacaccaaaaaaaatgagggccgggtgtagtggctcaagcctgtaataccagcactttggagacc

SEQ ID NO: 275639 - DNA, 415 bp, Homo sapiens
atgtttgattcatttaatcatttagatgcccctgcaaaccagttaaaagtgcatcctggccaggtgcagcggcccctgctgtaatcccagcactttgggaggacaaggcgggtgcgtggcttgagcccaggagttcaagaccagcctggacaacatggcgaaaccccatcttgatatacatgtatatacatctcccacaaaaaattaactgggcatggttgcaggtgcctgtactcaggaggctgaggcagggaggatcaattgagctcaggaggcagaggttgcagtgagttgaaatcataccgctgcactccagccttggtgacagagcaagactgtgtctcaggaaaagaaaaaaaatgcatcccattgttttttggggtgttttgattcttccttttctaatgtgcctcac

SEQ ID NO: 275640 - DNA, 480 bp, Homo sapiens
ttcaccccaatcatcttgatgcagagaggcttcagaaacacaagtgactctgtgttcagaccaagtacttggcctcgagaagatgaatgatcagaccaactcaccatatgattataagggtcaggtagtttaaaaagaaattacaatctgaattgaaccatggatgaacagtgttgctattgagcttcgaatcccagctaataagcataaccttgtaaagagaggttactgtttgggaaactgcatgttcttgcaggagggcaaagcttttgcaatataaatagttgtaagggtactagctttcatctttaataccttaaccctctgtgtttagagtttttgtatccagggctgaattgagaattttagaaaccttgaacactgaagagattgtaataacaaccccatgtgtaatttataaaatcttcaaaagaaaatttactttttcaaaatgttataaaactctgaatactgaaatga

SEQ ID NO: 275641 - DNA, 383 bp, Homo sapiens
ccttggtacctaacgtagtacctagtactctaaagtgggcattgaatatttattgaatgaatagatgtcagctccttttatgtttcaggcagcatgataagagttttacatgtatgtatgtatgtatttatgtatttatttgtatttacatatatgtatatatttatttatttattgcaaaaggggatctcactttctgtcccaggctggagtggagtggtgtgatcatagctcactgcagcctcaaacacctgagctcaggtgatcctcctgccttagccttccatgtatcgcagctactcgggaggctgaggtgggaagattacttgagcccaggaatttggggctacagcgaaccatgattgtgccactacactccagcc

SEQ ID NO: 275642 - DNA, 563 bp, Homo sapiens
ggtgtgcgccaccacgcccagctaatttttgtatttttagtagagacaggctttcaccacgttggtcaggatggtctcgatcttttgaccttgtgatctgcctatttctaaatttaagtttaaatgtctttccaatattgttgaaccaaccttacccatatttacttgaatatgtgggaacaaaatacttttttcaacattaaattttaatgaatttttattttcaatctagttgacattaacaaggctcttcttgccaagagaaagagactagaaatgtataccaaggcttctctcaaaactagtaaccagaaaattgaacatgtttggaaaacacaacaagatcaaaggtaaggtggttgctttttttttagagccacatttcttagtatttactggtataaattacttatgaaaaatactattctaggatcggcacggtggctcatgccagtaatcccagcactttgggaggccaaggcaggcagatcacttgaggtcaggagttagagaccagcctggccaacatggtgaaactccatctctactaaaaatacaaaaat

SEQ ID NO: 275643 - DNA, 1115 bp, Homo sapiens
agcttgcctcagaagcgtcgcggagaaggggccacctcaggtgaagcgcgcttgtggaggagttgtggaggacgcctgtcgacgaccagtaactggtcctcggccattgcggtgtgtttcaggaagcatctaaatatggtgtcctccggaaaaaagtattccaggaaatctgggaagccgtctgtggaagatcagtttacgagagcctatgactttgagactgaagataagaaagatctgagtggatcagaggaagatgttattgaagggaagactgcagtcattgagaaacgtaggaagaaaaggtcttctgcaggagtagttgaagatatggggggtgaagtgcagaatatgctggaaggagttggagttgacattaacaaggctcttcttgccaagagaaagagactagaaatgtataccaaggcttctctcaaaactagtaaccagaaaattgaacatgtttggaaaacacaacaagatcaaaggcagaagcttaaccaagaatattctcagcagtttctgactttgtttcagcagtgggatttagatatgcagaaagctgaggaacaagaagaaaaaatacttaatatgtttcggacagcaacaaagaattcttcaacaatctagaattgttcagagccagagattgaaaacaattaaacagttatatgagcagttcataaagagtatggaagagttggagaagaatcatgataatctacttactggtgcacaaaatgaatttaaaaaagaaatggctatgttgcaaaaaaaaattatgatggaaactcagcagcaagagatagcaagtgttcggaagtctcttcaatccatgttattctgatgactctttgaagaaagaacttgaacctaagtaatatgatacaattataacgttagctaagaagcatattgtaagtctttagaatagtttaattgtaacatctttaatcataaacctgtttcattgtaagacctccctttctgttaagtcaaatctaaatagttatgagttagttagcaactattcctaaagaatatgtattaagctttcagctctttagtaatgatagtgaatttttctctctaacactgtcaattaaataaagacg

SEQ ID NO: 275644 - DNA, 1243 bp, Homo sapiens
agcttgcctcagaagcgtcgcggagaaggggccacctcaggtgaagcgcgcttgtggaggagttgtggaggacgcctgtcgacgaccagtaactggtcctcggccattgcggtgtgtttcaggaagcatctaaatatggtgtcctccggaaaaaagtattccaggaaatctgggaagccgtctgtggaagatcagtttacgagagcctatgactttgagactgaagataagaaagatctgagtggatcagaggaagatgttattgaagggaagactgcagtcattgagaaacgtaggaagaaaaggtcttctgcaggagtagttgaagatatggggggtgaagtgcagaatatgctggaaggagttggagttgacattaacaaggctcttcttgccaagagaaagagactagaaatgtataccaaggcttctctcaaaactagtaaccagaaaattgaacatgtttggaaaacacaacaagatcaaaggcagaagcttaaccaagaatattctcagcagtttctgactttgtttcagcagtgggatttagatatgcagaaagctgaggaacaagaagaaaaaatacttaatatgtttcggacagcaacaaagaattcttcaacaatctagaattgttcagagccagagattgaaaacaattaaacagttatatgagcagttcataaagagtatggaagagttggagaagaatcatgataatctacttactggtgcacaaaatgaatttaaaaaagaaatggctatgttgcaaaaaaaaattatgatggaaactgtaagtgatcatattgaaattgaaaaaataaggattaatataagcaatgaaatattttatttgctgaaataggtataacacttaaataaaaattaaacaaatgtttaatatctccttccatgaaacagcagcagcaagagatagcaagtgttcggaagtctcttcaatccatgttattctgatgactctttgaagaaagaacttgaacctaagtaatatgatacaattataacgttagctaagaagcatattgtaagtctttagaatagtttaattgtaacatctttaatcataaacctgtttcattgtaagacctccctttctgttaagtcaaatctaaatagttatgagttagttagcaactattcctaaagaatatgtattaagctttcagctctttagtaatgatagtgaatttttctctctaacactgtcaattaaataaagacg

SEQ ID NO: 275645 - DNA, 470 bp, Homo sapiens
  misc_feature (57)..(58): n is a, c, g, or t
ctgaccctgtattccccccctgtgacaccccgccacgacgcctccggtagacactgnnggagttaatcatgataatctacttactggtgcacaaaatgaatttaaaaaagaaatggctatgttgcaaaaaaaaattatgatggaaactcagcagcaagagatagcaagtgttcggaagtctcttcaatccatgttattctgatgactctttgaagaaagaacttgaacctaagtaatatgatacaattataacgttagctaagaagcatattgtaagtctttagaatagtttaattgtaacatctttaatcataaacctgtttcattgtaagacctccctttctgttaagtcaaatctaaatagttatgagttagttagcaactattcctaaagaatatgtattaagctttcagctctttagtaatgatagtgaatttttctctctaacactgtcaattaaataaagacg

SEQ ID NO: 275646 - DNA, 218 bp, Homo sapiens
caagcatggtatgttgtggatcttctaaagtgtttaaaatgtaatttctttccaggggtgaagtgcagaatatgctggaaggagttggaggtaggttttaggagatacttgtatttaaagaaaattgttttaagccatataatttgtataataacaaatgttaataatggactataagactgttatttaatgccttgttctcacatagaagattctgc

SEQ ID NO: 275647 - DNA, 242 bp, Homo sapiens
gaagcatctaaatatggtgtcctccggaaaaaagtattccaggaaatctgggaagccgtctgtggaagatcagtttacgagagcctatgactttgagactgaagataagaaagatctgagtggatcagaggaagatgttattgaaggtgcagtacatctcatgttgggcagtgatgtccttcagttcatttgttttgaacccattgagactatcgtacaacttagtttgtaaagcattttca

SEQ ID NO: 275648 - DNA, 1051 bp, Homo sapiens
agcttgcctcagaagcgtcgcggagaaggggccacctcaggtgaagcgcgcttgtggaggagttgtggaggacgcctgtcgacgaccagtaactggtcctcggccattgcggtgtgtttcaggaagcatctaaatatggtgtcctccggaaaaaagtattccaggaaatctgggaagccgtctgtggaagatcagtttacgagagcctatgactttgagactgaagataagaaagatctgagtggatcagaggaagatgttattgaagggaagactgcagtcattgagaaacgtaggaagaaaaggtcttctgcaggagtagttgaagatatggggggtgaagtgcagaatatgctggaaggagttggagttgacattaacaaggctcttcttgccaagagaaagagactagaaatgtataccaaggcttctctcaaaactagtaaccagaaaattgaacatgtttggaaaacacaacaagatcaaaggcagaagcttaaccaagaatattctcagcagtttctgactttgtttcagcagtgggatttagatatgcagaaagctgaggaacaagaagaaaaaatacttaatatgtttcggacagcaacaaagaattcttcaacaatctagaattgttcagagccagagattgaaaacaattaaacagttatatgagcagttcataaaggtttgttgtatgtggtaacacaatacatcgttataaaacataatatatttatggaagtagaagataattctttctaagtttatgggaaaaaacattttagactttaactacttttccattttgaattcattgtttctgatttaagtgataaatatatttttacttgaggattcaaatggttttgttgggattattcaagacaggaaatggtaaattgggaattttacttagaaatatacttatcatgcataaaatccatactttaataacacttcagtcatagttctctgtttaagtgaaaatagactctataataatcatttttaggttgtattttacttgtttttttatccccagtgtttg

SEQ ID NO: 275649 - DNA, 221 bp, Homo sapiens
accgaacctccaagacacacagcttacccatgtaacaaacctgcacatatacccccagaacctaaaataaaggaagaaaaaaaaaagcattgtcttaaaacaacccaatctcaaactgaacatgtctaaacctatcactcccttcccctgccaagtctacttcctgccctttttccttatctagtgaatgccatcaccatctgtttatttgcctaagacag

SEQ ID NO: 275650 - DNA, 836 bp, Homo sapiens
  misc_feature (716)..(716): n is a, c, g, or t
  misc_feature (820)..(820): n is a, c, g, or t
agcgggtcaggtagagaagtagatactggctgtaatcctcaagtaaatgggatattcacaatgtatggaaacagaggtcattgaatctttgggaattattatttataaagcactggactatggtttgaaggagaatgaagaaagggaattaagccctcccctagagcagcttatcgatcacatggccaacacggtggaagctgacggtagcaatgatgagggctatgaggctgcagaagaaggcctgggagatgaagatgaaaagagaaaaatctcagctattcggtcatatagagatgtcatgaagttgtgtgctgctcatctccctactgaatcagatgcaccaaatcattatcaggcagtatgtcgtgcactgtttgcagaaacaatggagctccatacatttctgaccaaaattaagagtgcgaaagagaatcttaagaagattcaagaaatggaaaagagcgatgaatctagcacagacttggaagagctgaaaaacgctgactgggcacgattctgggtacaggtgatgagggatttgaggaatggggtaaaacttaagaaggtccaagagcggcagtacaaccctttgcccattgaatatcagctcaccccttatgagatgttaatggatgacattcgctgcaaaagatacaccttgcgaaaagtgatggtgaatggtgatattccccctcggttaaaaaaagaagtgntccatgaaaatcatcctccgactttcaatcaggattccagaccctccttttaaatccagtcttcagccagaaaaccttgaaaccaacttcccaccacgggccanggaggcctcccattga

SEQ ID NO: 275651 - DNA, 702 bp, Homo sapiens
agcgggtcaggtagagaagtagatactggctgtaatcctcaagtaaatgggatattcacaatgtatggaaacagaggtcattgaatctttgggaattattatttataaagcactggactatggtttgaaggagaatgaagaaagggaattaagccctcccctagagcagcttatcgatcacatggccaacacggtggaagctgacggtagcaatgatgagggctatgaggctgcagaagaaggcctgggagatgaagatgaaaagagaaaaatctcagctattcggtcatatagagatgtcatgaagttgtgtgctgctcatctccctactgaatcagatgcaccaaatcattatcaggcagtatgtcgtgcactgtttgcagaaacaatggagctccatacatttctgaccaaaattaagagtgcgaaagagaatcttaagaagattcaagaaatggaaaagagcgatgaatctagcacagacttggaagagctgaaaaacgctgactgggcacgattctgggtacaggtgatgagggatttgaggaatggggtaaaacttaagaaggtccaagagcggcagtacaaccctttgcccattgaatatcagctcaccccttatgagatgttaatggatgacattcgctgcaaaaaaaaaacacctttgccaaaaaagggaagggggaaaaggggggatttttt

SEQ ID NO: 275652 - DNA, 887 bp, Homo sapiens
  misc_feature (767)..(767): n is a, c, g, or t
  misc_feature (871)..(871): n is a, c, g, or t
actgcatccaacgccgccagcagtatgtcgtgcactgttgcagaaacaatggagctccatacatttctgaccaaaattaagagtgcgaaagaggtaaatgggatattcacaatgtatggaaacagaggtcattgaatctttgggaattattatttataaagcactggactatggtttgaaggagaatgaagaaagggaattaagccctcccctagagcagcttatcgatcacatggccaacacggtggaagctgacggtagcaatgatgagggctatgaggctgcagaagaaggcctgggagatgaagatgaaaagagaaaaatctcagctattcggtcatatagagatgtcatgaagttgtgtgctgctcatctccctactgaatcagatgcaccaaatcattatcaggcagtatgtcgtgcactgtttgcagaaacaatggagctccatacatttctgaccaaaattaagagtgcgaaagagaatcttaagaagattcaagaaatggaaaagagcgatgaatctagcacagacttggaagagctgaaaaacgctgactgggcacgattctgggtacaggtgatgagggatttgaggaatggggtaaaacttaagaaggtccaagagcggcagtacaaccctttgcccattgaatatcagctcaccccttatgagatgttaatggatgacattcgctgcaaaagatacaccttgcgaaaagtgatggtgaatggtgatattccccctcggttaaaaaaagaagtgntccatgaaaatcatcctccgactttcaatcaggattccagaccctccttttaaatccagtcttcagccagaaaaccttgaaaccaacttcccaccacgggccanggaggcctcccattga

SEQ ID NO: 275653 - DNA, 849 bp, Homo sapiens
  misc_feature (729)..(729): n is a, c, g, or t
  misc_feature (833)..(833): n is a, c, g, or t
gtctgttacccaccctggcgccgcgtcgacgacgcgggaagcgcccccagtgcgggtaaatgggatattcacaatgtatggaaacagaggtcattgaatctttgggaattattatttataaagcactggactatggtttgaaggagaatgaagaaagggaattaagccctcccctagagcagcttatcgatcacatggccaacacggtggaagctgacggtagcaatgatgagggctatgaggctgcagaagaaggcctgggagatgaagatgaaaagagaaaaatctcagctattcggtcatatagagatgtcatgaagttgtgtgctgctcatctccctactgaatcagatgcaccaaatcattatcaggcagtatgtcgtgcactgtttgcagaaacaatggagctccatacatttctgaccaaaattaagagtgcgaaagagaatcttaagaagattcaagaaatggaaaagagcgatgaatctagcacagacttggaagagctgaaaaacgctgactgggcacgattctgggtacaggtgatgagggatttgaggaatggggtaaaacttaagaaggtccaagagcggcagtacaaccctttgcccattgaatatcagctcaccccttatgagatgttaatggatgacattcgctgcaaaagatacaccttgcgaaaagtgatggtgaatggtgatattccccctcggttaaaaaaagaagtgntccatgaaaatcatcctccgactttcaatcaggattccagaccctccttttaaatccagtcttcagccagaaaaccttgaaaccaacttcccaccacgggccanggaggcctcccattga

SEQ ID NO: 275654 - DNA, 738 bp, Homo sapiens
agcgggtcaggtagagaagtagatactggctgtaatcctcaagtaaatgggatattcacaatgtatggaaacagaggtcattgaatctttgggaattattatttataaagcactggactatggtttgaaggagaatgaagaaagggaattaagccctcccctagagcagcttatcgatcacatggccaacacggtggaagctgacggtagcaatgatgagggctatgaggctgcagaagaaggcctgggagatgaagatgaaaagagaaaaatctcagctattcggtcatatagagatgtcatgaagttgtgtgctgctcatctccctactgaatcagatgcaccaaatcattatcaggcagtatgtcgtgcactgtttgcagaaacaatggagctccatacatttctgaccaaaattaagagtgcgaaagagaatcttaagaagattcaagaaatggaaaagagcgatgaatctagcacagacttggaagagctgaaaaacgctgactgggcacgattctgggtacaggtgatgagggatttgaggaatggggtaaaacttaagaaggtccaagagcggcagtacaaccctttgcccattgaatatcagctcaccccttatgagatgttaatggatgacattcgctgcaaaagatacaccttgcgaaaagtgatggtgaatggtgatattccccggtataaaagagtgctcatgcatcatcctcgatttcatcgctg

SEQ ID NO: 275655 - DNA, 199 bp, Homo sapiens
tctcccacaggtgctgagaccacagcgctgttccacaaagccccaggaagccacattaccctgtccaccggcctctctagccccatcttgcccaggaagtgggaccttggcgtatcgctgtgaccacacctcccagccggtcagcctggccgctcaggctctacctgcaaaggcaaggccccacccaaccagcacccct

SEQ ID NO: 275656 - DNA, 947 bp, Homo sapiens
ttcctttttacctacaatgttttggagcagaaatcactatatatcaaaacagtaacatggggttggagtttacactgattccttagctactctttgaaggctgtggagtaacccaaggcagacgtaagagacatgttccaactgagaactccaaataagggtgagtcagttttgcttttcagaagtacgtgtttcttctgagatgctgaacttcttaggtgaagtattacctatttctaggtttaatctcctttgacttttttttatagaaaatgttgacagaaactctattaagagactttgaaaatgcagcatcattctacagaaaaatagagacctagggtagttaaacaatctgctccaaactttataaaattttagcaggaagaagctagatcacttccagacacagtgggtcacactttgtgctagcacttctgaagaccaaagcaggaggaccgcatgaggccaggagtgcaagaccagcttgtgcaacacagtgagacgccatctctggaaaaagttaaaaaaaaaaaataatagccaactgtggtggctaaaaaataacctagattttttttaacatttgaggagtttgggctctacattagacttccttacttgagtttacaacataactttacagaattaaaatactgaaagttgaatcttcagccatcaatatttatatacagagttatatggagtgttctacagagtgttctgaagtggaatcttgaaaaaaaaaagttctaaactaattatttcatgtgatgattacctgttttgttatctacaataagttttagttaaaaatgagatttttggttgggcgcagtagcacatgcctataatcccagcactttggaaggctgaggtgggcagatagcttgagcccaggagttctataccagcctgggcaacatggaaaaacccatctctacaaa

SEQ ID NO: 275657 - DNA, 393 bp, Homo sapiens
ggaacctaccccataagcctgagagcactcggctttccattctacatccatttagagtagaccatccccaaatgaaatctgaattctgttcaatttaaggctaggcacagtggctcgtgcctgtaatcccagcactttgggaggccaaggctggtgaatcacttgagcccaggagatcgagaccagtctgggcaacatggtgaaaccccacctctataaaaaatacaaaaactagctgggcgtggtggcgtgtgcctgtagtctcagctactcaggaggctgaagtgggaggatcacttgaactgggagacagaggctgcagtgagccgagatcaaactactgggctccagcctgggtgacaagagcaagaccctgtctttaaatttaaaaaa

SEQ ID NO: 275658 - DNA, 345 bp, Homo sapiens
  misc_feature (11)..(11): n is a, c, g, or t
  misc_feature (228)..(228): n is a, c, g, or t
  misc_feature (310)..(310): n is a, c, g, or t
  misc_feature (313)..(313): n is a, c, g, or t
tgggccttctngatacccgagaggcactgggcaatgcggtgctgtggctcgctaggtcttcgcccccatcccgccccctcccaaagccccagctccaggagccccccgcaaccccaggcgcttgtctcacctggctcggtacacaggtaggagtaaaagccctctgacttgagcatgatgagcagcgagccccagcccaggaggactgccgagaagaggaggttctcncagcacggccgtgcaggccattccaccagcggcgccgatgggcagtggccagggtgggcgccatggtgcggcgcggcgcggnctnccggctccggctccggctctgcaccacctgcg

SEQ ID NO: 275659 - DNA, 232 bp, Homo sapiens
attgccttgaggggagtgttgatagaaataagggcattaaagtctattttgttgtggtctcagatataaatgagggacatgtacttggaaattggaagaaaggtaatctttgttacaaagtagcaaacaaaatggctgctgccttgtcttctagtgttttgtggaaggcagaagttgtgaataacaaacatagaaatttagctgaggagatttcagagcaaaggattgaagg

SEQ ID NO: 275660 - DNA, 890 bp, Homo sapiens
  misc_feature (149)..(149): n is a, c, g, or t
  misc_feature (151)..(151): n is a, c, g, or t
  misc_feature (167)..(167): n is a, c, g, or t
  misc_feature (171)..(171): n is a, c, g, or t
  misc_feature (176)..(176): n is a, c, g, or t
  misc_feature (185)..(185): n is a, c, g, or t
  misc_feature (187)..(187): n is a, c, g, or t
  misc_feature (197)..(198): n is a, c, g, or t
ttccccacctcccccccggggcaaagggttcagaaagggaggccccgagattcaaaaaccttttttaagaaactcccccccgggacctttttttccattgggaaccctggagaatgccgcaccaagaccaacttgccaattcatatgtntnaaaagaagaaacccangggntgatntagtcaagntnatcctctccnnccagcggaaaagaacaggaggcagaaggtgaggccacagtcatttgagccctgcaggcccctccggacgtcaccacggtggccgtggaggagacaataccctcattcacggggaggagcccaaaccactgacccacagactctgcaccccgacgccagagatacctggagcgacggctgctgaaagaggctgtccacctggcggaaccaccggagcccggaggcttggcgtccccctgggctggcttccgtctcctccagtggagggagaggtggggccctgctggggtagagctggggacgccacgtgccattcccatgggccagtgagggcctggggcctctgttctgctgtggcctgagctccccagagtcctgaggaggagcgccagttgcccctcgctcacagaccacacacccacgcctcctgggccacgcagagggcccttcagaccccagctgtctgcgcgtctgactcttgtggcctcagcaggacaggccccggcactgcctcacagccaaggctggactgggttggctgcagtgtggtgtttagtggataccacatcggaagtgattttctaaattggatttgaattcggctcctgttttctatttgtcatgaaacagtgtatttggggagatgctgtgggaggatgtaaatatcttgtttctcctcaaactgtcacctcc

SEQ ID NO: 275661 - DNA, 265 bp, Homo sapiens
agaccactggcgagctggagggctggcagacacccctggaccaacttggtcaaagtgggaccctttttcctcaagaacagcagctgtaggtgatgagtgccatcatgcactggctgagtcatgattcttcaggggatatggaagactgaattagctttagggatctttgtaaaatatagaaaagtatagtacaaagtcaaatatgaatattaaaaatgtactgtaaagatcaagcatgatataaatttattttttcactttagta

SEQ ID NO: 275662 - DNA, 362 bp, Homo sapiens
ttctgggtttggggctttgggaatgtgctagtcacaagccctgtggagagtttttatttgcaagtttgggaaactgcctcaagtattatctgcacttctataaactgtgtcctagaagcctgtactatgttattatgtaatgtaatatactacatatgttagtgtataatatactgcgttatgttatagcagagtaagtgatgtttgtccttcttggtgcactgaatcagactcatagtgtgggtttgtcccctgggtggcaatgctaagttgtgtcacttcatgaggctggagtctgccataactctccattgcaaatcccttttcccttttatagctaataaagataatgtgtagggtga

SEQ ID NO: 275663 - DNA, 489 bp, Homo sapiens
aggggtgagagacggagagaggaaaaagaggggggcggccagaagagggaaggagaggcgtggggacagggcccccgcccccgccggggtcgggtttgatggtgaaatagtaaacccacgcacggagggtcgccaggaaagtggacattaccgctttaattaacttcgagatgctccggcggcgggacctggcgtagccgtgacgcgcccccataaatctgcccggcccggggctgctccgagaactcgtacagtagcggcgtcagatccatcccgcgcctcccagtccggagtccatttgcataattggattttttttttttgcctccttctttctccctgaaacttgtttgaaaacccaagtgaaaaccgcgacgatctgcacactcaaaagcaagtgccaagtttcctgaccaccacggctttaagaatatccttcaaccgggagggagatccattgctttaagacttgcctggtaaggaccatcg

SEQ ID NO: 275664 - DNA, 2231 bp, Homo sapiens
aggggtgagagacggagagaggaaaaagaggggggcggccagaagagggaaggagaggcgtggggacagggcccccgcccccgccggggtcgggtttgatggtgaaatagtaaacccacgcacggagggtcgccaggaaagtggacattaccgctttaattaacttcgagatgctccggcggcgggacctggcgtagccgtgacgcgcccccataaatctgcccggcccggggctgctccgagaactcgtacagtagcggcgtcagatccatcccgcgcctcccagtccggagtccatttgcataattggattttttttttttgcctccttctttctccctgaaacttgtttgaaaacccaagtgaaaaccgcgacgatctgcacactcaaaagcaagtgccaagttgtgcaggacagcattgcatggcacggctgcttgttttgtgctttcacaacgtcctccatggagctcatggcccttcatctccaggccaaccacctgggcaaagcgaaacgcaaagataacaccatcggggtcacagtcaactgcaaagaccaagcccgggaggcgagtaagatggccctgctgccctcgttacaatcaaacaaagacctgggcctctccaatatgatcagctctctagactctgcttctgagaagatggcccaaggtcagctcaaggagactctgggagagcagaagagcggtgcatggaccggccacgtggaccctgcattttgtaacttcccatcagacttctacaagcagtttggtgtttacccaggcatggttggctcaggggcctccagttcctgccccaacaaggagcctgatggaaaggcccactctgaagaggatgtccccatcctgatccccgaaaccacgagtaagaacactactgatgacctctctgacattgcctcctcagaggacatggactcctccaagggggagaacaacgatgaagaggatgttgaaaccgaaccggaaatgatgaccaagccactgtctgccctcagcaaagacagcagcagcgatggcggggacagcctgcagcccacaggcacctcccagcccgtccagggactggtctcacctttatcccaagcaccggagaagcagtggcacagccagggtcttctccaagcccaggaccccttggcgggcctgccaaagccggagcgggggccccagagcctggacaagccgatgaacatgctgtcggtcctcagggcctacagttctgatggcttagcagcctttaacggacttgcaagtagcacagcaaattctggatgtatcaagaggccagacttgtgtggtaagtgacactccctgtcctagtcggtctatctggacttgcccttgtctgttcgtggtcctcggtggttatctgcagcttgttaatcgtgtaaagtcaagagaagaatgtatacacatatgtgtgttgaataattactattggcataggtatgtgtatacacacggtgcaccaatctacagtatatatagcagagaatcagaggctaaaaatattaccccatatgttccagtattagtcatggattgcaaaggcttagtaacttgagcaggagagaaaactccctcaaagtcataaatcctgagtgacaactgctgctggatgacagatcccttcacctgtggacaacctggctgggggtggggggctgttccaccagctcacctgagcatgtagaggtgggtcctgcagtggtctcgtgggtattactgcttgtgtctgattgtcctgtattttgtaacactttagaagaatacagaaaagtgcagtaattctctttctccatagtatttaagcagaaatattgctagtttaatattgtgtcaggtcgtcctattaaccaggagcagatgacagtaaaatttcagtgaatagcaccttgacatctacaacttaaaaatggtgattgaagcaaaatatgtaaacttgtacggggtgatcgtgtgctttggaacagagtattgttgaagtaattagaagatatattaaggtgttcctggtaatgaaggcatgtaagttataataattgtagctttctgaataagtgtcaaactatatctttaagtgtgctgtatgctgagttacaagttaggtcatttatgaatggaatgtaaaataatactaaaaatgcttcaataacttatcttggtattgctaataaaaaaaaaaagctgtgaaacattagtgca

SEQ ID NO: 275665 - DNA, 308 bp, Homo sapiens
tgttgtgtgcaaagcccagggttcaaataagcagtaattatctcctattacttagtgctgatcaacagcacctctacgtctaattgccaacctgccctaatcatgttgactattcttgctttagccagagacagaaggaccaaattttataaataacactttattgtcattattccattaaacgattaggggatgtggccctgcccttgctttcaaatgcctctagccctgatggtttctggattatttaataaatctgcacattttcttgcaggtaagtgacactccctgtcctagtcggtctatct

SEQ ID NO: 275666 - DNA, 892 bp, Homo sapiens
gataaacgcctcttttttttcttatatcaaaatcttgcaggtgagaaaccctacaagtgtccgcactgtgactatgccggcacgcagtcagcatccttaaaataccacttagagcgacaccatcgggagcggcagaacggggctgggccgctgtctgggcaacccccaaatcaagaccacaaggatgagatgtcaagcaaagcttctctgttcatcaggccagacatcctgaggggggccttcaagggtctccctggaatcgacttcagaggaggccctgcatctcagcagtggacatcaggggttctctcctctggagatcactcggggcaggccacgggcatgtcttcggaggtcccctcagatgctctgaaaggcactgaccttccttccaaaagcacccacttctctgagatcggaagagcttatcaaagcattgtgagcaacggtgtgaatttccaagggtccttgcaagctttcatggacagttttgtcctcagttccttgaagaaggagaaggacatgaaggacaaagccctggctgaccccccttccatgaaagtccacggagtggatggtggtgaggagaaacccagtggcaagtcctcccagaggaagtccgagaaatctcagtatgaacccctggacttgtctgtgcggccagatgccgcctccctcccgggctcctcggtaactgtgcaggacagcattgcatggcacggctgcttgttttgtgctttcacaacgtcctccatggagctcatggcccttcatctccaggccaaccacctgggcaaagcgaaacgcaaagataacaccatcggggtcacagtcaactgcaaagaccaagcccgggaggcgagtaagatggccctgctgccctcgttacaat

SEQ ID NO: 275667 - DNA, 4941 bp, Homo sapiens
gtctggagaagagagtttccacgttgtcatcataggatctggactcaagtgaccaaaaccttgcttggatttttacctgatgaagtttgtcttgaaaagtgaaaatggttccatttccattttccctgttctcaagggatggaagaagcgagcctgtgccttggagtgtcttcggcggagccggaagctgagccccacctgagtggccccgtcctcaacggccagtatgccatgagtcagaagctgcaccagatcacctcccagctcagccatgccttccccgagctccatccccggcccaaccccgaggagaagccccccgcatccctggaggagaaggcccacgtgcccatgagcggccagcccatgggcagtcagatggcgctcctggccaaccagctgggccgggaggtggacaccagcctcaacgggagggtggacttgcagcagttcctcaacgggcagaacctgggcatcatgtcccagatgagcgacatcgaggacgacgcccgcaagaaccgcaagtacccgtgcccactctgcggcaagcgcttccgcttcaacagcatcctctccctgcacatgcgcacgcacacgggcgagaagcccttcaagtgcccgtactgcgaccacagggcggcgcagaaggggaacctcaagattcacctgcggacccacaagctgggcaacctgggcaaggggcgtgggcgtgtgcgcgaggagaaccgcctgctgcacgagctggaggagcgcgccatcctgcgggacaagcagctgaaaggcagcctgctgcagccccggccggacctgaagcccccgccgcacgcccagcaggccccgctggccgcctgcaccctggccctgcaggctaaccacagcgttcccgacgtggcccacccggtgccctcgcccaagcctgccagcgtgcaggaggacgcggtggccccggcggcgggcttccgctgtaccttctgcaagggcaagttcaagaagcgcgaggagctggaccgccacatccgcatcttgcacaagccctacaagtgcacgttgtgcgacttcgcggcttcgcaggaggaggagctcatcagccacgtggagaaggcacacatcacggccgagtcggcccagggccagggccccaacggcggtggcgagcagtcggccaacgagttccgctgcgaggtgtgcggtcaggtgttcagccaggcgtggttcctcaagggtcacatgcgcaagcacaaagactcctttgagcactgctgccagatctgcggccggcgcttcaaggagccctggttcctcaagaaccacatgaaggtccacctcaacaagctgtcggtgaagaacaagtcccccagcgaccccgaggtgcctgtgcccatgggcggcatgtcccaggaggcccacgccaacctgtactccaggtacctctcctgcctgcagagtggcttcatgaccccggacaaagccggcctgagcgagcccagccagctctatggcaagggcgagctgcccatgaaggagaaggaagcgctggggaagctgctgtctcccatctccagcatggcccacggcgtcccggagggggacaagcactccctcctgggatgcctcaatctcgtgccgccgctgaaatccagctgcatcgagcggctgcaggcggctgccaaggctgcggagatggaccccgtgaacagctaccaggcttggcagctcatggccaggggcatggccatggaacatggcttcttgtctaaagagcatccgctgcagcgcaaccacgaagacactttggcaaacgccggggttctgtttgataaggagaagcgggagtacgtgttagtgggagcagatggctccaagcagaaaatgcctgctgatttggttcacagcactaaagtgggcagccagagagacctgccaagtaagctcgaccctttagaaagcagtcgggattttttgtcacacgggctgaaccagactctcgagtataacctgcagggtcctgggaacatgaaggagaagcccaccgagtgccccgactgcggccgggtgttccgcacttaccaccaggtggtcgtgcactcccgtgtccacaagcgggaccgcaagggcgaggaggatgggctgcacgtgggcctggatgagcggcgtggctcgggcagtgaccaggagtcccagtcggtgagccgctccaccacgccgggctcctctaacgtcaccgaggagagcggggtcggaggcggcctctcccagaccgggagtgcccaggaggacagcccgcacccctcctcgccatcctcctcagacattggcgaggaggctgggagatctgccggcgtccagcaaccagcgctgcttcgcgacagaagcctgggctcggccatgaaggactgcccgtactgtgggaaaactttccggacatcccatcaccttaaggtgcacctgaggatacacacaggtgagaaaccctacaagtgtccgcactgtgactatgccggcacgcagtcagcatccttaaaataccacttagagcgacaccatcgggagcggcagaacggggctgggccgctgtctgggcaacccccaaatcaagaccacaaggatgagatgtcaagcaaagcttctctgttcatcaggccagacatcctgaggggggccttcaagggtctccctggaatcgacttcagaggaggccctgcatctcagcagtggacatcaggggttctctcctctggagatcactcggggcaggccacgggcatgtcttcggaggtcccctcagatgctctgaaaggcactgaccttccttccaaaagcacccacttctctgagatcggaagagcttatcaaagcattgtgagcaacggtgtgaatttccaagggtccttgcaagctttcatggacagttttgtcctcagttccttgaagaaggagaaggacatgaaggacaaagccctggctgaccccccttccatgaaagtccacggagtggatggtggtgaggagaaacccagtggcaagtcctcccagaggaagtccgagaaatctcagtatgaacccctggacttgtctgtgcggccagatgccgcctccctcccgggctcctcggtaactgtgcaggacagcattgcatggcacggctgcttgttttgtgctttcacaacgtcctccatggagctcatggcccttcatctccaggccaaccacctgggcaaagcgaaacgcaaagataacaccatcggggtcacagtcaactgcaaagaccaagcccgggaggcgagtaagatggccctgctgccctcgttacaatcaaacaaagacctgggcctctccaatatgatcagctctctagactctgcttctgagaagatggcccaaggtcagctcaaggagactctgggagagcagaagagcggtgcatggaccggccacgtggaccctgcattttgtaacttcccatcagacttctacaagcagtttggtgtttacccaggcatggttggctcaggggcctccagttcctgccccaacaaggagcctgatggaaaggcccactctgaagaggatgtccccatcctgatccccgaaaccacgagtaagaacactactgatgacctctctgacattgcctcctcagaggacatggactcctccaagggggagaacaacgatgaagaggatgttgaaaccgaaccggaaatgatgaccaagccactgtctgccctcagcaaagacagcagcagcgatggcggggacagcctgcagcccacaggcacctcccagcccgtccagggactggtctcacctttatcccaagcaccggagaagcagtggcacagccagggtcttctccaagcccaggaccccttggcgggcctgccaaagccggagcgggggccccagagcctggacaagccgatgaacatgctgtcggtcctcagggcctacagttctgatggcttagcagcctttaacggacttgcaagtagcacagcaaattctggatgtatcaagaggccagacttgtgtggtaagtgacactccctgtcctagtcggtctatctggacttgcccttgtctgttcgtggtcctcggtggttatctgcagcttgttaatcgtgtaaagtcaagagaagaatgtatacacatatgtgtgttgaataattactattggcataggtatgtgtatacacacggtgcaccaatctacagtatatatagcagagaatcagaggctaaaaatattaccccatatgttccagtattagtcatggattgcaaaggcttagtaacttgagcaggagagaaaactccctcaaagtcataaatcctgagtgacaactgctgctggatgacagatcccttcacctgtggacaacctggctgggggtggggggctgttccaccagctcacctgagcatgtagaggtgggtcctgcagtggtctcgtgggtattactgcttgtgtctgattgtcctgtattttgtaacactttagaagaatacagaaaagtgcagtaattctctttctccatagtatttaagcagaaatattgctagtttaatattgtgtcaggtcgtcctattaaccaggagcagatgacagtaaaatttcagtgaatagcaccttgacatctacaacttaaaaatggtgattgaagcaaaatatgtaaacttgtacggggtgatcgtgtgctttggaacagagtattgttgaagtaattagaagatatattaaggtgttcctggtaatgaaggcatgtaagttataataattgtagctttctgaataagtgtcaaactatatctttaagtgtgctgtatgctgagttacaagttaggtcatttatgaatggaatgtaaaataatactaaaaatgcttcaataacttatcttggtattgctaataaaaaaaaaaagctgtgaaacattagtgca

SEQ ID NO: 275668 - DNA, 2177 bp, Homo sapiens
aggggtgagagacggagagaggaaaaagaggggggcggccagaagagggaaggagaggcgtggggacagggcccccgcccccgccggggtcgggtttgatggtgaaatagtaaacccacgcacggagggtcgccaggaaagtggacattaccgctttaattaacttcgagatgctccggcggcgggacctggcgtagccgtgacgcgcccccataaatctgcccggcccggggctgctccgagaactcgtacagtagcggcgtcagatccatcccgcgcctcccagtccggagtccatttgcataattggattttttttttttgcctccttctttctccctgaaacttgtttgaaaacccaagtgaaaaccgcgacgatctgcacactcaaaagcaagtgccaagttgtgcaggacagcattgcatggcacggctgcttgttttgtgctttcacaacgtcctccatggagctcatggcccttcatctccaggccaaccacctgggcaaagcgaaacgcaaagataacaccatcggggtcacagtcaactgcaaagaccaagcccgggaggcgagtaagatggccctgctgccctcgttacaatcaaacaaagacctgggcctctccaatatgatcagctctctagactctgcttctgagaagatggcccaaggtcagctcaaggagactctgggagagcagaagagcggtgcatggaccggccacgtggaccctgcattttgtaacttcccatcagacttctacaagcagtttggtgtttacccaggcatggttggctcaggggcctccagttcctgccccaacaaggagcctgatggaaaggcccactctgaagaggatgtccccatcctgatccccgaaaccacgagtaagaacactactgatgacctctctgacattgcctcctcagaggacatggactcctccaagggggagaacaacgatgaagaggatgttgaaaccgaaccggaaatgatgaccaagccactgtctgccctcagcaaagacagcagcagcgatggcggggacagcctgcagcccacaggcacctcccagcccgtccagggactggtctcacctttatcccaagcaccggagaagcagtggcacagccagggtcttctccaagcccaggaccccttggcgggcctgccaaagccggagcgggggccccagagcctggacaagccgatgaacatgctgtcggtcctcagggcctacagttctgatggcttagcagcctttaacggacttgcaagtagcacagcaaattctggatgtatcaagaggccagacttgtgtggtaagtgacactccctgtcctagtcggtctatctggacttgcccttgtctgttcgtggtcctcggtggttatctgcagcttgttaatcgtgtaaagtcaagagaagaatgtatacacatatgtgtgttgaataattactattggcataggtatgtgtatacacacggtgcaccaatctacagtatatatagcagagaatcagaggctaaaaatattaccccatatgttccagtattagtcatggattgcaaaggcttagtaacttgagcaggagagaaaactccctcaaagtcataaatcctgagtgacaactgctgctggatgacagatcccttcacctgtggacaacctggctgggggtggggggctgttccaccagctcacctgagcatgtagaggtgggtaacactttagaagaatacagaaaagtgcagtaattctctttctccatagtatttaagcagaaatattgctagtttaatattgtgtcaggtcgtcctattaaccaggagcagatgacagtaaaatttcagtgaatagcaccttgacatctacaacttaaaaatggtgattgaagcaaaatatgtaaacttgtacggggtgatcgtgtgctttggaacagagtattgttgaagtaattagaagatatattaaggtgttcctggtaatgaaggcatgtaagttataataattgtagctttctgaataagtgtcaaactatatctttaagtgtgctgtatgctgagttacaagttaggtcatttatgaatggaatgtaaaataatactaaaaatgcttcaataacttatcttggtattgctaataaaaaaaaaaagctgtgaaacattagtgca

SEQ ID NO: 275669 - DNA, 419 bp, Homo sapiens
ttaattaactgcatgaatgaatgagtgagtgataaacaaataaatgaaagtgtgaaagtcctccttagcagtctccttgatattctcaggattaatatttttgtcttttaagtatatcctctgcaaaacacactcctgcagtaaaagtaagcctgttacttcaatttgaagaccgcctttttcatcctgccaggccagatatcctatgataaatagtttagtttttcttgctgattccagggcacataaagttctcaactgtgaaggtgccagaagctttctggattcaaagtgtctatccagatggacagactggggagccaggctcttcattgctttctctgctctaaaaattctcagcatttcatttgaacacatcaaagcaggctcagattaaagacaaaatgagcttgacacaa

SEQ ID NO: 275670 - DNA, 392 bp, Homo sapiens
aggccgccgagaggccgttgctgggcctggggaggccaacttgaggacgacttgggcctgcagaggccgccgggaggcaggagctggccctggacaggccgacttgacgacagtctgggcctgcagaggccgccgagaggaagagctgggcctggagaggccgactggaggaagtccagggcctggagaggatgcaaagcagcaaacgctaggcctggaaaggctgccctgaggcacgggcttggccagcagaggccactgggaggcaggagctgggcccacagaggctcccgagagggaggagcattgccccaggaggccacggtgaggaagaggtgggcctggagagcccactgtgaggtagaggccgggcctgtagaggccgccgacag

SEQ ID NO: 275671 - DNA, 365 bp, Homo sapiens
ttgccaggagtttaagggagagggggatgaataagcagagattcacagatcattatgactgtgaaaatactctgtatgatactataatggtggacacatatcattatacatttctcaaaacccatacaacaccaaaagtacaacaccaagagtgaattgtaatgtaacctgtggactttgggtgataatgatgtgtcaatatagtttcatgaattataacacatgtaccactctgctggtgggggatgcagatatgagggaggagggtggtcaggagttatataggaactcttctgtattttctgctcagttttacagggaacccaaaactgctctaaaaaataaactttattaaaagtgaaaag

SEQ ID NO: 275672 - DNA, 576 bp, Homo sapiens
ttgaatagtggaggacaatagtttcagaaagttcgtcaatttaaatatttcttctggcaggacaactatcctaagtgatatgtgcattatatcagaatgcacataattccagtgtatcacattacctgtaatgggtaagtgtggtaggcagaaatgtccacttcaccctacaacaccagagatgtcactgtcctaatccccagaacatgttgacatgtcaccttacatggcaaaaggaactttgcaaatgtgattaagattttgagatggagattatcctagattacctggatgggccccagtcatcacaagcgttcttatgagtgaaagaggcggggggcagaggagtcgggtcagagtgatgtgatgtgcaaaagactcatctggccattgctgcctttgaaaagggaggaaggggaaccacaagccaaggaatgcaggcggttcctcttctcccataggcttccagacaaaaagcagctctgccaacatcttgactttagcccactgagacttacgttgtacttctgaactacagaactgtaagataataaatttgtatggctttaagtccct

SEQ ID NO: 275673 - DNA, 747 bp, Homo sapiens
tctcctcaccaaggcattaagaaatgcatgggtgaggggaacagcggcgtgcatgtaaaggtcctgtggcgcctctcctctacaggctggaggtcatggcgggagatgctgcatggatttgccctccctgctgtcagaacaacagggttctggaagagtagaggacaggccgtgggacttggctgtctagagacaaggcgggagggatttccttgagaggcagggacatgtggtggttactaatcattgtgaggtgtctgggatgtaatggatgggaaatctactaagaagtcaacttatgtaataattagaaaagctctagttctgaggacagagacctgttggagtcaccatagtggaaatttatgacctggtatccagttcagatacctggagcttcttgactggggggagattggatcccttggggaagagtgaagccttcaatgctgccacaagtgtgatccgcccgcctcagcactttgggaggccgaggcggcagatcacgaggtcaggagatcgagaccatcctggctaacacagtgaaaccccgtctctactaaaaatacaaaaaaaaaaaaaagaaaaattagccgggcgtggtggcgggcgcctgtattcccagctacttgggagtctgaggcaggagaatagcgtgaacctgggaggcagagcttgcagtgagcctagatcgcgtcactgcactccagcctgggcgacagagtgagactctgtctcaaaaaaaaa

SEQ ID NO: 275674 - DNA, 1437 bp, Homo sapiens
tctcctcaccaaggcattaagaaatgcatgggtgaggggaacagcggcgtgcatgtaaaggtcctgtggcgcctctcctctacaggctggaggtcatggcgggagatgctgcatggatttgccctccctgctgtcagaacaacagggttctggaagagtagaggacaggccgtgggacttggctgtctagagacaaggcgggagggatttccttgagaggcagggacatgtggtggttactaatcattgtgaggtgtctgggatgtaatggatgggaaatctactaagaagtcaacttatgtaataattagaaaagctctagttctgaggacagagacctgttggagtcaccatagtggaaatttatgacctggtatccagttcagatacctggagcttcttgactggggggagattggatcccttggggaagagtgaagccttcaatgctgccacaagtgtgatccgcccgcctcagcctcccaaagtgctgggattacaggcgtgagccaccatgcccggcctcttttttatatttaaaaaatatcattttatatattaccagggcaaaagagaaaactcgtatgattacgtggtcatacacagtaaaagcatttggcaaaattgaaaacttttttcatgatttataaaaacaaaccccagaaaatgctcagcatgatgagaacagaaggcaacacttccaaccccattaagggcagatttgaagaacccacaggtaacattatattaaatggcataagattgaatgcttttctattaaatcagagaaaaaagtagaatacctgctgttactcttttaattcagcattatactagagctctaagtcaatgcaataaagtaagaaaaattaataaagtattgaaaagaaagaattgaagctgtctttattcacagataatgactgtgtttgttaacaatgctagaaatctacaaaaatctaccagaactaatcagtgagtttggtagtgttgcagaatgtaagctctcaatgtaagtggtcttttgtatttctgtatattagcaatgagcatttggaaaatgaaataagaatacaatttcatttaaagtaacatctaaatacatgttgtgcttataaataaattcaacagactgggcaccatggctcacacttgtaatctcagcactttgggaagccgaggtgggcagatcatgaggtcaggagatggagaccatcatgcctaacacagtgaaaccccatctctactaaaaatacaaaaaaaaaaaaaaaaagaaaaattagccgggcgtggtggcgggcgcctgtattcccagctacttgggagtctgaggcaggagaatagcgtgaacctgggaggcagagcttgcagtgagcctagatcgcgtcactgcactccagcctgggcgacagagtgagactctgtctcaaaaaaaaa

SEQ ID NO: 275675 - DNA, 883 bp, Homo sapiens
agcaaaaaatatgtatgtataaatggactcattcaaaatatataaagaactcctattacaaagaaattgacaaacagcccagtatatcaatgaatataaaaatttgagaagatattttccataagaagatatctaaatgaacattaggcatgagaaaaccaaattttaggatatcactacacacctggcatagtttaaaagactgaaaatattaagtgtgtgggaatgtagagcaactggaaatggcctacatctttcatagaaatgtaaaacaatacaaatactttgcaaaactctgtccaacattttctacccattcaccaagcaactccatccctagctatagatacccaggaaaataagtatgtatcttcacagaaataattgtatgagaatattcatagttacttatgcacagtagttatcaagtaaacctgtctcccatcagaaaaatggatatcaaattgtgtgataatcatacaatcaataggatattacttggccaaaacaaaatgaaacaagggaaaaacacaatcaaacaaattagtggcatatatacccacctgagtaaagagaagtcggccgtgtgcggtggctcacgcctgtaatcccagcactttgggaggccgaggcggcagatcacgaggtcaggagatcgagaccatcctggctaacacagtgaaaccccgtctctactaaaaatacaaaaaaaaaaaaaagaaaaattagccgggcgtggtggcgggcgcctgtattcccagctacttgggagtctgaggcaggagaatagcgtgaacctgggaggcagagcttgcagtgagcctagatcgcgtcactgcactccagcctgggcgacagagtgagactctgtctcaaaaaaaaa

SEQ ID NO: 275676 - DNA, 1045 bp, Homo sapiens
ctttttaattttctcccttccagggttatttacagactaaatgagacagtgtatatctaacattgctttgtggatgctatcaagtgctggcaaatgtgtgggagaatgaatggaaaacttcatcaatttctaggatagtaaattggtgctgctattttggagagcaatttgtcagccttcaggggaaactgaatatgcacatcctctaagacccagcagtttcacttcaaagaaaatttcttatatgcacagagacttgtacaaggatatttatcacagcactgtttgtaataacaaagggctggaaataaaccaaatggccaatgataagaattgataaatgtggtaaatgcctaaaatagaatgtcacacagcagttaaaaaatcatttattcactaattaagcaaaggacaaaaagcctcaacagaaaaaaaaagacaaaagccttgaatagtcactttgccaaatgttcaatacacgtacaaaaacatgggcaagttcattggttgtcaaggaagttcgaattaaagccacattttgcaggtacaacactggcacaagtttaagtctgatgataccaagtcttggagaaggttgaagctacttggaaaacctgccctctgctggtgggagtgcaaattgctccaagctctttggacaataatttggcatcctctagtgaagttgaagatgtgtgtgcttgagactcagcaattcccctttgtgacatcaggatgctcccgcacatatgcttaagaacattcatgccagctttgtttatataacaaaaacgtggaaataacccaaatgtctgaggatggggaatggacaaataatggttcatagttatgaaaatgaatacacaacagctacaagcatctactggaatgaatctcacatgcattgtgttgtagaagaatatgtataattccatttatgtaaagtttaaaagcatgcacaactaaatgatatgttatttatgagtatatgacatatatgataaaggcaaagaataaataaagtaaggaaaggtaagacaataaa

SEQ ID NO: 275677 - DNA, 294 bp, Homo sapiens
attttcccaactttgggggcaaggaaaaccaaaccagttgattggttttatgtggtatatttccccatttattagaatgagaactgattgccaattaaagaagagaaagatatcaaatattcctaggaacactggctcccattttttgaggggggtggaggagaaggcatcaattaaagttgtgtctccctgacattaggacagtgttggaggatttctactcaacacagatttggagaattcaattactctattctgcaaagcttagataaataaaataatgagtaaaattgc

SEQ ID NO: 275678 - DNA, 403 bp, Homo sapiens
ttaatcactataattaatatcttggcataattgccttaaggaaatcattctattgcttttataaaaatgaatcatgcatatcataaagacgttaaatgaggcaaaaatgtacagtgaagaaaatcttttaaaaaaccctaaatctcactaacttaggcaaacataattccagacacctatgtatgctgatagaaagtaacatggatacctggacaaatacttatctttataaaaaatgaccatctctagatgttatttcaaaatataaagtatttaattttacttaatagaagaaaatgtaagtgaagtgaaactgagggaactgtgaacttcaaatacatatttttttatgtaaaatttatttcccagaaaatcccttaaaaacaaaaaagagagattgtga

SEQ ID NO: 275679 - DNA, 238 bp, Homo sapiens
aatgagggtacaattgctatatgctgtagtggtgagttcaggctttgagaccatggagacttatgttcaggttctagctttcctatgtgatttcacttagcctcagttctgttgttaggaaaaatgctacttaccttgggagatctaggaggattagagacaatgtatagagcatgcatatcacaaagctggccctcaattaatagtagtcatgcttaatataaaatatgaagttaca

SEQ ID NO: 275680 - DNA, 382 bp, Homo sapiens
gaccatggatcaagtaaactaaccattaatcatcgatccgaaattgtcaggaaaccaggagatcaaaagaacatccctggggaaggtattaggctcagcttattattatgtgggggctcagtgtctatacccacctgaagctgggctggccatgaggcttcagttcactaatcagatgtgcatgaaacagacacaaaaaggggaagtctttagggccaaaaaatagacctaggtttgtattactatttcagcttaatcgtgtattccttgtgtgtcctcggccaataatggctaattatggtaaatactatttagaattatgtgctatatactaagtgtttgacatgtggtatctcatttaaaccttgtgtaatcctctgaa

SEQ ID NO: 275681 - DNA, 456 bp, Homo sapiens
cctggcagtctgtgcaccggagttggctcctttccctcttaaacttgtgcaagagatcgctgagcgatgaaggtagaattatggtcctccttgcccttgcctttcctttttgtgatctcaaagcatcctccctccgcccccattccatggccccagttccctactcccacagctgtctgctgaaactgccaacattactcaattgtttctggggggaggaacatttttttttgaaacaaaatagatatatgaaacagtacacgggaattaacacgaatatttaaggtaaaacatgaccttgaagattatgaaatccatcttattttggcccagaacgggggcattgggctccttgggccataggggagctggggaggacagggtgaagagttagctctaagccctctgcttggagatgctgtaaatacagaacgcaaaatcaccttcgaagttaaa

SEQ ID NO: 275682 - DNA, 406 bp, Homo sapiens
ttaaactatgtccttcttttctatgtgcagtggcagactggggagaagacactaccagataataagtaggtttgaaatttgcaataagaatgtgagtgatttgaatagagtgagactcaattcaaggctttgcttttgtggtggggatgttaagagagtgttaacttcactactaggttttatgttcattaatcaaattccaattcaaatggcctttaaatttatgtaaaacctggagctgtgtcaacatcaaaatttccgtgaggtcacagaaggcttaaaacacaacaaccaagcataagaacagtaggtatactgaggctggagaaaagtttgagctggggaggcagagccgagatcgcgccactgcactccagcctgggtggcagagtgagactccatctta

SEQ ID NO: 275683 - DNA, 441 bp, Homo sapiens
gcagatgccaacacatgactaaatggttttatctcaaaagattaatccacattaaattaacataggaccaaggcctcagaattgtatagccttttgttgtgagagattccaggctttgtgactctgatagacaggctggcaattgtctcctcataagggatggtagctggttaatcagtcagtcagcctggtagacccagttattgcctacctaacagtcaatgccctcttcttctttattaagaacaccaattttgttcagggagcaatgtgctcagctccagatgatgagatatgatagatctgcttccgttccggtgaactaaattccctgtgattggttcagaggtgaggaagtgacctaattccggccaatgaaatgcaagagaaggatggaaaggagctgaatgggttggaggaggaagggatggtggcttccag

SEQ ID NO: 275684 - DNA, 329 bp, Homo sapiens
tctgatgtatctataccaactagggaaaaatcaagaattgaaaagctaagtgaaacacatagattctctgctatgatcaacatattgatttactccacatttcatttcttttgacttttagtaatcccaagtaaaactaagggagatgtaagatgggggagctgtcttggggttttgcaaaagaactagcactgacattagtgagctcttaccaacaatacaaacaaaattgtcacattataaatcctattatgtgaatcctgacctggcaaattcaatgcacactaggactgcagtttggaactctaacgtaccatgaaatcatgtta

SEQ ID NO: 275685 - DNA, 230 bp, Homo sapiens
agttgattgttttccatggattctaccctgccaggagacacaataaataactttttgaaacttcattcttcagtcctgggagtttttacaaataaaaggacacacatgttgagacaaattacatgcttgaaaatctgtcactaacatcaatttcatgttaaaaagtacgaagcagctgttacagtggcatttcttttgttgttggggaaaataatgtgtgaatagctatg

SEQ ID NO: 275686 - DNA, 137 bp, Homo sapiens
cgtccacctcagcctcccaaagtgctgggattacaggtgtaatcccactgcgagccacaagccaccgcacccggcccaccctggccttctttacattcacaccttaaggtgtgtgtaaagattgccgaggtggagcg

SEQ ID NO: 275687 - DNA, 476 bp, Homo sapiens
ataacatatataccttttattcaaaaacagaactgtggaattgtgttacctttgttagtaagacacatctagcatgaaaaccttagcaaaatcgttcagtgatgtttagtgttgaaatagatttctgttgtgttggaaacataattgtctatttactagacatagattaacttcatttaacaaaagaaaatgtgggccaggtgctatggctcatgcctgtaatcctagcactttggtaggccgaagtgggtagattgcttgagcccaggagtttgagatcagcctgggcaacatggcgaaattttgtcattacaaaaaataccaaaattagccaggtgtggtggtacgcacctgtagtcctagctactcagcaggctgaggtgggaggattggtttcagtgagccaagattgtgctaattcactccagcctgggcacccgagaccctgtctcaaaaaaaaaaaaaaaaagaaaaaa

SEQ ID NO: 275688 - DNA, 409 bp, Homo sapiens
tatgtagatgaagcctccagatagcaggctacagagggaatggatggtgaacttgtcctattgggcgttaacagctgtcagaatctccagaaaggaccttgtacatctctacagaagaaatggctttgcagggccattggggtcaaatactttgatgccttcagggcctgctatctgtcatgtaacgctctaccagagtcaaatcggagtttgggatctcattgcacaaaaagtctggtccatcttaaactctctgttttaaatgttaatgctggtcagtggtgcctaaacttccaagggaggcaggtccaacccccatttcctgtcatggcctgaactagcttctcaggttgctttgagaaccccttggccaacaggggacccattcagtccgttggaaacgtgagaa

SEQ ID NO: 275689 - DNA, 164 bp, Homo sapiens
tctccctcggtaaggaccaatttgaaaggaaaaacagaaactccaaggtggagtctgacagaaggaagatctggcttggaggtaaataagaggatattctaggtcatgagaatgttcccacaaagacactagagggaaggattagcaagcgaatttgtttcgct

SEQ ID NO: 275690 - DNA, 815 bp, Homo sapiens
agaatcgcttgaacccgggaggcggaggttgcagtgagccgagatggggccactgcacttcagcctgggtgacagagcgagactgtcaaaaataaaaataaaaataactactacagtactgggaaaactttacaagacggagcaggagcttgcctttccagatgacaaacatagtatataaaacacaataggccagtgccaaggcactgggaggccaaggcggggggatcacctgaggtcaggagttcgagaccaacctgaccaacacggtgaaacccccgtctctactaaaagtacaaaaattagccgagcgtggtggcagacgcctataatcccagcttctcaggaggctgaggcaggagaattgcttgaacccaggaggcggaggtgtagtgagctgagatcgcaccactgtactccagcctgggcaacagcatgagactccgtctcaaaaacaaaaaaccacaataataaaacaatatgatattgttggtaggaaagacacattagtgcaacagaatccggaaataccacaaatgtagtattttatttcaatcaggaaaagatgatttcgttgataaatggcgtagaatcttaaatttaaacaacaaaacatttagaatataatttaggagactataagggtattctaggggttgagagactgcaaagacaggaacctcaaactgtaaaaagatatacttgattaccccgaaaattaacactgataaaagtcaagagacaatgatagatgaggaaaaaatatttgccatacatgataaagagccaatacctgtaatatacaaatacatctt

SEQ ID NO: 275691 - DNA, 681 bp, Homo sapiens
  misc_feature (15)..(15): n is a, c, g, or t
tgatcacggagcttnatgcattgtcttccttcccgaagtagtatccccattatgcaatacaatttgggtcaatgctctgggccccctttccttgattttagaaaactattataatttccttataaacatccaaatattcgtggcattcataaattgactactaccttatctcaaactgaattttctattatcactataatttattgtgtttataaaacatagagtggaaagagctaaacaaaaaggtttccttttcattcttgagatgggcgcttctcaactgggaaggatttaaataacacaaccggaaacctctcatttctaagtcgaattaatagctgaggatggctgaaaaagattatacatatccagaagataaaaagtaaaatgaggccggggcatggtggcgggcgcctgtaatcctagctacttgggaggctgaggcaggagaatagcttgaacctgggaggcggaggttgcagtgacctgagatcacaccactgctctccagcctgggtgacaagagtgaaattccatctcaaaaaaagaaaattaaataaaaaataaaaacagatttaggattaacactgtaaccttattgagatggtagaatgcaaatataaataaaaacaactcagctctcattgtcagaatagcaaagaacagtacgatgcctgtaac

SEQ ID NO: 275692 - DNA, 388 bp, Homo sapiens
gtgattcttttaaaattagaaatattcttcctaattggtggggctgctgttatcttttccaaatctctttcgaatgcagtttatcttattccactatttttcttattactgtttttagacataggtttccttggaaactggacttctaatggactttagctacagataggctaaaaaattgtctttattcatttatcatttcattgtaattaaatcttctatatgatgtggcctattctcatgtatggtattttgtttctatggtaacagagatttttctactatccatagtttgaaatgacttcacagtatttcttgattaactcgtgagaccaatattgcattttgtaaacttacatgcagtcgaacttataaagcaatggttgca

SEQ ID NO: 275693 - DNA, 488 bp, Homo sapiens
gggtttcctggcacctacatgaaaaaaaagacaagttatatgggtgatgaagaaaactgcacaaaattaaggggttgcagaatcacgggagcataataattcccttccataatctttagcattgttctttcagtcagacatgatatgcgcaacattcagacatgatatgcgcatcattcagacatgatatgcggggtcaagttcttaagggctgtttgccttttggtccttttggtttggtttggctttgactaattctggtactgaaaagttagctatacacacacacacacacacacacacacacacaaacttcaaaaatgcttaaccatctgaccatagtgactagcctatagtgagtcgaggaccaaactttttcaggaaaatgctgcctcgtttttaaaacaagcctcctaagctatgttctttacaatgtctgtaattagtgtttcacttgagaaagccttttgtgggtcgtaaattatttc

SEQ ID NO: 275694 - DNA, 428 bp, Homo sapiens
ggggaggaacataggtcacagagtgctgttgtcttcactggattagtagtgctacaatgcatgctttttgtagtttctattgtttttgttttgttcttaccaaagcacctacaaatactaaatttactttttaaagaatgctatctagaaatacgcttcagtgaaacctttcttttcattatcaaatgcagttgataatggtggtttaggagtttcttacttttccagcagttagtttctaaagaaaccattttttctctcctccctgattctgactttccttgacaaacttgataacccttattatataatactgaatgttaaagttttcagatgtatttatgtgtgtgacacattttaagacttcttgatgaaaacagaacttacaactaaatatataattctattacagaattaatcttcccttt

SEQ ID NO: 275695 - DNA, 150 bp, Homo sapiens
aacattcctctgacagaggtgcctgttggcttttctcccttccttccttcttcctgcctcgaatgtggttctaatggcttgagttccaaaaactactctatgaccatgtggcaaccttgaggttagaagccacatgccaagtatggcact

SEQ ID NO: 275696 - DNA, 305 bp, Homo sapiens
aatcaagatatatattaccagcatcaccccaaaaggttccttgtgctccttttgtcaatctctcccatcatcccctccccaatccgcagctccaggcaaccacagacctgctttctgtctctgagattagttttgccttttctaaaatgtcgtataaattgaatcatataggatgtgctcctgtgtctggctttttttgctcagcatatacttgagaaatatccatgttgctgtatctatgagtagtttcttactttatattgagttatatttcattgtatatatataccgcaatttgattaccc

SEQ ID NO: 275697 - DNA, 176 bp, Homo sapiens
gggattaaaggtgtaagccaccgctcctggccctgaagatttcctcctctcagaagagaccgtggcctggccctggcttgggagctgatatgttacctggaacttctggaaattgctctcctggcaggggagaagttgaattctggtgtgccatgcttgggggaagctggcatgat

SEQ ID NO: 275698 - DNA, 453 bp, Homo sapiens
actgtggaaaatgtataaacagcacattattcttaaaggttacctctggggtgcagaactggggctgcgaggggaagggacagagggctgctggttttaaaactttttaagaagatgatgtagttttggcatttgtccccacccaaatctcatgctgaattgtaatccccaatgctggaggtggggcctggccagaggtgttcaggtcatgggggcagatccctcatgctggttggtcttcctgataggagttctcatgagatctggtcatttaaaagtgtgtgccccccactccactctctcttgctcctgctctggccatatgacctgcccccttcaccttctgtcatgattggaagcttcctgagggctccccagaagccaagcagatgctagcatcatgcttcctgtaaaatgtgaagacttgtgagccaattaaatcattttattttt

SEQ ID NO: 275699 - DNA, 612 bp, Homo sapiens
agcctgctctcactggtggggcagagtgggctggcatggtcaccaagcagaggggggtccatgttaggggggcaacatggtggtacctgatgtgggtttacaaagagaggtaccaaaattgtcccagtgctcatccttacacacatttggggacactttcacactcttcctcatgaaagtaaacatggagtggtggggatgaacaagagatgggagtagctgccatttgcagggcatgtgctctgtgtaagtctttagcctgttcacccactgcagtgtactaagcactttcataacccatgattttattttatcctcactactccataaagtaacattataccctatttatttaaagaggaaacggaagccccaagaaatccagtgtcaaaataccaggacttggtgctcaacaaatgtgtgggaacaaaattagatgttgacctgatccctcctgactttcttaaggtctcagggcagtgtatctgtgatttggtgagatggccacatgagggcaggcacgcacacgttgagaaagttgaactggaattttgtcctgcaaactctttgaggcgttgcatgggttgcacaccgtgctgggtactaagagta

SEQ ID NO: 275700 - DNA, 488 bp, Homo sapiens
ctactaaattcgcggccgcgtcgacgggacactttcacactcttcctcatgaaagtaaacatggagtggtggggatgaacaagagatgggagtagctgccatttgcagggcatgtgctctgtgtaagtctttagcctgttcacccactgcagtgtactaagcactttcataacccatgattttattttatcctcactactccataaagtaacattataccctatttatttaaagaggaaacggaagccccaagaaatccagtgtcaaaataccaggacttggtgctcaacaaatgtgtgggaacaaaattagatgttgacctgatccctcctgactttcttaaggtctcagggcagtgtatctgtgatttggtgagatggccacatgagggcaggcacgcacacgttgagaaagttgaactggaattttgtcctgcaaactctttgaggcgttgcatgggttgcacaccgtgctgggtactaagagta

SEQ ID NO: 275701 - DNA, 427 bp, Homo sapiens
gaggattgcttgagcccaggagttcaagaccagtaagggcaacatagtaagattctgtctctacaaaaaaattgaaaattagccaggcaaggtggtgtgcacctgtggccccagctactcagaagcctgaggtgggaggattgcttgagcccaggctgtagtgagccatgattaggccactgcactccagtctgggcgacaaagcaaaaccctgtctcaaaacaaacaaacaaccaaaaaaaacctcctttcctggcttgttacctcactctcatggctcttcctcttccttactccttctccaactcttgctggttcctcatctcctacctgagccacatagcccagaatgccttggagttcagccctgtcaatcttctccacctcgacatcctcccctagttactttaaaaacctatctgccagt

SEQ ID NO: 275702 - DNA, 373 bp, Homo sapiens
ttcttctgcaagtggatatacagttgtctcagtactatttattgaagagactgcccttccttcattgtgtgttcttggcactttcattgaaaatcaatggaccacaaatgcaaagatctatttctgggctctctgttctgttccactggtctgtgtgtctgtttttatgccagtaccatacttttttttctctctctctttttaaaatcagctgaatttaagattcaagtacaatactgttttgattactgtagctttatagtatagtttgaaatcaggtactgtgatgtctccagctttgttctttttgctcattattgctttggccatttggggtcttttgtggttttggacaaatttggggattattttt

SEQ ID NO: 275703 - DNA, 349 bp, Homo sapiens
gaaaatgggactgctgctcaaaatctaaggtggaagacacagcaatggactgggcatatggtcagcacgaagggagatcaactcaccctcactcagactcattctagacaccagatgttaaaggagggcacagatacgtgctacactttcttctctgctcacatgttgttgatgagccagacaaaactgagcttaaacagaaagggcactagagcccaaagcagagggaagaacaatggcttttcattatcttcagctatgaagtgcttatttccactagatcttacagtttttaaaggcaaacctaacatcactgcatattaaaactttggttgtttcatcattatag

SEQ ID NO: 275704 - DNA, 250 bp, Homo sapiens
gcctctgcatataagtgagatcacgcggtgttgtatctctgataagatttcttgtgtggattggaaagcaggaacccttaggttatctatgattagaagtagttgaaatgcaaaagtggactaaaaaagtaaactgttggccgggcacgatggctcaagcctgtaatcccagcaccatgttagccaggatggtctcgatctcctgacctcatgatccgtccaccttggcctctcaaagtgctggtcgacg

SEQ ID NO: 275705 - DNA, 195 bp, Homo sapiens
actacgcccagctaatttttgtatttttagtagagacagggtttcaccatattggccaggctggtctggaactcctgtcctcaagagatctgcccaccttgctatttctcatattttaaaaagaaaataaatatctatgctgacaataagcaaagataaaaacccagaccacttatttaaattgaattaattttt

SEQ ID NO: 275706 - DNA, 516 bp, Homo sapiens
caggcatgccccaccatgttgcccaggctggtctcaaactcctgggctcaagtgatcctctgccttggcctcccataatgctgggattacaggtgtgagccaccacacagccatatgttcttaagtggataagacttaatatgttcagaggactggagtgatttgggaagaatatatatgaagtagatactaaaacattaggcagggttttagtgaatcaagaaataattctgtggccgcgcgcagtggctcatggctgtaatcccaacactttgggaggccgaggcgggcggatcacctgaagtcaggagttcgagaccagcctcaacatggagaaaccccgtctctactaaaaatacaatattagccgggcgtagtggtgcatgcgtgtaatcccagctactcaggaggctgagggaggagaattgcttgaacctgggaggcagaggttacagtgagccaagatcgtgccattgcactccagcctgggcaacaagagcaaaactctgtctcaaa

SEQ ID NO: 275707 - DNA, 190 bp, Homo sapiens
attaaacacaaaaattaccatatgggatagcaattctaattctatatacatactcaagaaaaatgaacatacacagacacacacacttttgtacaagtatttataacagcactaatcataaccaaaaagttattatgagaacacacacacacacttttgcacaagtatttataatagcactaataataac

SEQ ID NO: 275708 - DNA, 965 bp, Homo sapiens
ctcttttctatctctaaaggtccaacctaattaagtcttaaattgctccaaacataggagatttgaagatgcagactcctgacccactgataatttggtatttacttatattctgtccccctgaatacctctcttctctccagctctgagaagaaaagacaaaactttctcctgtgtcattttcaagtagaaatcctctttctctgaaatcagatcagcatgttcctatgtatttatcaatatgtaaaataatgtagatttcccttctctatggaaataatttgaacaatttgatgaaaagtgtggtaaatgaagattaaatgctgtgtcacacctgattcccctgagctgtgagcactagagtcaatcagctgctctcattgccctctgacatttagatttttccccagagcctacatctgtgggaatgtttctttctatcattatccagaacaaacaccaggaaacactagttcttcaaagtttatcttttaaacagaggccattttacaatggggttgtataggtcttcacgtatgtgagagccaggtaggtgatcctccttgtggtatgcttttggcaagggagtaatgggctgagaaatccgactatccaaaacataaattcccccatataccaagagatgcctaaaatctgctgttatggtattctttcttgggttaagactttgtgctattgaggagcatagaataaggtttacattatttctagtcatttatattttactgtgaacgtctaatagctttagggtatagggtcctgtaaggaaggcgggtaggggaccttgagcttgacaattacatctcccctctccctacagatccaaacaaaaagacagccctctggcatagtggtcattctcttgtggggaatatttgctgctcagatgtttttatcttagggacttgctataggatgaaataaacaaacaaaaaccccacaca

SEQ ID NO: 275709 - DNA, 520 bp, Homo sapiens
gactgacccactgaccctttggctggcctagagagatctgctctgtaggacactaccactgccactgcagggccccttctttgcctctatccaacaggaagtagctagagtggtcatcacccaattcccaacagcagttagggtgtcctgtttagaggggggattgagcgatgaagccagccggacttcctgggttgagtggggtcttggagaacttttctgtcatacaagaggtttgtaaaacacaccaatcagtgttctgtggctagctagaggtttgtaaagtgctccaatcagtgctctgtaaaaacgcaccaatcagcgctctgtggctagctagaggtttgtaaaatagaccaatcagcactctgtaaaatggaccaatcagcaggatgtgggcagggacaaatgagggaataaaagctggccaccccagccagcagtggtaagccactcgggtccccttccacgctgtggaagctttgttcttttgctcttcacaataaatcttgctgctgtt

SEQ ID NO: 275710 - DNA, 393 bp, Homo sapiens
ggcccttatatagcggcccattgcaaaacttcatatgtgtaactctgtgtgaccctcccttgttctcactacttggcctcccagcgttcaattctctcattgagggcaaacagaagcctgcttttttatttttattaaaaagaagcataaacacagcaataatgctaattttctgcagtgggtactttttaagatttcatataacacaccacagagtattctcattagtaactagtatacacgtgtaataaatgacttacctcaaattattttcaaatatatttgaggcaagaactttattactagggtaatgatattaagatgactattttgaaggacatataacaacaattatcagaatcagtgactatcaaactgtgttctgagacaaaa

SEQ ID NO: 275711 - DNA, 336 bp, Homo sapiens
atagcacaggctcagggagctgaatacaacatattcaagggttttgtaaacttgttaatcagtgggagcttgacattggacatgatgtgtctgcactgtagaaattggcaaaccggctggacgaggtggtcatgtctgtaatcccagcactttgggaggctgaggtgggaaaatcacttgaggccaggagttcaagaccagcttgggcaacgtggcaagaccccgtggctacaagaaatttaaaaattagcctggtgtggtggtgcacacctgcagtcccactctagatcatgccactgtactccagcctgggcaacagagcgagatcctgtctca

SEQ ID NO: 275712 - DNA, 343 bp, Homo sapiens
tggatcaattagcatctagtccatcactcaagcaattcagagtatgtaccttcaaaatgataaataagcctctacgtccacctatcctacaaaataagcccttgtaaaagaaatatcaagcaactaaaagagaaggagaacttaaaatatattttcttaaagcctgatattcttgattttcattataatactttccttatattcattatagataaaaaaaagtttttaaagtaaatgttgaaagattaaataaaatccttttcctggagtaaatgagtgctttctaaacggaatccagctccctagagaaatgtgatacagagattttacatgtagcaaaaaa

SEQ ID NO: 275713 - DNA, 403 bp, Homo sapiens
tttttattaactagacagtagtctcagacatcttttggagggtttgttcagacagagactgtgaggccccacccctgagtttccaattcctgagtccctgatctcagaatttgcatttcacacaagttcccacagtgctggggctgctggcccggggccactttttgagaatcgctcaaggaccagggtgtttgcagcttgctgtttggctgactcctaacagtgactgtactgaaaggttttgaatgccacgtgttcaaacaaggcagttcgcaagagtggtaggaagagacgttgaggattcgagttgttctttcgtttcgtaaaagggggtttgagggaaggttgtgtagctcttttaaaaagagttaatggcggccggtgcagtggctgatgcctgtaa

SEQ ID NO: 275714 - DNA, 371 bp, Homo sapiens
aagtagtaatttaaatcagaatcttagaggaatgtttttacttcattccttacctttcatttgttttcatagctttatataccagtctgctaaccttcagtcaacagtaagtcagttgaaaacagtaacaataattaaacctgtttttgtttttagtttagtcacttttctcaaatatttggagtgcctctcaagaggtgttccactcaaatattactattatttatgagatacatccaaaataacttataaaaggaaaatttgtgaataccttttaacaatcatgctttgcttttccacatatgtaagggtttcatttcttttttgcattcaacttataatttatgtctggaaacttgggcatgtcagta

SEQ ID NO: 275715 - DNA, 434 bp, Homo sapiens
aagaaagcaagttaaacactgtaaaagcctaaaacggggcaagttgggattagcttttaaaatgcctgccttgaaaaacacattattctgtgaggttttttttttttctttaaagttgtgcaaatttgattcggaaaaatagcttaataggtttgtatagggcacgggagaaggggttgtgtgcataaatgtatgatgattattttaagtgtgtgcttcagcagcgacaacaaacagatgaagatacgtgatactgactaaacaggcaagagtattttctagtctcagttcttctagtcaatgcctaaagtattagaaaaagtactgaaacaattcccaaagcatcaggaatttccatttctagtcaaaatattgtttgttttcttccaacagttctgttaaataaaaggaaaagttataaagttttagagata

SEQ ID NO: 275716 - DNA, 364 bp, Homo sapiens
gtggctactgtcatgtactaatagctgattcgttgtgctcaagtgacttgcctgtggtcacagttttacggtagccaaagcagggttagaacctggggatgtggccagccactctgggattttattcctattccacactcctatgtataggtagatacttcttcttgtctgcttggagagtacagaaaagcagaaagaagggtaaacatcacagccccaggtctcagaggtctcagtagagttttgggttactcagtctttttttctatgcattacatttgcacaattgagatcaagctgaatatattaaatgttaaatattgtttattctaattataaaataaaacaagggatttattgtagt

SEQ ID NO: 275717 - DNA, 626 bp, Homo sapiens
aggtttgggattagacactcaatttcgaaaaacacataggagtgtctcaagtaagataggtggatacatagagaaagcaaacaacattaattagccgggcgtggtgccacgcgcctgtaatcccagctactcgggaggctgaggttgcagtgagccgagatcacaccactgcactgcctcagcctcccgagtagctgggattacaggcatgcgccaccacacccagctgattttgtatttttagtagagacagcatttctctatgttggtcaggctggtctcgaactccagacctcaggtgattccacccgcttaggcctcccagagtgctggaattataggtgtgagccaccacgcccggccccagctatgctcttgagccacactctagagacgccatgaaggactgtttttgtttattttcgttggaggtggggatgggtaagacatacctacacagagttatttttctacgtaactgagtacatttaaggaatcctgagcagagttgataagggatttgcattgttgttagcattgctgtgatagcaaaagacagggtcttactctgtcacccagtctggagtgcagtggctcagtcatggctcactgcagcctcaatgtcc

SEQ ID NO: 275718 - DNA, 603 bp, Homo sapiens
acgccattctcctgcctcagcctcccgagtagctgggtctacaggcgtctgccaccacacccggctaattttttgtatttttttagtagagatgcggtttcaccgtgttagccaggatggtctcaatctcttgacctcgtgatccgctgtctgcctcagcctcccgagtagctgggattacaggcatgcgccaccacacccagctgattttgtatttttagtagagacagcatttctctatgttggtcaggctggtctcgaactccagacctcaggtgattccacccgcttaggcctcccagagtgctggaattataggtgtgagccaccacgcccggccccagctatgctcttgagccacactctagagacgccatgaaggactgtttttgtttattttcgttggaggtggggatgggtaagacatacctacacagagttatttttctacgtaactgagtacatttaaggaatcctgagcagagttgataagggatttgcattgttgttagcattgctgtgatagcaaaagacagggtcttactctgtcacccagtctggagtgcagtggctcagtcatggctcactgcagcctcaatgtcc

SEQ ID NO: 275719 - DNA, 106 bp, Homo sapiens
tgtaaaatggtgcagccgctttgaaaaagtctgaaagttaaagacagagttaccattggacccagcacttccactcttaggtatatcaagagaagtgaaaaggtat

SEQ ID NO: 275720 - DNA, 661 bp, Homo sapiens
catttgcatccttttatgtgcctctttcttcagtgcctagtcattggctcactcattcattcaagtacaatgctattttcacccatccgattggcagagaccaaaaatttgataacacagtgtcctggcgaggctgggagaatacatacgttgctggcgggattgtaaattgattggtatgactcctttgaagacaatctagcaaagatctgttaaaagacaaatgcacacatgccctgtgacccagcaattcctcttctgggattttatcatcttacaagtacatctgcggtataagacaagacaggcttcaaggtcattcactgcacagccttgtttgtgagagaaaaaaatagggaacattgaaatgaatggctcctttatacagtggaatactatgaagctgttaaaaaggaatggggaaagtgctttatgtactgatatgaaacaatttccaagatatattgttaattgggaaaaaacaaagcatgtctagaacagtgtttgaaagtatgttctcgttcatgttaaaaattatatctggtcagatgtggtggctcacacctgtaattccagcactttggaggctgaggcagaaggatcacttgaggccaggagttcaagaccagcctgggcaacatagtgagatcctgtctctatg

SEQ ID NO: 275721 - DNA, 261 bp, Homo sapiens
gagtaccccatgagacaaaagaattcagacagcaggacttgagtctcagaaatttctgcatgtggaaagtttccttcagcacaggcacaggtgaagtgctgggctcagcagggagagtctgtggctctacgccaatagtcaggcagccctggtcctcatgaagggtcttggagaaggacatttcttttcttcctcatccaccactgcaaaaacacctagagcttatccattggagcttagagtgggtgcacctgtacatag

SEQ ID NO: 275722 - DNA, 730 bp, Homo sapiens
gagcgactcccctaccgctttcgggcgaaggccacacgtgacggcccccctttccccgcagacgtgtgaatgcagcgctgtgtctttaaggggcacgcgcggaggttttccgtccgggacaaaatgtcagcgaggcgcctggagggggatctaccatctcggactcccgacccgccgccggctccggccgcgtttcccgggtaaagggtttttcccagttgtgtttaacaagaaagattctggaactttgtcatctccatggctgctggttcaaaatctgacagtatgagcagcattgatctcactgtgcctgggtctcaccttgcccttgattttctccctaagttctcagaagagctcaagaagtctgtcatgtgttttcttctcattgtttttcaactttcaaagcaaatttatctagaatcacacatttggtcctttgtgaacttatttcctaacgaataaacttcacctttttctgtattcccttttctttaataggttattgcagtagtgaattagtttcctaataaaaaagactgtgcaatgaaaaaaaaattaactgcctttccaaggcaacaatcttcaaacttgcggccggaattcgggcttacttgcccaattggccttatgtgagccgtatacaattaattgccggcgtttacaacggcgggctggcccctggcgttccaactttgcctttgaggacatccctttctgcaggtgcgcc

SEQ ID NO: 275723 - DNA, 2074 bp, Homo sapiens
gagcgactcccctaccgctttcgggcgaaggccacacgtgacggcccccctttccccgcagacgtgtgaatgcagcgctgtgtctttaaggggcacgcgcggaggttttccgtccgggacaaaatgtcagcgaggcgcctggagggggatctaccatctcggactcccgacccgccgccggctccggccgcgtttcccgggtaaagggcactgctgatggttcttcagaactcaggaatcgtgttgcatgcattgtttctacccacctgagatggttggaaaccctgaggcaatgacagggaccccagaatccttgggaaattacccactgtctaatttaaagcgtgcgggcgccgcagaatgaggagtggcgagccggcctgcaccatggaccaggcccgcgggctggacgacgcggcggcgcggggcggtcagtgtccgggactggggccggcgccgacgccgacgcctcccggccgcctgggggcgccatactccgaggcctggggctacttccacctggcgccggggcgccccgggcatccgtcgggccactgggccacctgccgtctgtgcggggagcaggtgggccgcggcccgggcttccacgcggggacctcggcgttgtggaggcacctgaggagcgcgcaccggcgggagctggagagcagcggcgccgggagctccccacctgccgcgccctgcccgccgccgcccggccccgctgcggcccccgagggcgactgggcgcgcctgctggaacagatgggcgcgctggccgtgcgcggcagccggcgggagcgggagctggagcggcgcgagctggccgtggagcagggcgagcgcgccctggagcggaggcggagggcgctgcaggaggaagagcgcgccgcggcccaggcgcgccgggaactgcaggccgagcgggaggcgctgcaggcgcggctgcgggatgtgagccgccgtgagggcgccctgggctgggcccccgctgcgccgccgccgctcaaggacgaccccgagggtgacagggacggctgcgtcatcacaaaggtcctcctgtaggggtgtggccacttccccaccccaggacagcgcttctccgtccaatgccaatgccttcagaccccgctgggaccgaagccgtaaccgaagccaggcccgcagccgctactcactcggaagctccagctaactgtaggatcttccacaccctaaggcttcagcttgagaagcacttcgaagccagagcagaaccaaaactcacttccatggggtcaccgggggtgcctgggcggcctttcgtgggcatgcacgcaaggaattggggtggcacacgggacacccgagagctccaggagccccgtgaacccagaccacccagtgccatggccacttagggctgggaacccgaacctggtgactttgaaaggatagagcttcattccataccaaagacttatcacaccatgtgcctatacacccagcagcccaaggtggagggtgcgtggaaatgagaaagctttttacccaaaaaaaaaaagagttcctaatgcataatctgcccaacaccaagttctgaagggtgggtgagggacgtcccctctagtttccatgactgctgtagacccgcatcatctctagccctcatcggggcagtcccagagcccgcttttttactgcccatattattcaaccaataccaggtgcactctgtctcccctcggccatccttcccttgcttcagacctaatgacaagtgtggcacatatgtccactttcaggcctcacatctgccaccttagcaagacatcacctcatccccttgtcactaggaagagggcttcttccccacatgtcgtcatagtgctcacctctgggctgaaggggaaagcatccctccgcttaaggccacatctacctgtcattttccatcccattcctctcccacgtttactgggtctttcctcctgtagtattccccctttcgctgacttcaaacccctcccctttttccccccaaggcctactttgtttcccttaaagccaaatgttggccaagtcctcgcctttt

SEQ ID NO: 275724 - DNA, 1104 bp, Homo sapiens
actgcatccaacgccgctgactgcatccaacgccgctcaaggacgaccccgagggtgacagggacggctgcgtcatcacaaaggtcctcctgtaggggtgtggccacttccccaccccaggacagcgcttctccgtccaatgccaatgccttcagaccccgctgggaccgaagccgtaaccgaagccaggcccgcagccgctactcactcggaagctccagctaactgtaggatcttccacaccctaaggcttcagcttgagaagcacttcgaagccagagcagaaccaaaactcacttccatggggtcaccgggggtgcctgggcggcctttcgtgggcatgcacgcaaggaattggggtggcacacgggacacccgagagctccaggagccccgtgaacccagaccacccagtgccatggccacttagggctgggaacccgaacctggtgactttgaaaggatagagcttcattccataccaaagacttatcacaccatgtgcctatacacccagcagcccaaggtggagggtgcgtggaaatgagaaagctttttacccaaaaaaaaaaagagttcctaatgcataatctgcccaacaccaagttctgaagggtgggtgagggacgtcccctctagtttccatgactgctgtagacccgcatcatctctagccctcatcggggcagtcccagagcccgcttttttactgcccatattattcaaccaataccaggtgcactctgtctcccctcggccatccttcccttgcttcagacctaatgacaagtgtggcacatatgtccactttcaggcctcacatctgccaccttagcaagacatcacctcatccccttgtcactaggaagagggcttcttccccacatgtcgtcatagtgctcacctctgggctgaaggggaaagcatccctccgcttaaggccacatctacctgtcattttccatcccattcctctcccacgtttactgggtctttcctcctgtagtattccccctttcgctgacttcaaacccctcccctttttccccccaaggcctactttgtttcccttaaagccaaatgttggccaagtcctcgcctttt

SEQ ID NO: 275725 - DNA, 649 bp, Homo sapiens
ttgacggaagccagaagcagagttcaaagcctggcgtggatttccgtctggagctgtctgttcttaaagtttgtaactccgtgttaagaaacagccccagcggaggctttgggatcggtgtgaaagtctagcactaccatctgacagcgagctgcaaaactttgggctgcatattaagcgaggaaagtggattgaagcgagagtcaaggcaattcattatgttaccggctcccatacgggagctgtaaaatacgaactggatgcacacacggagaaaaatggaatgaactcggaatggcattcaacagctcttcgcggtaaaactgtgactgccaaggatctagaatcccaaaggagcaaaccaggaggcctcaaacttggttggcacacaataaatgcttttctagatcttttccccactcatctcaaactcttaagcaatttggggtcatttatatttcagaataaggaacacattttgagaaatgttaatttctgaatgagactttttttccccaaagtagctgtgaaaaaaagagcctcaggcataagtcagccagcttattttgtctcaatataaattaaaaattaccctcaccaccacctccaccaaaactgaaataaaaaataaaataagtaaaagtccagg

SEQ ID NO: 275726 - DNA, 266 bp, Homo sapiens
ccccccccccccccccaaaaaagtttggccaattttccttccaaaaactcttaagcaatttggggtcatttatatttcagaataaggaacacattttgagaaatgttaatttctgaatgagactttttttccccaaagtagctgtgaaaaaaagagcctcaggcataagtcagccagcttattttgtctcaatataaattaaaaattaccctcaccaccacctccaccaaaactgaaataaaaaataaaataagtaaaagtccagg

SEQ ID NO: 275727 - DNA, 225 bp, Homo sapiens
acaaaacaaaaggcaaaaaatattaaaaaccaaagtaaaatggatagaaatgtacaggttgaggccgggcacagtggctcatgcctgtaatcccagcactttgggaggccaaggtgggcagatcatgaggtcaggagattgagaccatcctggctaacatggtgaaaacccgtctctactaaaaatacaaaaaaaaaataagccgggcatggtggcgggtgcctg

SEQ ID NO: 275728 - DNA, 351 bp, Homo sapiens
ccaaaaattcggcacgagggacagggtcttgctatgttgctcaggctggtctcgaacttctgaccttaagcagtactcctgccttggcctcccatagtgctgggattacaggccattctagtgtttattattcacaatttaaattattcttccaattctttgtgaggcctccacggatgaattttttctcctaaaaatcgtcctgtctttaagactctgtgtgtgatggtagagaataaatttctcatctgcagttgatctgagaaaaaatgtttatcctgcctccttgcttggtttatgtgaaaaaagtgtaataaaataatatgggttattttcggaaagattttatgt

SEQ ID NO: 275729 - DNA, 127 bp, Homo sapiens
tctgggaagggaattggatggctaggaatggggtaggaaagaggtttgcttttcagaacattttatactatttaagttttgtaacaagtgcatctattttgacttaaaagataaaaaatgaaaagga

SEQ ID NO: 275730 - DNA, 549 bp, Homo sapiens
agaagtagggttagtgtggaaacgtagctattcctcagtgagcaattgttggctgaatcctgctacatgtcagacgttgtgccaggtgatgaagtggtcacaatgaggaagatggatgtggagagttgctgggtggtgcccagaagatcagtaattgggattttaacacattgtgatgagtttagaagggtggaagctttgaggactatagagacacaaaaaggcagaaactggaaaagagtttgtagaggtttcttaccttctcaaccattcaagttcatagcccatcttcccaactttgcatccatggttcagtagccgagtctgtggtgggcacctcattgatctttgctgctttatggttttatgaactctagcagcttcccctgcagacattgagacaccttgtagaacctaggcaagactgcagtggtacaggcagtggccagatcacacattatataagatgatgccaatacgtatagttatttaaatgtgcagctaaaatcgtcctgaatgttgttgcatcatttcaaatatatgacttac

SEQ ID NO: 275731 - DNA, 305 bp, Homo sapiens
tttttcagactttgcattctggtagaccaactgatgccacccagacccatgacccatgccaaagaactgattcaactggttctgtgactcccacccatgaagtcactcaggacatgaagacagttttgacactcctgtgatttcatccctgaccaaatcgcagttcccattccttagcaccccacacacaccaaatcatcctaaaaaaccctcacctccaaattcatggggaggcagatttgagagatattgcccatcctccccactcagcggccctgcaattattaaaattatttctttgctgc

SEQ ID NO: 275732 - DNA, 499 bp, Homo sapiens
atattttataaagaaaagaagcttaattggcttacggttctgcaggctttacaggaagcatggtgcttctgcttttggggaggcctcaggaagcttacagtcatggtagaaggcaaagggggagcaggcacatcacatggtgaaaaccagagtgaacaagtgagagaagtgccaagtactttgaaaccaccagatctcatgagaactcactattgtgaggacatctaatcacctcccaccagacctcacctccagtactggggattacaattcaacatgatatttgagtggggacagatatacaaactatatcagcaggttaactagagtaaaacttaattttgaatacaaattcaatggtcacagtcattatattcagggcaacagaccttgaaattaaaaaatttttgtcgcacactgatgagttccctctgtcttgatcatgaaatatattgatttccaggaaagtgaaaaataaaacagtaaaagtaaatctaaa

SEQ ID NO: 275733 - DNA, 376 bp, Homo sapiens
gatctgtattttattatattttactaagcaaattttaaaggtatatgcaaacaacatttaaagagctcttcttattaaaaaattttaaattataataagttaaaattataataatctaagtgtttgtattacttccatgctacggataaggaaattgtgtctcacagaggtttcatgcgttggtcaaaattacacaaaaagtaaaaggccgaacctgaaaataagggttcacatcttaggactccaagatggtatacacatttgacttttttgtctttaaacttgctgtgaacatttttccacttttgattcttaagtataaatattaagtgccttctttgtatttcagtattaggcttttaagtcttctacttcc

SEQ ID NO: 275734 - DNA, 267 bp, Homo sapiens
gagtggtggaaaggcacggagaatgcggtaggctgaggctggctcccaaagacatgctgcgtcctaatacctggaacctatgaatgctaccttatttggaaaaagagcctttgcagatataattaagttacaattcttgagatgaggtgattattctgtattttctgggtggacccaaatgcaatcacatatgtcctaatagaaaggtgacagagggagaatagacagaagagaaactgtgatcaagaggcagagattgaattgtgt

SEQ ID NO: 275735 - DNA, 203 bp, Homo sapiens
gcttacagtaaaaaatatgaatccagggtgtatttcatctgaattaatcttttggaagtgatggcacgatatgcagatgagcgagaagatataggcagaggagcctgggttgcagtggtagtgctgccaccatggttgctgattgagagataagggaaacaaacgggtctttcttccactgaactcatggggctgggcggaac

SEQ ID NO: 275736 - DNA, 631 bp, Homo sapiens
gctgggcctgtgcaggcctttgggaggcaggaggcctggccttgtcgaggcctgcagaggccaccgaaagtcaaaagcggggcttgggaaggccgccgggaggcatgagctgggctgggccgaaagaggccactgggaggcaggaggagctgggcctggagaggctgccgaaaggcaggagcttcgcctgaggatgccacagtgagacaccatctgggtctggagggtccactgtgaggcagaggctggcctgtagagtccgacagtagacagaagttgggcaaaaggctgatttgaggaagttttgggcttcaagagtcagccacgaggcaggcactaggcctggaaatggcctcacagtcatgagttgggcctaaatgggccactgtgagggaggagctgtgcctgttgaggctgctggcaggcaggcagaaatttggcctggggcagctgccatgaggcaggagctgggtctggaaaaagcccctgggaggcaagagcagggcctgcagaggctgttctcaagtcaaagctgggcctgttcatgccaccgggaagcagaaggtgggcctggagagtttgacttgaggaagttttgggcctacattggccgccatgagctggacaggaa

SEQ ID NO: 275737 - DNA, 848 bp, Homo sapiens
gtgaggcaaatgctcagttttcggaggatgccgtgaggcagggagaaacttggctttcggtggccgcagtgagggaatagtttgattgctgagcctgccgggaggccaaaggtgggcctggaaagctttaccttaagaattctgtggcctacagaggctgccagcagctcagcaggagttgggccaaaggaggttgttgtgaggcaggagacgggcctgtagacgcactgggaggatgagctcatcctggagatgccgagttaaggacattctgggcctcgacaggctgcaaaaggcaaaagctgtgcctggaaaagtcgccatggggcatgagcttggcctaaagaggccactgcaaggcaggagctgggcctgtagaggctgccgaaaggcaggagcttcgcctgaggatgccacagtgagacaccatctgggtctggagggtccactgtgaggcagaggctggcctgtagagtccgacagtagacagaagttgggcaaaaggctgatttgaggaagttttgggcttcaagagtcagccacgaggcaggcactaggcctggaaatggcctcacagtcatgagttgggcctaaatgggccactgtgagggaggagctgtgcctgttgaggctgctggcaggcaggcagaaatttggcctggggcagctgccatgaggcaggagctgggtctggaaaaagcccctgggaggcaagagcagggcctgcagaggctgttctcaagtcaaagctgggcctgttcatgccaccgggaagcagaaggtgggcctggagagtttgacttgaggaagttttgggcctacattggccgccatgagctggacaggaa

SEQ ID NO: 275738 - DNA, 1116 bp, Homo sapiens
tcaacaaaatccctgggtaatttgtatgtacattaaattttgagatgcatgatcttttaaggttcattctaatccttaaaattctgttttaataatgtgtacaatgaagtgctgcatggcaaactacacagaaactaaaggcatgttccaaaaaggaaaagttccatgtggctaggggaataaaagcttcatcagggaaccaggagttgggctggttcttaaaacctggagaaagaagatggttacatcaagagataaatagagtgaagcagaactagtggtgcggaccagctcgccagcaacagaagggtttgtagtcggcctggcagtggacagggaggttggctagaactattaccttaggtccgtgataatatccctgaatccaacttttcagaaagaaataggtaacatatttttcaccaggaagcttcacccagacactgaacagaatggtctcagtgcactaatggaggctcagttaaagggttgtggtagcacaaggaagagacattctgacttggaaatttggagaaggcttcacaaatgaaggggcatttgaaatgagctttgaaggtgcaagagtattccaagttgagaagacaacctgagtggtgttgggtgaacagtcattctacctggctgtagtgtagtatagtgtagtgtagtgtaggaaacatcagaggagtggagtgggatatgagcctggagagagctggcggccatggatcattgaaagccttgaatgtctgatggggaggttgactttattttgtaggcaatggaaagccaccagtggttttagttgagcagcaatgaaattaagcctgtgctttgcaaagattaatctagcagcaacagattggaagcaacaccaccattcctggtatcagtccaggtaaaatatattacagctctttactggagcaataacagtaatattagaaggagaaataaaaaagaaaaatattgcacaggcagaatggggaggtcccagtgatggagctgatcttggttcattgaggcaggggtggcattaatcatgtaaaacacaggaggaggaactgggttaggagtaatggtagagttcagtttaggtaattgcaaatacacact

SEQ ID NO: 275739 - DNA, 532 bp, Homo sapiens
gtagagtgaagagccaatgtggataagtttgaggggtttaaaatgtcatcaaatccaaaaggcaggattacaggtgtgagccactgtgcccggcctattctgttgcttcatgatgtaagggagcccacgtctctcttcctgccaggtgggccacctgagcacagtaaggtcagaatgggtggaatgatggaattcctgaccatctttgcatcattgtcttgatgatcatgacccagccatcccctggaacttctgcatcacagcctttagctcagtctgctgctgtgagcagtatatgaaacttgtatccgtgataacttggctctgccaggacttggggtacctgatggagaggatttcttggaggaaaaggccaaagggctgccccaactttggcctcatatctaaatcctaagagtatacttgcttctggttgccaaaggcctgaatgctcagaaagagtacagcacagaacctgttgataaggattcctctggctttgctttactctgccatgccaaaaaaacaaaaa

SEQ ID NO: 275740 - DNA, 205 bp, Homo sapiens
gcctcccaacgtgctgggattacaggcgtgagccaccgcacctggctgggaattcagacttttattgctataaatcagcaaaagtttggccaagactggggatgggtcaggcatgaaacatttccttgtaatatcatctccatagatcagtagaactctagtggagtagatcagtgtgctgatttatttggaactgagtaaaagg

SEQ ID NO: 275741 - DNA, 186 bp, Homo sapiens
gtgtgtgccaatgggacttgactcagacaccaacattcaaatttcatctaatttccacatgtcatgaaatattattcttttaattttttcaaccagtaaaaagtgtaaaaaatgttcttagctcactgggcggtagaaaaatagattgcaggctgggtttggcttgagggtagtttgctgaccaag

SEQ ID NO: 275742 - DNA, 614 bp, Homo sapiens
gaagcaaccaaaatgtccttcagtgggcgaatgaaaaaaaaaagaactgtgggatattgaggcaatggaatattattcagtgctaaaaagaaataagccattaagtcatgaaaagacacaggttaactttaaatgcatatgactaagcaaaagaagacaataccaaaagactatatgctgaacgattcctgtatgatactacaattaacacaagccattatttatctgtccaaacccatagaatgtacaacataagagtgaactgtaatgttgggaccaggtgtgacagctcatgcctcagaagtcgagggttcagtgtgctgtgattgcaccaatgcactccagcttaggtgacacagtgagactctgtctcagaaaaaaaaaaaaaaaaagtgtaccgtaatgtaaactatgggctttgggttattatcatgtgtcaatgtaggttcatcaattgtaacaaatgtaccactccggtggaggatgttgataatgagggaggttatgcatgtgtggaagcaagggagatacggaaaatctctgtcaactcctcttaatatttctgtgaacctataacttctttaaaaaaaataaagttcttgaaaaagtcaact

SEQ ID NO: 275743 - DNA, 1398 bp, Homo sapiens
  misc_feature (57)..(57): n is a, c, g, or t
  misc_feature (1178)..(1178): n is a, c, g, or t
agtggcgtcttctcctcctcttcaatggcatgactaatccaagagctacggatagtnttagttcatgtgcttggggttggtctaatccaaaataggaaagtctatggtagctgcttcccagctattttgtactggggacaatctggtcctgtctcactcaggacgtttgatctaagccttccataccctctccacctcatcccaagtcttataggttgcaatgctgatacttgaaccacccgctttcagagatttggggccacctggaggtaaagaggtggggctgagaggtggtgctggtgctactctgtgggaactagtacccacatgagggaactaccctttcctgtaaccccagaaaaatagctccaggcatggaaatgtctagtgcaaacccacatcaagggtgtctgttcgcgtttgaaattcatcggcaccagaaagagctaacatgttggcagtatctagaaaaccatcaacatgagcatgggacagttcgctttgcagctgatcccaccatagtgaggaggacgtcttgctctgttacctatgctgaagtgcagtgttacaatcaaagttcactgtagccttaacacctgggctcaagtgatcctcttgcctcagcttcctgagtggctggaaatgcagacacatgccaccgtgcccagcttctacactttttaagaatcacaaaatccacttccattcttcaaaaatttattatttattattaaaaatctcaaacaaacacagacatatggggataccagcattcccctcctggataccaggcagcttcagccctggcaggcacgatagaagaaaatacttgttacacatcctcatcaactctcagagggatcctgagccgtagatggaggaaacgcagacggagtaagcacaggatgtttgcttcctgctgcaatatccccaggtacctacccagctgaaggggatgggatggtacgcctgtgagaagctacaggccaggttggtcaactggggacaagggagttcatggggacactgtgaacacataaaaaaatgaggtaagacaaaagagccatcaatcacaaaacttaaaaactgagaataatagagtcaaaaggggccagggagaagggaggacaggagcagtgggtaggaagagccaggggaatcattaggtaggaactggntaggaacacaaagtagtggagagtggcttagctttaccatcttacatttcccggccacgcctaagttcagatccgtgtggtgggacaggcagaagtaatactcaccggggcaaagacaaaaccaggtcgagggtccaaaggtgacttctcttttccctgaaatcaaaggaaataaaagaaataaagctgggccaagggtctattttcataattcaatctc

SEQ ID NO: 275744 - DNA, 1300 bp, Homo sapiens
ctaagagcagcgaagggccggggttaatcggccgaggatgaaatagaatgagtcagctctgctcatggaacagtagtatctcttgaggccagagcaggtcttgtattttgtttttttatttccagacttctttcggggaggttttataaaatgacagtggtgttcccagcatatgtgatatgtggttagacttctgatagtatcagcttccaggggctaatctggcttatgttgggaggatatgcttacgaatcagcagcagctttctaaaggagagatttgacttttctctgcactgcacagcctggaggattggcttttgatggggatttgcctccgaagctctttgtacatttcttgtttaggagggttttcctatctacctttctactgaagtagtttctggaactttcctggtggatcagagttacgtaatgcagtctgagccttcagactgctagttagaattgttttaggtgttcagaaagggcaaaataggctgatgtggcctgtcagagtgatgtgttctcaaaaaagttcacttgcacatctgtgggctgcttttgtcctcagacccttagtggacagactccacaaaccctctgatgagacgattgatgtggccagggtccagttagcatcagtagaaggatgtcactaggaaaggcccaggtatctggtaagtgactgtgaggtgtcacagtacctgtgacaggagagtgtcctgatgtgcttgggagaaaggccgtatgggggccagggatggaagagacagtgtgtggccacagaaattcctgtccatccaccaccagtgctgctccctgtgtgggctctagggcgagtggccccgaaccttggcccagtgctttgtcccaggccagagtcttggcaatgccacatgctggcagctttctcactgagaaggtcctagcttacccctgtgtgctggccttggattcagccccgagagaggggagagaccattcctcctgtggagtgggttccttatcaccagaccggccactctcagaactggcgtccactgtaaatccaggtgccttacgtgtggctctgtcccttacgctgcaggggaaagctgcattgccattgttcccacctcctcactggcagaaagatgccagggctgttagcactgtctcctcaccttctgtttctcattgtggctcctcaaatgggatttgcatgttcctgtcaagcgtaacaacaatcccttctctctttgacagaggcccaggtgggacagtttctactatttgatatttgagtattatctgggatg

SEQ ID NO: 275745 - DNA, 756 bp, Homo sapiens
acatttcaaagcccattgaagcctatagtgaaaaatcaaaaatcccgtgagcaaaaatagaaacaacctctgtgggaaaatgctgtgtgatacgttcattcatctcacagggataacctttgtttttattcaacaccttggaaacattctttttgtagagtctatgaaaaaaatttctgagccaattgaagtctgtagtgaaaaagctaatatcccattttaaaatataaaacaaactatgaaaatgagttttgatgtgtggattcatcgagagttagacctttgttctaaatcaacaggttaagaacactctttttgtagaatctatgaaaaaacatttctgagcccgttgaggcctattgcgaagtgaatctcttgcaataaaaagcagaaaccagctctctgtgaaataattttgtgatgtacaaatttatcttgcagagttaaaactttgttttaattcaacaagttgaaaccttctttttgtagaatctgcaaagagacatttctgagcccattgaggccaatagcaaaaaaatgaatatcccacaataaaaactagaaacaaaacagctgtgtaaatgctttgcaatatgtggattcgtctcactgagttaaacctatgttttgattcaacaagttaaaaaacttgtctttgtagtatcttcgaagggacaattctgagcctatggagattatagcaaaaaactgaatatcctgcaataaaaactagaaacaagatatccgtggaaaaaa

SEQ ID NO: 275746 - DNA, 405 bp, Homo sapiens
tttggatgatgaaaatgttctgaaatcacatggtggtgatggttgcatggctgtgaatgtactaaaatccaggaactgtatacttttaaagggtatgtgaattgtatcttttaaaaaaatttaattttaagttctaggatacatgtgcaggacatgcaggtttgttacataagtaaacatgtgccatggtagtttgctgcatctatcaacccatcacctaggtattaagtctcacatgtattagctattgatcctgatcctctcctcctgctgcacccccaacaggccccagtgtgtattgttcctctccctgtgtccatgtgttctcattgttcagctcccacttataagtgagaacacacagtgtttagttttctgttcctgtgttagtttgctgaggataat

SEQ ID NO: 275747 - DNA, 361 bp, Homo sapiens
atcggcatgagtaaaactgcaggggaagtaagaaatttatgaagtatactggatgtgtgtggaggagggtgaaggtggtgatgagcagttttatgttgcttgaacatgaagtttgaagcaggcagtaactaaacatgtaagactagatgggtgggcatggagggctttgtatgcctcaataatgattttatactttagtctgaagatatgtgaggggaaccatataccaatgatgacgcgatgtaacacgagacagcacataccaaggccaccacacaccacctgtccaaaaggccttcgatacgggataatcctatttattacctcagagttttttcttcgcaggatttttctgagcctt

SEQ ID NO: 275748 - DNA, 339 bp, Homo sapiens
atcggcatgagtaaaactgcaggggaagtaagaaatttatgaagtatactggatgtgtgtggaggagggtgaaggtggtgatgagcagttttatgttgcttgaacatgaagtttgaagcaggcagtaactaaacatgtaagactagatgggtgggcatggagggctttgtatgcctcaataatgattttatactttagtctgaagatatgtgaggggaaccatggtagaatagtgtgatatgatttttcttcttcatgaatcatcttcaaaacagcattgctctgggaagaaaaagattacctgagagtgaaggatttgagagactggttgagcctatt

SEQ ID NO: 275749 - DNA, 344 bp, Homo sapiens
tcgtgttcttgcggctgagtggtgctctgctgcgcatccacctcggtgcctccgcccactcctgcaccgacggccgctgcctttgctcgcagatctgggctattgtgaacagcgctgcggtaaacgtggcggcacagacatctctcgggcaaaccgaggatgcgatacggatacttcctccgtcatttccactcccctttctccaggccctgaagctccgtctccacgcccgaactcgtggcctcccattccccaggcagcttctcccgaatgtcccctctcagaaaccggtgccagcgcgtccccgctgtgccacccccaagcccactgccaaccccgcacag

SEQ ID NO: 275750 - DNA, 787 bp, Homo sapiens
aattgtttctttttaaagtaaagattagctcgggatgttctttaaaaaatagttggggttaatcataaattaacctcttatgacggccgtgatatagaaatgtatatgttaggccaggtgtggtgactcatgcctgtaatcccaggactttgggagaccaaggcagatggatcacctgaggtcaggagttcaagatcagcctggccaacatggtgaaaccctatctctactaaaaatacaaaaattagccgggcatggtggtgtgtgcctgtaatcccagctgctccagaggctgaggcaggagaattgcttgaacccgggaggcagaggttgcagtaatctgagatcgtgccactgcactacagcctaggtgacagagcaagactccatctcaaaaaaaaaaaagaaagaaatatatatgttagaaaaagtctaaaaaggaaatttacaaagactacaagaagatagttccctggaaaagacagtgtgatggtgtgccaaaaacacctttcctgatcatacacatataagtaaacacccataccgagttccccctgactctagttaggagctgtctttaaccacattagtccctattcgggatcatcaaatttgggaaatacctgttcctagcttgttatgaacatttaaaaatcttatttttttccccttcaaactgtgcttataatagatagcaaagtggggaataaaagtctaactacaagcttattaatttgaagtaataggacttactgctttcagtaatgtcactgtcatccatcagact

SEQ ID NO: 275751 - DNA, 581 bp, Homo sapiens
ctggccaggggcccttatgggatcttttagtagaagctagccttctgagacaacgcagccaagcacaagccagtaaatgttgcaagagtgaagggagaactatacctaaatggctgttgatctcaaggcactgaaagctaagttaagaggaatgttatttgcttattggttagtgtgttagtctgctagggctgccataacaaagtaccacagaggtcttaacagaaatgaattgtctcacaattctggaagctagaagtctgaaatcaaagttggttttttccttctgagggctttgaagaaagatctgttccagttctctctcctgggcttggagatggtgttgtctgtgtcttcacatgatcttccctctgtatgtgtcagtttttgagtccaagtttcccctttctacaagaacattagtcatgttggattaggtcccatcctaaacacctcatctcaatacgtgtgcaacaatcctatttccaaacaggttaaacttcaactctgcaaatgcagtgaaatattttactaaaacaaacaagtattattaataaaaataattttgcagaaaaatctct

SEQ ID NO: 275752 - DNA, 525 bp, Homo sapiens
caggctgataacatgtggaaggaagagaacagttctaattaatagactaattagtggtacaagtctttaatagctgattatagggaagtcattccccaccccccaagtgattgatttatttattgctgttgtgctgcattattgcaaaatagtcagcttctaattatctattggctggttcaatcaagccttttccttctcttccatcttgttctttcccttgctaagggaaggcacaggcagaatgggagaactcaagccagctgatgaccaattctggacagatataagtgttgggatcctactgccactccatcttgagtgcttagagctggaaggggaatatgaggttcaagggaaaagaaggcaagaaaatcccactcattcttctaggataacgtccccatggtggccattccctcatcatccctctgactctgcacgccataactcacacacattgtcagttgcattaaaaaacagtatagttaggaaacaagcatgagaagacacaaaaagaaaaaa

SEQ ID NO: 275753 - DNA, 492 bp, Homo sapiens
ctgaccattatgtttgagaagtagatttcttcactaaaggggctttgcagcacacttagaatgagtgagccactgtgcctctctagaaactggcttcttgtcatcatttcaacatccactcaaacgctcacccctgaaagtggccttcctgcttgatatggtttggctctgtgtctccacccaaattggtttggctctgtgtccccactgaaatctcatctcgaattgtaatccccataatccccatgtgtcaagggacggacctggtgggaggtaattggatcatggaggcagtttctcccatgctattcttgtgatagtgagttctcatgacactgatggttttgtgtttgatagctccttcacactctttctttcctgttgccatgtaagacatgcctgcttccccttccaccaggattgtaagtttcctgaggcctccccagccatgcggaactgtgagtctattaaatctcttttctttgtaaatta

SEQ ID NO: 275754 - DNA, 455 bp, Homo sapiens
caattaaaactcactgtctgaggcccctttgagtctagttccgaaggaggacaggaggccagcctccacagcagagccagtgcaaggcttggtctgtgcagccttctgcttcttggtctctgctcattttatcctaaatggaagcatcccgcgtggctgcctccccaacactatcatggtagatttgtgtctgtaaagttatctaagatgtggttctggggtctctgaacacagtctgactcttcattcccttccctcagagttaggaacaaaagaataatgcatgcggcatttagatgctgattacggggtatgggagttggtaagagatgagggtggagggaatattcctagcaattggtgtatttggctgattggtaactgtttatagacttgtttctttctagcatgtaccccttgaaatcattttctttgtaaatgttaaaagccatatg

SEQ ID NO: 275755 - DNA, 671 bp, Homo sapiens
tagactgtgacagcaaagctttataacaagtaaatggagtaacaattacaataaagaaaatgtgagccaaagattttgtgctttgtcaagctaatgttcagttataaagatcacagacaaacatcaatgtgtaagtacttggaatattgctctttccggcattgtttcgcgctgccacaatggtgtgtgtgaacatcctacctgttgctctcaagagtatcaccaatgccgaaaagagagggaaacgccggttcttactaggccatgctccaaagtcattgtccaacttctagctgtgatgatgaagcatcgttacattggcaaatttgaaatcattgatgataacagagctgggaaaattgtgaacctcacaggcaggctaaacaagtgtagagccccagctttgatttgcaactcaaagatctagaaaaacggcagaacaatctgcttctatcccaaccatttgacttcgtcatattgacagccttagctggtatcatggaccatgaagaagcaagacgaaaacacacaggagggaaaatccttggattttgtttctagggatgcaatacatatttacaaataaaatgcctcaaaaaaaaaaaaaacaaaaaacttcggaatatcgttcccaagacttttcctgagaactactgaagaacaagcttctg

SEQ ID NO: 275756 - DNA, 201 bp, Homo sapiens
ccagttaccatagctagtagaagaaccagaatttgaggccagatctccttgttttcaatccagtgccctttcagctacaaaagtagttatagttaagtgaagctaatcaagggcagattttctgtaaggagggtgattttgagtgtctatttaagggagtatgagttgattgttacgagaatggaggtggtattcgggcta

SEQ ID NO: 275757 - DNA, 302 bp, Homo sapiens
ggcagaagctctcagttactgccgggcatctatgtatcaagcaggctgcatacaatttgcctcactgaacctttggaacaaagctacaaggtcggtatgagtcatattcccctattacagaggaagaaactgaggctcagagagtaaaacctaaaaccactagctcatgttcaacacagcaagaaagcagtgatgctggggctcgaaaccacattgcagccattgccctgcagaggaggaatgggaggcagcggtggtggggctaggggtgggtttggaataaatcactaatatttatatta

SEQ ID NO: 275758 - DNA, 409 bp, Homo sapiens
atatgtgggaaagccttttactctcccagttcatttcaaaggcatgaaagaagtcacactggagagaaaccctacaaatgcaagcaatgtgggaaagccttcacttgttccacttcgtttcaatatcatgaaaggactcacactggagagaaacccgatgggtgtaagcaatgtgggaaagccttcagatctgccaagtacattcgaatacatggaaggactcacactggtgagaaaccctatgaatgtaagcaatgtgggaaagcatttcattgtgtcagctcctttcatagacatgaaaggactcacgctggagaaaaaccttatgaatgtaagcattgtgggaaagccttcacttgttccatatatattagaatacatgaaagaattcacactggagagaaacctt

SEQ ID NO: 275759 - DNA, 254 bp, Homo sapiens
cttccgaaccatcagggacagtggcacaagcacttgggtttgaatctccgtcctgtgtcttaccagcttcttgacctcgagcaagtttccttaacctgaggcccagttgcataatctgtgagatgggaaaaaatctgcctatgtcattgggttgttttaaggactgagtgagctcatgtgagtggagcatctagaacagcgtttggcagcccatacatgctcaataaatggcaagttttattgttatgattaga

SEQ ID NO: 275760 - DNA, 447 bp, Homo sapiens
agaaatgcaagaaagctagcacccccaggggcatccttcaaccaatggggttgggagttgatggagaaatgcctcagctctcagtgtttcgggcagagattctggggcattcccaggaggtttggtggatcatgatcccataatgcccagaaacaaccccaacagcttactcatacattggcttctcctcctccctgtcttacctccctgctccctcattcctgcttcctggggtcaggtaaatcacctggacccaggtccttgtctcaggctctacgttcagtgtttctcatgctgtattcctcggaaccctagggcaccttaggatgtgtctacccctctctcacctgcatttgatttaatgctctgttgtcatcatcttgaaatgtttaataaattttgaacaaggggccgcatattttcattttgcattgtaccccacaaatg

SEQ ID NO: 275761 - DNA, 302 bp, Homo sapiens
taaaatatataagtctttggttaaaaagagccactgaggccaggcacagtgctcacaccttgaccctcccaccttggccttgtaagtgctggaattgcaggtgaatcactgcacctagccagaagaaacttttaaaatcagaaaaggctactttgcagacacctaggaaaataaatgtgaaatcctagatgaaatggacagtttcctaggaaaatacataggacccaaattgactccatttgatttagaaaggtaaacagactagcttttatagaataaatacagatatttattacaaaact

SEQ ID NO: 275762 - DNA, 558 bp, Homo sapiens
ttatgaagttctctaaacctgtaagtgaagtggaaacaggaaactttggattagaaaacataccctctgaccagggaatatccaggatccagcatgtcttcacattggcagaattttctgaaataggaccgaaggtcatatatcactgtgtaatctatgaaaagagatgctcagaaggtttgatattcatacacactcttacaacttgttacatctccagagctcagactggctggctttacaaatagctggctttacaatttgcacagggataattgaagttcatttcttctagaatcattaaaaattaacagtaaagttgctaaaaaaataatgccttgaaagtacaagattcaatattctgtgctttggtgtatgtatgtatttatctgtatgtgtagtggggattaggaggggacgattactccaaaataggattttgttccatcctgtatgggataactattaagcatttggcttgtggctaaaaatacatgttaaaataatactttttgtatgttatgttaaataaatgttattagaattaaaaaaaaaaaa

SEQ ID NO: 275763 - DNA, 201 bp, Homo sapiens
gaaacattttgctgaagaggatctatattaatagatggcaaataagcatataaaaatgatatttaatatcattggcccttaggaaaatgcaaattaaaatcacagtgataaattagacctatcaaaatgtcaaataaaacacattgacaaccccagatgctggccaggatatggagaaacagaattgctcttctgttaatg

SEQ ID NO: 275764 - DNA, 1624 bp, Homo sapiens
gacggacctgccccgaccttctcctgtccgatgggaaagccagcatctccatgccccgtgagggcggttccacctgcactgcccgatgtcctgaccctggggaacacagcagcacttggggggagtttgaaggctttcgggaatcttcagccaagtctggacaattctcacagtcccttgaactcctcgagggacccacagaaccccagccaccgagaaccacttctgccccaaaagagtgcagttctcaccaaccatgccagggtggaccttgggtgacaggaacttctgccgtcccaccttctgagcccattctcagctatgagaacattttaaagtgtgcttttcaagaaataacagtccagcaggcagctgaagacgtttccaccatagaccatttcctagaaataagcagtgaagaaaaacctggcgttgaacgtgtacataaattgtgtaacgaatccagaaaactctggagagcccttcagagcatacacaccacgtctacttctcagcgcctctggagcgagtcccgttgccaggagaacttctttcttgttctcggaatagatgctgcgcagaagaacctttctggaggccagggccacatcatggaagattgtgacctcaaagagcctgaaggactcctcactgtcagcagcttctgtctccagcattgcaaagccctgatccagaccaagctctcggggccgcctggcagcaaacaggggaggctgatgacatgcagccgcttcctgaagaccccctcatgcggaggtggccagcacatcactattccaaggaaaaggatgttcactccacgcaagctcaaattgacactctttaatagcgacgtttgctaaaatcaggaggactttgtacctttatgaggaatttttcattttcttcctggctgggttgatgtggaaaccagagctgtctgtggagctgttttccagaccccaggcccattcctgggatctctccaacaggacctgtcctgtgttctgggcttgtctcgggtctgaccaggagatggaggatgtgtccttggcagagccaaggggagacagaggtttctggatgccatgacaggctgtcggggtccaggtggcactcatgggccccctgccccatgtgaatgctgctggcacctggtggggggttgcccagggatggaccctgggcatggcttctgggctgcttagtccagggggagcaacttgtggccaaatccatgagttcagaggaaaaggggaaggcactgaaacgtcaccagagagacagctgttgagaccgctcagaaaccctctgtctgtcacactctgccctggctgctgtgtggtcagggcaccatgagggtgtacagatgtgctgtgtcctcagagcctcgcaggtgccctcacttactgcctgggcccctgcccagcagcctcaaggacaggcctttgtccctcacggttgtggacaggaggtcgcaccactggcctgcgagagcctctggtgggcccgtggcttcccccagttatctgctaaggaaaactgtgctcttcgaagggcagagccaagaagtcagccctgacttttgtaaaattttactaaataaaaccacctggataaaact

SEQ ID NO: 275765 - DNA, 398 bp, Homo sapiens
gacggacctgccccgaccttctcctgtccgatgggaaagccagcatctccatgccccgtgagggcggttccacctgcactgcccgatgtcctgaccctggggaacacagcagcacttggggggagtttgaaggctttcgggaatcttcagccaagtctggacaattctcacagtcccttgaactcctcgagggacccacagaaccccagccaccgagaaccacttctgccccaaaagagtgcagttctcaccaaccactggcctgcgagagcctctggtgggcccgtggcttcccccagttatctgctaaggaaaactgtgctcttcgaagggcagagccaagaagtcagccctgacttttgtaaaattttactaaataaaaccacctggataaaact

SEQ ID NO: 275766 - DNA, 2243 bp, Homo sapiens
gacggacctgccccgaccttctcctgtccgatgggaaagccagcatctccatgccccgtgagggcggttccacctgcactgcccgatgtcctgaccctggggaacacagcagcacttggggggagtttgaaggctttcgggaatcttcagccaagtctggacaattctcacagtcccttgaactcctcgagggacccacagaaccccagccaccgagaaccacttctgccccaaaagagtgcagttctcaccaaccatgccagggtggaccttgggtgacaggaacttctgccgtcccaccttctgagcccattctcagctatgagaacattttaaagtgtgcttttcaagaaataacagtccagcaggcagctgaagacgtttccaccatagaccatttcctagaaataagcagtgaagaaaaacctggcgttgaacgtgtacataaattgtggtaatgaactgaagaaatatttcttacagcaactgcttttgtacttttgtttgataaaagtaggtgtgtgaggctttgtttttgcctttatggagagtagcatctctcctgaggtccctgccatctgtgggtcataggggtcctatgagaaggggcagcacgattggcgctccagctgtggccttccactctgagccctattcatcctcctccccagccagctcacctggagcagctggacccaagcccagctccccttgggtctcagtgccagtgctggtggagtgggtgggggcctcgcattcagtgcgagtggctggtgggcctgggcagtgggcacaggggccttctgggggacttggctgagtgggcaccggctgcctcatggttctcagccacagagttctagaaaacgttccacactctggagccccattgtcagccccaggcccagccccaggggtgctcccggtgctgcctgcagggccacaggctcctaggggaaagtgcacccgcagtcactcgcagatggccattttccagggacacactttcaactgagcattgaaagacagacagcgctcgagtggattaggccgcagtggttgagaagctcgagtaacgaatccagaaaactctggagagcccttcagagcatacacaccacgtctacttctcagcgcctctggagcgagtcccgttgccaggagaacttctttcttgttctcggaatagatgctgcgcagaagaacctttctggaggccagggccacatcatggaagattgtgacctcaaagagcctgaaggactcctcactgtcagcagcttctgtctccagcattgcaaagccctgatccagaccaagctctcggggccgcctggcagcaaacaggggaggctgatgacatgcagccgcttcctgaagaccccctcatgcggaggtggccagcacatcactattccaaggaaaaggatgttcactccacgcaagctcaaattgacactctttaatagcgacgtttgctaaaatcaggaggactttgtacctttatgaggaatttttcattttcttcctggctgggttgatgtggaaaccagagctgtctgtggagctgttttccagaccccaggcccattcctgggatctctccaacaggacctgtcctgtgttctgggcttgtctcgggtctgaccaggagatggaggatgtgtccttggcagagccaaggggagacagaggtttctggatgccatgacaggctgtcggggtccaggtggcactcatgggccccctgccccatgtgaatgctgctggcacctggtggggggttgcccagggatggaccctgggcatggcttctgggctgcttagtccagggggagcaacttgtggccaaatccatgagttcagaggaaaaggggaaggcactgaaacgtcaccagagagacagctgttgagaccgctcagaaaccctctgtctgtcacactctgccctggctgctgtgtggtcagggcaccatgagggtgtacagatgtgctgtgtcctcagagcctcgcaggtgccctcacttactgcctgggcccctgcccagcagcctcaaggacaggcctttgtccctcacggttgtggacaggaggtcgcaccactggcctgcgagagcctctggtgggcccgtggcttcccccagttatctgctaaggaaaactgtgctcttcgaagggcagagccaagaagtcagccctgacttttgtaaaattttactaaataaaaccacctggataaaact

SEQ ID NO: 275767 - DNA, 1423 bp, Homo sapiens
cacgcgtcgccacgcgtccgcaccttctgagcccattctcagctatgagaacattttaaagtgtgcttttcaagaaataacagtccagcaggcagctgaagacgtttccaccatagaccatttcctagaaataagcagtgaagaaaaacctggcgttgaacgtgtacataaattgtgggacacactttcaactgagcattgaaagacagacagcgctcgagtggattaggccgcagtggttgagaagctcgagtaacgaatccagaaaactctggagagcccttcagagcatacacaccacgtctacttctcagcgcctctggagcgagtcccgttgccaggagaacttctttcttgttctcggaatagatgctgcgcagaagaacctttctggaggccagggccacatcatggaagattgtgacctcaaagagcctgaaggactcctcactgtcagcagcttctgtctccagcattgcaaagccctgatccagaccaagctctcggggccgcctggcagcaaacaggggaggctgatgacatgcagccgcttcctgaagaccccctcatgcggaggtggccagcacatcactattccaaggaaaaggatgttcactccacgcaagctcaaattgacactctttaatagcgacgtttgctaaaatcaggaggactttgtacctttatgaggaatttttcattttcttcctggctgggttgatgtggaaaccagagctgtctgtggagctgttttccagaccccaggcccattcctgggatctctccaacaggacctgtcctgtgttctgggcttgtctcgggtctgaccaggagatggaggatgtgtccttggcagagccaaggggagacagaggtttctggatgccatgacaggctgtcggggtccaggtggcactcatgggccccctgccccatgtgaatgctgctggcacctggtggggggttgcccagggatggaccctgggcatggcttctgggctgcttagtccagggggagcaacttgtggccaaatccatgagttcagaggaaaaggggaaggcactgaaacgtcaccagagagacagctgttgagaccgctcagaaaccctctgtctgtcacactctgccctggctgctgtgtggtcagggcaccatgagggtgtacagatgtgctgtgtcctcagagcctcgcaggtgccctcacttactgcctgggcccctgcccagcagcctcaaggacaggcctttgtccctcacggttgtggacaggaggtcgcaccactggcctgcgagagcctctggtgggcccgtggcttcccccagttatctgctaaggaaaactgtgctcttcgaagggcagagccaagaagtcagccctgacttttgtaaaattttactaaataaaaccacctggataaaact

SEQ ID NO: 275768 - DNA, 1629 bp, Homo sapiens
gtttgtttgtttgagacagagtctcactctgtcccccaggctggagtgcagtggcgcgatctccgctccctgcaacctccgcctcccgggttcaagcgattctcctgcctcagcctccccagtagctgggatgacaggcgcccatcaccacgcccggctatttttttgtatttttagtagagacggggtttcactatgttggccaggcagatcttgaactcctgacctcctgatctgtcagcctcagcctcccaaagtgctgggattacaggcgtgagccactgtgcccagcccgggaacactgtttttagagttcttaacagccatacgcctcttggcttgtgcgcgtctcggcttgcgggtaaaggccaggcgcccgctgcgtgcctcgggccgtgcctcatgatctcctcagaaggctctcaaggtcaccttttaacaagtgcatctgttttccagtaacgaatccagaaaactctggagagcccttcagagcatacacaccacgtctacttctcagcgcctctggagcgagtcccgttgccaggagaacttctttcttgttctcggaatagatgctgcgcagaagaacctttctggaggccagggccacatcatggaagattgtgacctcaaagagcctgaaggactcctcactgtcagcagcttctgtctccagcattgcaaagccctgatccagaccaagctctcggggccgcctggcagcaaacaggggaggctgatgacatgcagccgcttcctgaagaccccctcatgcggaggtggccagcacatcactattccaaggaaaaggatgttcactccacgcaagctcaaattgacactctttaatagcgacgtttgctaaaatcaggaggactttgtacctttatgaggaatttttcattttcttcctggctgggttgatgtggaaaccagagctgtctgtggagctgttttccagaccccaggcccattcctgggatctctccaacaggacctgtcctgtgttctgggcttgtctcgggtctgaccaggagatggaggatgtgtccttggcagagccaaggggagacagaggtttctggatgccatgacaggctgtcggggtccaggtggcactcatgggccccctgccccatgtgaatgctgctggcacctggtggggggttgcccagggatggaccctgggcatggcttctgggctgcttagtccagggggagcaacttgtggccaaatccatgagttcagaggaaaaggggaaggcactgaaacgtcaccagagagacagctgttgagaccgctcagaaaccctctgtctgtcacactctgccctggctgctgtgtggtcagggcaccatgagggtgtacagatgtgctgtgtcctcagagcctcgcaggtgccctcacttactgcctgggcccctgcccagcagcctcaaggacaggcctttgtccctcacggttgtggacaggaggtcgcaccactggcctgcgagagcctctggtgggcccgtggcttcccccagttatctgctaaggaaaactgtgctcttcgaagggcagagccaagaagtcagccctgacttttgtaaaattttactaaataaaaccacctggataaaact

SEQ ID NO: 275769 - DNA, 1271 bp, Homo sapiens
  misc_feature (142)..(142): n is a, c, g, or t
ccaagagtggctactggagggctgtgagtgtgcagggtagtggcagcctccaccagggagtgccagacacgtagcacaagggccagagaccccgcctaagatgtgggcccactgctgtcttcggggctggctgcaggcagangccacagactgcaccatgaggaagccccagcatgttttccctgggcgcctctctggtgacatcccatgatgagaaggtttctaagaggagaaccaaggagagaacactagggggccgagagcagggggcggccaggggcaaacgcccaagctagcgcttctcattgcccggggtgcgcgcgcctgactgctgtcctctcatctcagctctcggggccgcctggcagcaaacaggggaggctgatgacatgcagccgcttcctgaagaccccctcatgcggaggtggccagcacatcactattccaaggaaaaggatgttcactccacgcaagctcaaattgacactctttaatagcgacgtttgctaaaatcaggaggactttgtacctttatgaggaatttttcattttcttcctggctgggttgatgtggaaaccagagctgtctgtggagctgttttccagaccccaggcccattcctgggatctctccaacaggacctgtcctgtgttctgggcttgtctcgggtctgaccaggagatggaggatgtgtccttggcagagccaaggggagacagaggtttctggatgccatgacaggctgtcggggtccaggtggcactcatgggccccctgccccatgtgaatgctgctggcacctggtggggggttgcccagggatggaccctgggcatggcttctgggctgcttagtccagggggagcaacttgtggccaaatccatgagttcagaggaaaaggggaaggcactgaaacgtcaccagagagacagctgttgagaccgctcagaaaccctctgtctgtcacactctgccctggctgctgtgtggtcagggcaccatgagggtgtacagatgtgctgtgtcctcagagcctcgcaggtgccctcacttactgcctgggcccctgcccagcagcctcaaggacaggcctttgtccctcacggttgtggacaggaggtcgcaccactggcctgcgagagcctctggtgggcccgtggcttcccccagttatctgctaaggaaaactgtgctcttcgaagggcagagccaagaagtcagccctgacttttgtaaaattttactaaataaaaccacctggataaaact

SEQ ID NO: 275770 - DNA, 864 bp, Homo sapiens
aattttttgtatttttagtagagacggggttccaccatgttggtcatgctggtcttgaactcctgacctcgtgatccacccgcctcagcctcccaaagtgctgggattacaggcgtgagccaccgtgcccggcatttttcattttcttcctggctgggttgatgtggaaaccagagctgtctgtggagctgttttccagaccccaggcccattcctgggatctctccaacaggacctgtcctgtgttctgggcttgtctcgggtctgaccaggagatggaggatgtgtccttggcagagccaaggggagacagaggtttctggatgccatgacaggctgtcggggtccaggtggcactcatgggccccctgccccatgtgaatgctgctggcacctggtggggggttgcccagggatggaccctgggcatggcttctgggctgcttagtccagggggagcaacttgtggccaaatccatgagttcagaggaaaaggggaaggcactgaaacgtcaccagagagacagctgttgagaccgctcagaaaccctctgtctgtcacactctgccctggctgctgtgtggtcagggcaccatgagggtgtacagatgtgctgtgtcctcagagcctcgcaggtgccctcacttactgcctgggcccctgcccagcagcctcaaggacaggcctttgtccctcacggttgtggacaggaggtcgcaccactggcctgcgagagcctctggtgggcccgtggcttcccccagttatctgctaaggaaaactgtgctcttcgaagggcagagccaagaagtcagccctgacttttgtaaaattttactaaataaaaccacctggataaaact

SEQ ID NO: 275771 - DNA, 953 bp, Homo sapiens
gacggacctgccccgaccttctcctgtccgatgggaaagccagcatctccatgccccgtgagggcggttccacctgcactgcccgatgtcctgaccctggggaacacagcagcacttggggggagtttgaaggctttcgggaatcttcagccaagtctggacaattctcacagtcccttgaactcctcgagggacccacagaaccccagccaccgagaaccacttctgccccaaaagagtgcagttctcaccaaccatgccagggtggaccttgggtgacaggaacttctgccgtcccaccttctgagcccattctcagctatgagaacattttaaagtgtgcttttcaagaaataacagtccagcaggcagctgaagacgtttccaccatagaccatttcctagaaataagcagtgaagaaaaacctggcgttgaacgtgtacataaattgtgtaacgaatccagaaaactctggagagcccttcagagcatacacaccacgtctacttctcagcgcctctggagcgagtcccgttgccaggagaacttctttcttgttctcggaatagatgctgcgcagaagaacctttctggaggccagggccacatcatggaagattgtgacctcaaagagcctgaaggactcctcactgtcagcagcttctgtctccagcattgcaaagccctgatccagaccaagcaccagtctaacagagcagcgcaggcgtttctcatccagcagcaatgctacttcctcacccagggcaggtgcatgggctgaccctgatgggagcctccaggaacactgccttgagaaggcaccaccgaggggctatgaggtccctgaagaccaactggtgcctgtgatctacaaacagacaaatatttgacctttgtcttcaatgacatttacatataaatagacataaataaaatcctccataatttactc

SEQ ID NO: 275772 - DNA, 1010 bp, Homo sapiens
gacggacctgccccgaccttctcctgtccgatgggaaagccagcatctccatgccccgtgagggcggttccacctgcactgcccgatgtcctgaccctggggaacacagcagcacttggggggagtttgaaggctttcgggaatcttcagccaagtctggacaattctcacagtcccttgaactcctcgagggacccacagaaccccagccaccgagaaccacttctgccccaaaagagtgcagttctcaccaaccatgccagggtggaccttgggtgacaggaacttctgccgtcccaccttctgagcccattctcagctatgagaacattttaaagtgtgcttttcaagaaataacagtccagcaggcagctgaagacgtttccaccatagaccatttcctagaaataagcagtgaagaaaaacctggcgttgaacgtgtacataaattgtgtaacgaatccagaaaactctggagagcccttcagagcatacacaccacgtctacttctcagcgcctctggagcgagtcccgttgccaggagaacttctttcttgttctcggaatagatgctgcgcagaagaacctttctggaggccagggccacatcatggaagattgtgacctcaaagagcctgaaggactcctcactgtcagcagcttctgtctccagcattgcaaagccctgatccagaccaagaggccctgaaggaacgtgaccatcacctgacctgagtgacactgcaaagccctcattctttctagtggacgtggagctctctccaagcagataactgagccgtcagccacatcagaggccagggacatggccttcagaggctttggccatcatgcaaaaaacctggccaccctgaagcctctatgctggagaaatgtctgcagtgatcccacagagatgctgacaagatgcccaaggacccagctgctggagctttccggccagcatgccagccctgggaggagggaagccttcagggtggggtgcatc

SEQ ID NO: 275773 - DNA, 469 bp, Homo sapiens
gacggacctgccccgaccttctcctgtccgatgggaaagccagcatctccatgccccgtgagggcggttccacctgcactgcccgatgtcctgaccctggggaacacagcagcacttggggggagtttgaaggctttcgggaatcttcagccaagtctggacaattctcacagtcccttgaactcctcgagggacccacagaaccccagccaccgagaaccacttctgccccaaaagagtgcagttctcaccaaccatgccagggtggaccttgggtgacaggaacttctgccgtcccaccttctgagcccattctcagctatgagaacattttaaagtgtgcttttcaagaaataacagtccagcaggcagctgagaagtagacgtggtgtgtatgctctgaagggctctccagagttttctggattcgttacacaatttatgtacacgttcaacgccaggtttttct

SEQ ID NO: 275774 - DNA, 2180 bp, Homo sapiens
  misc_feature (1780)..(1782): n is a, c, g, or t
  misc_feature (2154)..(2154): n is a, c, g, or t
gacggacctgccccgaccttctcctgtccgatgggaaagccagcatctccatgccccgtgagggcggttccacctgcactgcccgatgtcctgaccctggggaacacagcagcacttggggggagtttgaaggctttcgggaatcttcagccaagtctggacaattctcacagtcccttgaactcctcgagggacccacagaaccccagccaccgagaaccacttctgccccaaaagagtgcagttctcaccaaccatgccagggtggaccttgggtgacaggaacttctgccgtcccaccttctgagcccattctcagctatgagaacattttaaagtgtgcttttcaagaaataacagtccagcaggcagctgaagacgtttccaccatagaccatttcctagaaataagcagtgaagaaaaacctggcgttgaacgtgtacataaattgtggtaatgaactgaagaaatatttcttacagcaactgcttttgtacttttgtttgataaaagtaggtgtgtgaggctttgtttttgcctttatggagagtagcatctctcctgaggtccctgccatctgtgggtcataggggtcctatgagaaggggcagcacgattggcgctccagctgtggccttccactctgagccctattcatcctcctccccagccagctcacctggagcagctggacccaagcccagctccccttgggtctcagtgccagtgctggtggagtgggtgggggcctcgcattcagtgcgagtggctggtgggcctgggcagtgggcacaggggccttctgggggacttggctgagtgggcaccggctgcctcatggttctcagccacagagttctagaaaacgttccacactctggagccccattgtcagccccaggcccagccccaggggtgctcccggtgctgcctgcagggccacaggctcctaggggaaagtgcacccgcagtcactcgcagatggccattttccagggacacactttcaactgagcattgaaagacagacagcgctcgagtggattaggccgcagtggttgagaagctcgagtaacgaatccagaaaactctggagagcccttcagagcatacacaccacgtctacttctcagcgcctctggagcgagtcccgttgccaggagaacttctttcttgttctcggaatagatgctgcgcagaagaacctttctggaggccagggccacatcatggaagattgtgacctcaaagagcctgaaggactcctcactgtcagcagcttctgtctccagcattgcaaagccctgatccagaccaagctctcggggccgcctggcagcaaacaggggaggctgatgacatgcagccgcttcctgaagaccccctcatgcggaggtggccagcacatcactattccaaggaaaaggatgttcactccacgcaagctcaaattgacactctttaatagcgacgtttgctaaaatcaggaggactttgtacctttatgaggaatttttcattttcttcctggctgggttgatgtggaaaccagagctgtctgtggagctgttttccagaccccaggcccattcctgggatctctccaacaggacctgtcctgtgttctgggcttgtctcgggtctgaccaggagatggaggatgtgtccttggcagagccaaggggagacagaggtttctggatgccatgacaggctgtcggggtccaggtggcactcatgggccccctgccccatgtgaatgctgctggcacctctctnnntcgtgcgccgccgccaacaaaggggccgcccgcaacgcccccccacaccgcccccacgcgcacaacccccgggcgggccaaccgcgcccccgccgcggcccccaccaagaccgcccaagcgccccccaaacgccaggaaccccccagcaccacgcgacacccaacaccccaccaccgcgccgcccacaaccaccccagcagccacccggcccccaaacccaccaccgcgcccgcacccccgcccaccgcgcccccgagccgggcacacggccccacggaccccccaccacccgcccagcacccacacaacacccggccgcaccaccaccccaaacgcacgcgccggccccagcgacccgccgccccgcccgnacgccccacgcaccacccgcaccccg

SEQ ID NO: 275775 - DNA, 357 bp, Homo sapiens
aagcatttcctccagggctagtgggatgcatggggagatgtgcagcccaggtccccttcaaaggaggacttgtggctattcccacatacctgtgggcagccagcctccagcagccaagagtcgcctcccctaaggtcacacccatcccagtgtgcccacatcccatgacctgtcaggcgagggtaaagagacaaggccatcttggcccaatgtgggacaagtctgatgcatccatgtcagcccaggtgctgggttctgccagcctgcatcacagttcgacttctgcttctgtctaatcctgcctgtctccagttattgatcccaatggctccccctaataaacctccttcacactaa

SEQ ID NO: 275776 - DNA, 132 bp, Homo sapiens
cctcccctacagccccttggccattgtgggaaggaaaagcagattctaatacaggacacagcaaacatcatgtttgtcttcatgtctgcaaagcatgctggatttgtccaaggaaaaagcaagtaaaaatag

SEQ ID NO: 275777 - DNA, 422 bp, Homo sapiens
caaaatatacatatatggctaaatagtctgaaactatggattcagtgaagcaaacggtatgtgcccatggaagagttataccaggaaaagaaaataattcattacagttttactggcactctgaaaaggaacaggagctgtgaagctgctgaggactaaggctgctgctatctgtggactcaaatggagaagcgtctatgaaaaatgctggctgcaaggggcacattatataattctatgtgtgatatcctaattttagaatgaatgaactaaactctttctgagtatgtttttgtattagcacaaaaatgcctgggaggtgaggacacctaactacagccattggctgttcttgggcattgccagcagagaggaacagccgcttttacctttcatctgaactggttgactttttttttaaa

SEQ ID NO: 275778 - DNA, 875 bp, Homo sapiens
tggttttagttttagacatggtgaatttgaggggtgtgtgggacacctaggtggagatattgaatagagacacacctgagcaagttacttcagctttctgtgcctcagtttcctcctttgaaaatgataatagtacctacctcaaagactttcatgaagattaaatgaattactacgtaaagtgcttagaacagtgcctgacatacagtgctatagtgtttgctattacatattaatatgaattatagttatgtttctatttatatatatagatacacatacatctaacatatgtgcgtgtgtgtgtgtaaatatataataaagccttgtagaggtttttggggggctttaggggaattaataaaataactcctgaatgaaaataacagaacaattgcaagaatcccactgcgcccctgccccatgacttgactctctcaaaagtcctttctcccctctcccttcaatgccttcaatgccagcaagccttcaatgccacggctgtggtgcggcacatgaggaaactgcagctgggcaccagccaggaggggcaggggcagacggcgagccatggggagctgctgacaccagtggctggggggccggcagctggctgttgctgtcgagactgctgcgtggagccgggcacagaactgtcccccacactgccccaccagctctagggccctggacctcgggtcatgatcctctgcgtgggagggcttgggggcagcctgctccccttccctccctgaaccgggagtttctctgccctgtcccctcctcacctgcttccctaccactcctcactgcattttccatacaaatgtttctattttattgttccttcttgtaataaagggaagataaaacca

SEQ ID NO: 275779 - DNA, 1168 bp, Homo sapiens
ctggcataaaataggcattcaaacattcctttagggctttacagtgcacacctgaggtttagagacagttcccccccacaccctcttgagccttgtccttcctggaatttttggccttcttgagagcttccttgattttcttatgacagccatgaagccacagtggcttttggggatccattatttctcagaaggtgcttggagcggcagaaggttctaccagcctctaaccatctctgattgccccttctcttccctcctgcccttcaagccagagaatctgctgtactacagcctggatgaagactccaaaatcatgatctccgactttggcctctccaagatggaggacccgggcagtgtgctctccaccgcctgtggaactccgggatacgtgggtgcggagggccctgggctggggctgtgatggtggggggaaccaggagttgaagggcagagatttgtcaccaccacgtcctcttccctccacagcccctgaagtcctggcccagaagccctacagcaaggctgtggattgctggtccataggtgtcatcgcctacatcttgtaagtggggcttggccacggtaggctgtggctccagagttgtcctctcgcctactttcctctcttccttcctctgctctccctctgccctcccttccttccctccctcccttccttccaccaatcaattaccagtattacttcattcaatagatactatgtttcaagcactgtgccaagcaagcactggggtaaatttagcacagcacaaaccagacaaagtgcctgccctcagggagctgactttctttctagtagggaagacagacaatcaacaagtaaataaatctacaaactgacgtcaggtgataaaaataaatactgtggagaaaaaccaagcaggaatagggagacggggtgatgccatttcagtagggaggtcagggaagggctcgctgtggaggtgatgaccgagtggtgagggagccagacattggaggtgtggggaaagagtggcataggcagaagcaatggcaagtgcaaaggccctgaggagggcaagatggcggcacatacaaggaacagaaaggataatgtagctagaacaggagtgagcaggcagggctggtagagtttataaagggggaactccttccatgg

SEQ ID NO: 275780 - DNA, 2477 bp, Homo sapiens
aggcgggggagagagccgccgagccgagccgagccccagctccagcaagagcgcgggcgggtggcccaggcacgcagcggtgaggaccgcggccacagctcggcgccaaccaccgcgggcctcccagccagccccgcggcggggcagccgcaggagccctggctgtggtcggggggcagtgggccatgctgggggcagtggaaggccccaggtggaagcaggcggaggacattagagacatctacgacttccgagatgttctgggcacgggggccttctcggaggtgatcctggcagaagataagaggacgcagaagctggtggccatcaaatgcattgccaaggaggccctggagggcaaggaaggcagcatggagaatgagattgctgtcctgcacaagatcaagcaccccaacattgtagccctggatgacatctatgagagtgggggccacctctacctcatcatgcagctggtgtcgggtggggagctctttgaccgtattgtggaaaaaggcttctacacggagcgggacgccagccgcctcatcttccaggtgctggatgctgtgaaatacctgcatgacctgggcattgtacaccgggatctcaagccagagaatctgctgtactacagcctggatgaagactccaaaatcatgatctccgactttggcctctccaagatggaggacccgggcagtgtgctctccaccgcctgtggaactccgggatacgtggcccctgaagtcctggcccagaagccctacagcaaggctgtggattgctggtccataggtgtcatcgcctacatcttgctctgcggttaccctcccttctatgacgagaatgatgccaaactctttgaacagattttgaaggccgagtacgagtttgactctccttactgggacgacatctctgactctgccaaagatttcatccggcacttgatggagaaggacccagagaaaagattcacctgtgagcaggccttgcagcacccatggattgcaggagatacagctctagataagaatatccaccagtcggtgagtgagcagatcaagaagaactttgccaagagcaagtggaagcaagccttcaatgccacggctgtggtgcggcacatgaggaaactgcagctgggcaccagccaggaggggcaggggcagacggcgagccatggggagctgctgacaccagtggctggggggccggcagctggctgttgctgtcgagactgctgcgtggagccgggcacagaactgtcccccacactgccccaccagctctagggccctggacctcgggtcatgatcctctgcgtgggagggcttgggggcagcctgctccccttccctccctgaaccgggagtttctctgccctgtcccctcctcacctgcttccctaccactcctcactgcattttccatacaaatgtttctattttattgttccttcttgtaataaagggaagataaaaccaaaaaaaaaaaaaaaaaaaaaaaaaaaaaaaaaaaaaaaaaaacaagaaaacaacacaaaaaaaaaggaggcggcgcggcgcgagtaataagagagaaccccccgggagggggccaacagttgcagcggcacgaccgcacaggttttggtggtgaccaaagggggcgcccccaatagggagggaggcgcgattattataaggacgagacgacacgggcgcgcgcgggtttaacaacagcggcggaggagccggggagaaccagcggcgacaccccgggggagaccctctggggagagggacgcccctaactacagcgggggggggggggcagcaaatatggggggacaaaacctcccctcacaagagattaaagacgcctacaagggggagcaacttacaaacagtccacgagcggagcgcaacagcggcggggagaacaccaccacgccggcgaattcagccgcccggggcgcgggaagacaaatgcgtccgccgcgcccaccacggagagatatcgacgtatgtagacaggaaaattatattcccccagagaggcgcggataagacaataaacacggccacagacaagcacgcagcacgagaccagcccgcaggcgccagagagaaaagaggagagacaggggcgagacaaagaagaaagcaggcgacagagaacacaagaagaagagaagcacaaaaggcagcagagaggaagagaacaagacacgaacagcaccagacggaaagaaaaaaaacacaaaaagaccggcaagagcagaaaggagaaggacgcagaggagcaggcagaggacgggcacgaggaggaaggaacagcgagcgcaggaggaaagagggacgggagaagagagtacagaggccaaagaaaggaaggacaacaaccagaaaggggaggaagaagaggaaagcgtaaacgcaggagaggagtgagcaagacacagcgacggaggacgcggaggaggagcgcac

SEQ ID NO: 275781 - DNA, 1598 bp, Homo sapiens
aggcgggggagagagccgccgagccgagccgagccccagctccagcaagagcgcgggcgggtggcccaggcacgcagcggtgaggaccgcggccacagctcggcgccaaccaccgcgggcctcccagccagccccgcggcggggcagccgcaggagccctggctgtggtcggggggcagtgggccatgctgggggcagtggaaggccccaggtggaagcaggcggaggacattagagacatctacgacttccgagatgttctgggcacgggggccttctcggaggtgatcctggcagaagataagaggacgcagaagctggtggccatcaaatgcattgccaaggaggccctggagggcaaggaaggcagcatggagaatgagattgctgtcctgcacaagatcaagcaccccaacattgtagccctggatgacatctatgagagtgggggccacctctacctcatcatgcagctggtgtcgggtggggagctctttgaccgtattgtggaaaaaggcttctacacggagcgggacgccagccgcctcatcttccaggtgctggatgctgtgaaatacctgcatgacctgggcattgtacaccgggatctcaagccagagaatctgctgtactacagcctggatgaagactccaaaatcatgatctccgactttggcctctccaagatggaggacccgggcagtgtgctctccaccgcctgtggaactccgggatacgtggcccctgaagtcctggcccagaagccctacagcaaggctgtggattgctggtccataggtgtcatcgcctacatcttgctctgcggttaccctcccttctatgacgagaatgatgccaaactctttgaacagattttgaaggccgagtacgagtttgactctccttactgggacgacatctctgactctgccaaagatttcatccggcacttgatggagaaggacccagagaaaagattcacctgtgagcaggccttgcagcacccatggattgcaggagatacagctctagataagaatatccaccagtcggtgagtgagcagatcaagaagaactttgccaagagcaagtggaagcaagccttcaatgccacggctgtggtgcggcacatgaggaaactgcagctgggcaccagccaggaggggcaggggcagacggcgagccatggggagctgctgacaccagtggctgggggggtgaggagcgggctctgcagaagggcatgggtggtccacaaaggtgcacccgggctggagtggagggcctgccctgcggccacctctgttctgtcttcccatgcagggccggcagctggctgttgctgtcgagactgctgcgtggagccgggcacagaactgtcccccacactgccccaccagctctagggccctggacctcgggtcatgatcctctgcgtgggagggcttgggggcagcctgctccccttccctccctgaaccgggagtttctctgccctgtcccctcctcacctgcttccctaccactcctcactgcattttccatacaaatgtttctattttattgttccttcttgtaataaagggaagataaaacca

SEQ ID NO: 275782 - DNA, 1488 bp, Homo sapiens
catgccacttcatcacctctacaccacggctgcactttgtcttgaacgttgtaaagcagtgtcggccgaatctggatgcggcggtgccagcaccagcgtaggacgggcacagctgggcacacgcggctccagcagccgcgggggcagcgcagagccctggctgtggtcggggggcagtgggccatgctgggggcagtggaaggccccaggtggaagcaggcggaggacattagagacatctacgacttccgagatgttctgggcacgggggccttctcggaggtgatcctggcagaagataagaggacgcagaagctggtggccatcaaatgcattgccaaggaggccctggagggcaaggaaggcagcatggagaatgagattgctgtcctgcacaagatcaagcaccccaacattgtagccctggatgacatctatgagagtgggggccacctctacctcatcatgcagctggtgtcgggtggggagctctttgaccgtattgtggaaaaaggcttctacacggagcgggacgccagccgcctcatcttccaggtgctggatgctgtgaaatacctgcatgacctgggcattgtacaccgggatctcaagccagagaatctgctgtactacagcctggatgaagactccaaaatcatgatctccgactttggcctctccaagatggaggacccgggcagtgtgctctccaccgcctgtggaactccgggatacgtggcccctgaagtcctggcccagaagccctacagcaaggctgtggattgctggtccataggtgtcatcgcctacatcttgctctgcggttaccctcccttctatgacgagaatgatgccaaactctttgaacagattttgaaggccgagtacgagtttgactctccttactgggacgacatctctgactctgccaaagatttcatccggcacttgatggagaaggacccagagaaaagattcacctgtgagcaggccttgcagcacccatggattgcaggagatacagctctagataagaatatccaccagtcggtgagtgagcagatcaagaagaactttgccaagagcaagtggaagcaagccttcaatgccacggctgtggtgcggcacatgaggaaactgcagctgggcaccagccaggaggggcaggggcagacggcgagccatggggagctgctgacaccagtggctggggggccggcagctggctgttgctgtcgagactgctgcgtggagccgggcacagaactgtcccccacactgccccaccagctctagggccctggacctcgggtcatgatcctctgcgtgggagggcttgggggcagcctgctccccttccctccctgaaccgggagtttctctgccctgtcccctcctcacctgcttccctaccactcctcactgcattttccatacaaatgtttctattttattgttccttcttgtaataaagggaagataaaacca

SEQ ID NO: 275783 - DNA, 1528 bp, Homo sapiens
aggcgggggagagagccgccgagccgagccgagccccagctccagcaagagcgcgggcgggtggcccaggcacgcagcggtgaggaccgcggccacagctcggcgccaaccaccgcgggcctcccagccagccccgcggcggggcagccgcaggagccctggctgtggtcggggggcagtgggccatgctgggggcagtggaaggccccaggtggaagcaggcggaggacattagagacatctacgacttccgagatgttctgggcacgggggccttctcggaggtgatcctggcagaagataagaggacgcagaagctggtggccatcaaatgcattgccaaggaggccctggagggcaaggaaggcagcatggagaatgagattgctgtcctgcacaagatcaagcaccccaacattgtagccctggatgacatctatgagagtgggggccacctctacctcatcatgcagctggtgtcgggtggggagctctttgaccgtattgtggaaaaaggcttctacacggagcgggacgccagccgcctcatcttccaggtgctggatgctgtgaaatacctgcatgacctgggcattgtacaccgggatctcaagccagagaatctgctgtactacagcctggatgaagactccaaaatcatgatctccgactttggcctctccaagatggaggacccgggcagtgtgctctccaccgcctgtggaactccgggatacgtggcccctgaagtcctggcccagaagccctacagcaaggctgtggattgctggtccataggtgtcatcgcctacatcttgctctgcggttaccctcccttctatgacgagaatgatgccaaactctttgaacagattttgaaggccgagtacgagtttgactctccttactgggacgacatctctgactctgccaaagatttcatccggcacttgatggagaaggacccagagaaaagattcacctgtgagcaggccttgcagcacccatggattgcaggagatacagctctagataagaatatccaccagtcggtgagtgagcagatcaagaagaactttgccaagagcaagtggaagtcctttctcccctctcccttcaatgccttcaatgccagcaagccttcaatgccacggctgtggtgcggcacatgaggaaactgcagctgggcaccagccaggaggggcaggggcagacggcgagccatggggagctgctgacaccagtggctggggggccggcagctggctgttgctgtcgagactgctgcgtggagccgggcacagaactgtcccccacactgccccaccagctctagggccctggacctcgggtcatgatcctctgcgtgggagggcttgggggcagcctgctccccttccctccctgaaccgggagtttctctgccctgtcccctcctcacctgcttccctaccactcctcactgcattttccatacaaatgtttctattttattgttccttcttgtaataaagggaagataaaacca

SEQ ID NO: 275784 - DNA, 1455 bp, Homo sapiens
gaaaacacagacagataggaccaagacacgcaacaggatgagagaccagaggagcaaagactcagcgccaaccaccgtgagcctcccagaccagaccccgcgagcggggcagtcgcaagagccctggctgtggtcggggggcagtgggccatgctgggggcagtggaaggccccaggtggaagcaggcggaggacattagagacatctacgacttccgagatgttctgggcacgggggccttctcggaggtgatcctggcagaagataagaggacgcagaagctggtggccatcaaatgcattgccaaggaggccctggagggcaaggaaggcagcatggagaatgagattgctgtcctgcacaagatcaagcaccccaacattgtagccctggatgacatctatgagagtgggggccacctctacctcatcatgcagctggtgtcgggtggggagctctttgaccgtattgtggaaaaaggcttctacacggagcgggacgccagccgcctcatcttccaggtgctggatgctgtgaaatacctgcatgacctgggcattgtacaccgggatctcaagccagagaatctgctgtactacagcctggatgaagactccaaaatcatgatctccgactttggcctctccaagatggaggacccgggcagtgtgctctccaccgcctgtggaactccgggatacgtggcccctgaagtcctggcccagaagccctacagcaaggctgtggattgctggtccataggtgtcatcgcctacatcttgctctgcggttaccctcccttctatgacgagaatgatgccaaactctttgaacagattttgaaggccgagtacgagtttgactctccttactgggacgacatctctgactctgccaaagatttcatccggcacttgatggagaaggacccagagaaaagattcacctgtgagcaggccttgcagcacccatggattgcaggagatacagctctagataagaatatccaccagtcggtgagtgagcagatcaagaagaactttgccaagagcaagtggaagcaagccttcaatgccacggctgtggtgcggcacatgaggaaactgcagctgggcaccagccaggaggggcaggggcagacggcgagccatggggagctgctgacaccagtggctggggggccggcagctggctgttgctgtcgagactgctgcgtggagccgggcacagaactgtcccccacactgccccaccagctctagggccctggacctcgggtcatgatcctctgcgtgggagggcttgggggcagcctgctccccttccctccctgaaccgggagtttctctgccctgtcccctcctcacctgcttccctaccactcctcactgcattttccatacaaatgtttctattttattgttccttcttgtaataaagggaagataaaacca

SEQ ID NO: 275785 - DNA, 1358 bp, Homo sapiens
aggcgggggagagagccgccgagccgagccgagccccagctccagcaagagcgcgggcgggtggcccaggcacgcagcggtgaggaccgcggccacagctcggcgccaaccaccgcgggcctcccagccagccccgcggcggggcagccgcaggagccctggctgtggtcggggggcagtgggccatgctgggggcagtggaaggccccaggtggaagcaggcggaggacattagagacatctacgacttccgagatgttctgggcacgatcaagcaccccaacattgtagccctggatgacatctatgagagtgggggccacctctacctcatcatgcagctggtgtcgggtggggagctctttgaccgtattgtggaaaaaggcttctacacggagcgggacgccagccgcctcatcttccaggtgctggatgctgtgaaatacctgcatgacctgggcattgtacaccgggatctcaagccagagaatctgctgtactacagcctggatgaagactccaaaatcatgatctccgactttggcctctccaagatggaggacccgggcagtgtgctctccaccgcctgtggaactccgggatacgtggcccctgaagtcctggcccagaagccctacagcaaggctgtggattgctggtccataggtgtcatcgcctacatcttgctctgcggttaccctcccttctatgacgagaatgatgccaaactctttgaacagattttgaaggccgagtacgagtttgactctccttactgggacgacatctctgactctgccaaagatttcatccggcacttgatggagaaggacccagagaaaagattcacctgtgagcaggccttgcagcacccatggattgcaggagatacagctctagataagaatatccaccagtcggtgagtgagcagatcaagaagaactttgccaagagcaagtggaagcaagccttcaatgccacggctgtggtgcggcacatgaggaaactgcagctgggcaccagccaggaggggcaggggcagacggcgagccatggggagctgctgacaccagtggctggggggccggcagctggctgttgctgtcgagactgctgcgtggagccgggcacagaactgtcccccacactgccccaccagctctagggccctggacctcgggtcatgatcctctgcgtgggagggcttgggggcagcctgctccccttccctccctgaaccgggagtttctctgccctgtcccctcctcacctgcttccctaccactcctcactgcattttccatacaaatgtttctattttattgttccttcttgtaataaagggaagataaaacca

SEQ ID NO: 275786 - DNA, 1513 bp, Homo sapiens
aggcgggggagagagccgccgagccgagccgagccccagctccagcaagagcgcgggcgggtggcccaggcacgcagcggtgaggaccgcggccacagctcggcgccaaccaccgcgggcctcccagccagccccgcggcggggcagccgcaggagccctggctgtggtcggggggcagtgggccatgctgggggcagtggaaggccccaggtggaagcaggcggaggacattagagacatctacgacttccgagatgttctgggcacgggggccttctcggaggtgatcctggcagaagataagaggacgcagaagctggtggccatcaaatgcattgccaaggaggccctggagggcaaggaaggcagcatggagaatgagattgctgtcctgcacaagatcaagcaccccaacattgtagccctggatgacatctatgagagtgggggccacctctacctcatcatgcagctggtgtcgggtggggagctctttgaccgtattgtggaaaaaggcttctacacggagcgggacgccagccgcctcatcttccaggtgctggatgctgtgaaatacctgcatgacctgggcattgtacaccgggatctcaagccagagaatctgctgtactacagcctggatgaagactccaaaatcatgatctccgactttggcctctccaagatggaggacccgggcagtgtgctctccaccgcctgtggaactccgggatacgtggcccctgaagtcctggcccagaagccctacagcaaggctgtggattgctggtccataggtgtcatcgcctacatcttgctctgcggttaccctcccttctatgacgagaatgatgccaaactctttgaacagattttgaaggccgagtacgagtttgactctccttactgggacgacatctctgactctgccaaagatttcatccggcacttgatggagaaggacccagagaaaagattcacctgtgagcaggccttgcagcacccatggtgagaattcacacaacctgtgagctggggcgggatttggggccctcaggtctgcttctgccctcataggcaacccaccacataaccccatcctaggattgcaggagatacagctctagataagaatatccaccagtcggtgagtgagcagatcatgatctccgactttggcctctccaagatggaggacccgggcagtgtgctctccaccgcctgtggaactctggggggccggcagctggctgttgctgtcgagactgctgcgtggagccgggcacagaactgtcccccacactgccccaccagctctagggccctggacctcgggtcatgatcctctgcgtgggagggcttgggggcagcctgctccccttccctccctgaaccgggagtttctctgccctgtcccctcctcacctgcttccctaccactcctcactgcattttccatacaaatgtttctattttattgttccttcttgtaataaagggaagataaaacca

SEQ ID NO: 275787 - DNA, 1241 bp, Homo sapiens
ctggcataaaataggcattcaaacattcctttagggctttacagtgcacacctgaggtttagagacagttcccccccacaccctcttgagccttgtccttcctggaatttttggccttcttgagagcttccttgattttcttatgacagccatgaagccacagtggcttttggggatccattatttctcagaaggtgcttggagcggcagaaggttctaccagcctctaaccatctctgattgccccttctcttccctcctgcccttcaagccagagaatctgctgtactacagcctggatgaagactccaaaatcatgatctccgactttggcctctccaagatggaggacccgggcagtgtgctctccaccgcctgtggaactccgggatacgtgggtgcggagggccctgggctggggctgtgatggtggggggaaccaggagttgaagggcagagatttgtcaccaccacgtcctcttccctccacagcccctgaagtcctggcccagaagccctacagcaaggctgtggattgctggtccataggtgtcatcgcctacatcttgctctgcggttaccctcccttctatgacgagaatgatgccaaactctttgaacagattttgaaggccgagtacgagtttgactctccttactgggacgacatctctgactctgccaaagatttcatccggcacttgatggagaaggacccagagaaaagattcacctgtgagcaggccttgcagcacccatggattgcaggagatacagctctagataagaatatccaccagtcggtgagtgagcagatcaagaagaactttgccaagagcaagtggaagcaagccttcaatgccacggctgtggtgcggcacatgaggaaactgcagctgggcaccagccaggaggggcaggggcagacggcgagccatggggagctgctgacaccagtggctggggggccggcagctggctgttgctgtcgagactgctgcgtggagccgggcacagaactgtcccccacactgccccaccagctctagggccctggacctcgggtcatgatcctctgcgtgggagggcttgggggcagcctgctccccttccctccctgaaccgggagtttctctgccctgtcccctcctcacctgcttccctaccactcctcactgcattttccatacaaatgtttctattttattgttccttcttgtaataaagggaagataaaacca

SEQ ID NO: 275788 - DNA, 1052 bp, Homo sapiens
gagacgcagtctcgctctgttgcccaggctggagtgcagtggcacaatctcggctcactgcaacctctgtctcccgggttcgagcaattctctgcctcagcctcccaagtagctgggattacaggcgcccaccaccatgcccggctaattttttttgtatttttagtagaaacaaggtttcaccatcttggccaggctggtcttgaactcctgacctcgtgatccacctgcattggcctcccaaagtgctgggattacagacatgagccactgtgcccggccatatgtttttcttaagagagaaaggaaagagctggaaggcacggggtgggagggcctgaagaagagcataggttgggtggggtggggcatggactgatttggcctctttgtcttgatgccaggccagacctgagggagtgggtatgctcttggggagtacacaggcagtaccatgctgtcattatctttgcttttgtcttgggggtttagccaaagatttcatccggcacttgatggagaaggacccagagaaaagattcacctgtgagcaggccttgcagcacccatggattgcaggagatacagctctagataagaatatccaccagtcggtgagtgagcagatcaagaagaactttgccaagagcaagtggaagcaagccttcaatgccacggctgtggtgcggcacatgaggaaactgcagctgggcaccagccaggaggggcaggggcagacggcgagccatggggagctgctgacaccagtggctggggggccggcagctggctgttgctgtcgagactgctgcgtggagccgggcacagaactgtcccccacactgccccaccagctctagggccctggacctcgggtcatgatcctctgcgtgggagggcttgggggcagcctgctccccttccctccctgaaccgggagtttctctgccctgtcccctcctcacctgcttccctaccactcctcactgcattttccatacaaatgtttctattttattgttccttcttgtaataaagggaagataaaacca

SEQ ID NO: 275789 - DNA, 1148 bp, Homo sapiens
gagacgcagtctcgctctgttgcccaggctggagtgcagtggcacaatctcggctcactgcaacctctgtctcccgggttcgagcaattctctgcctcagcctcccaagtagctgggattacaggcgcccaccaccatgcccggctaattttttttgtatttttagtagaaacaaggtttcaccatcttggccaggctggtcttgaactcctgacctcgtgatccacctgcattggcctcccaaagtgctgggattacagacatgagccactgtgcccggccatatgtttttcttaagagagaaaggaaagagctggaaggcacggggtgggagggcctgaagaagagcataggttgggtggggtggggcatggactgatttggcctctttgtcttgatgccaggccagacctgagggagtgggtatgctcttggggagtacacaggcagtaccatgctgtcattatctttgcttttgtcttgggggtttagccaaagatttcatccggcacttgatggagaaggacccagagaaaagattcacctgtgagcaggccttgcagcacccatggtgagaattcacacaacctgtgagctggggcgggatttggggccctcaggtctgcttctgccctcataggcaacccaccacataaccccatcctaggattgcaggagatacagctctagataagaatatccaccagtcggtgagtgagcagatcaagaagaactttgccaagagcaagtggaagcaagccttcaatgccacggctgtggtgcggcacatgaggaaactgcagctgggcaccagccaggaggggcaggggcagacggcgagccatggggagctgctgacaccagtggctggggggccggcagctggctgttgctgtcgagactgctgcgtggagccgggcacagaactgtcccccacactgccccaccagctctagggccctggacctcgggtcatgatcctctgcgtgggagggcttgggggcagcctgctccccttccctccctgaaccgggagtttctctgccctgtcccctcctcacctgcttccctaccactcctcactgcattttccatacaaatgtttctattttattgttccttcttgtaataaagggaagataaaacca

SEQ ID NO: 275790 - DNA, 1039 bp, Homo sapiens
catgccacttcatcacctctacaccacggctgcactttgtcttgaacgttgtaaagcagtgtcggccgaatctggatgcggcggtgccagcaccagcgtaggacgggcacagctgggcacacgcggctccagcagccgcgggggcagcgcagagccctggctgtggtcggggggcagtgggccatgctgggggcagtggaaggccccaggtggaagcaggcggaggacattagagacatctacgacttccgagatgttctgggcacgctctccccaggtggtggcaaagatgatcgccattagctccaggcttacatcctaccagctcaacaggagactcattctcaaagtgctagtaagctggcttgcaatcacatgaccaattactgtggccaggggagagactactttgactggccaggcctgggtcatgtgaccatctctggagccaggggatggatgagtgactaggggagggtcatccacgtccttggtccagcagtggtcacagaacccatagggaatggaggagaggctggagggaagctggggttccagttcttcaccttgtgaatcccctctcccgataggggggccttctcggaggtgatcctggcagaagataagaggacgcagaagctggtggccatcaaatgcattgccaaggaggccctggagggcaaggaaggcagcatggagaatgagattgctgtcctgcacaagtgcgtgggccacagcctttccctgccccaagctgaccctgccttggccctcccatcctcctcctttcctgctttggacaaatcatttaaactctctaagccttaaattgcccctttataaaatggggatcacaatttccacttggcagggttgtggggaacatcagaagtcctttatttcaagtgcctggcctaacatgacagatgtgatggaggtgccagtgcttagtcacaggggtttaactgttcaatcaggtgtaaagatccatcctgaacatggcttggacccacatatctcagttggtgttgtctctgga

SEQ ID NO: 275791 - DNA, 272 bp, Homo sapiens
ttgttgaatgattttgtcaaatggatgaatcaaggatgaataaatgcaggttgaatgactgaatggggcctgcagtaaattcccagacagagggctgggctctgctgagtctcctccttccattctccttacaggagccctggctgtggtcggggggcagtgggccatgctgggggcagtggaaggccccaggtggaagcaggcggaggacattagagacatctacgacttccgagatgttctgggcacgtgagtccagggcaggattgggt

SEQ ID NO: 275792 - DNA, 1490 bp, Homo sapiens
aggcgggggagagagccgccgagccgagccgagccccagctccagcaagagcgcgggcgggtggcccaggcacgcagcggtgaggaccgcggccacagctcggcgccaaccaccgcgggcctcccagccagccccgcggcggggcagccgcaggagccctggctgtggtcggggggcagtgggccatgctgggggcagtggaaggccccaggtggaagcaggcggaggacattagagacatctacgacttccgagatgttctgggcacgggggccttctcggaggtgatcctggcagaagataagaggacgcagaagctggtggccatcaaatgcattgccaaggaggccctggagggcaaggaaggcagcatggagaatgagattgctgtcctgcacaagatcaagcaccccaacattgtagccctggatgacatctatgagagtgggggccacctctacctcatcatgcagctggtgtcgggtggggagctctttgaccgtattgtggaaaaaggcttctacacggagcgggacgccagccgcctcatcttccaggtgctggatgctgtgaaatacctgcatgacctgggcattgtacaccgggatctcaagccagagaatctgctgtactacagcctggatgaagactccaaaatcatgatctccgactttggcctctccaagatggaggacccgggcagtgtgctctccaccgcctgtggaactccgggatacgtggcccctgaagtcctggcccagaagccctacagcaaggctgtggattgctggtccataggtgtcatcgcctacatcttgctctgcggttaccctcccttctatgacgagaatgatgccaaactctttgaacagattttgaaggccgagtacgagtttgactctccttactgggacgacatctctgactctgccaaagatttcatccggcacttgatggagaaggacccagagaaaagattcacctgtgagcaggccttgcagcacccatggattgcaggagatacagctctagataagaatatccaccagtcggtgagtgagcagatcaagaagaactttgccaagagcaagtggaagcaagccttcaatgccacggctgtggtgcggcacatgaggaaactgcagctgggcaccagccaggaggggcaggggcagacggcgagccatggggagctgctgacaccagtggctggggggccggcagctggctgttgctgtcgagactgctgcgtggagccgggcacagaactgtcccccacactgccccaccagctctagggccctggacctcgggtcatgatcctctgcgtgggagggcttgggggcagcctgctccccttccctccctgaaccgggagtttctctgccctgtcccctcctcacctgcttccctaccactcctcactgcattttccatacaaatgtttctattttattgttccttcttgtaataaagggaagataaaacca

SEQ ID NO: 275793 - DNA, 1586 bp, Homo sapiens
aggcgggggagagagccgccgagccgagccgagccccagctccagcaagagcgcgggcgggtggcccaggcacgcagcggtgaggaccgcggccacagctcggcgccaaccaccgcgggcctcccagccagccccgcggcggggcagccgcaggagccctggctgtggtcggggggcagtgggccatgctgggggcagtggaaggccccaggtggaagcaggcggaggacattagagacatctacgacttccgagatgttctgggcacgggggccttctcggaggtgatcctggcagaagataagaggacgcagaagctggtggccatcaaatgcattgccaaggaggccctggagggcaaggaaggcagcatggagaatgagattgctgtcctgcacaagatcaagcaccccaacattgtagccctggatgacatctatgagagtgggggccacctctacctcatcatgcagctggtgtcgggtggggagctctttgaccgtattgtggaaaaaggcttctacacggagcgggacgccagccgcctcatcttccaggtgctggatgctgtgaaatacctgcatgacctgggcattgtacaccgggatctcaagccagagaatctgctgtactacagcctggatgaagactccaaaatcatgatctccgactttggcctctccaagatggaggacccgggcagtgtgctctccaccgcctgtggaactccgggatacgtggcccctgaagtcctggcccagaagccctacagcaaggctgtggattgctggtccataggtgtcatcgcctacatcttgctctgcggttaccctcccttctatgacgagaatgatgccaaactctttgaacagattttgaaggccgagtacgagtttgactctccttactgggacgacatctctgactctgccaaagatttcatccggcacttgatggagaaggacccagagaaaagattcacctgtgagcaggccttgcagcacccatggtgagaattcacacaacctgtgagctggggcgggatttggggccctcaggtctgcttctgccctcataggcaacccaccacataaccccatcctaggattgcaggagatacagctctagataagaatatccaccagtcggtgagtgagcagatcaagaagaactttgccaagagcaagtggaagcaagccttcaatgccacggctgtggtgcggcacatgaggaaactgcagctgggcaccagccaggaggggcaggggcagacggcgagccatggggagctgctgacaccagtggctggggggccggcagctggctgttgctgtcgagactgctgcgtggagccgggcacagaactgtcccccacactgccccaccagctctagggccctggacctcgggtcatgatcctctgcgtgggagggcttgggggcagcctgctccccttccctccctgaaccgggagtttctctgccctgtcccctcctcacctgcttccctaccactcctcactgcattttccatacaaatgtttctattttattgttccttcttgtaataaagggaagataaaacca

SEQ ID NO: 275794 - DNA, 1779 bp, Homo sapiens
aggcgggggagagagccgccgagccgagccgagccccagctccagcaagagcgcgggcgggtggcccaggcacgcagcggtgaggaccgcggccacagctcggcgccaaccaccgcgggcctcccagccagccccgcggcggggcagccgcaggagccctggctgtggtcggggggcagtgggccatgctgggggcagtggaaggccccaggtggaagcaggcggaggacattagagacatctacgacttccgagatgttctgggcacgggggccttctcggaggtgatcctggcagaagataagaggacgcagaagctggtggccatcaaatgcattgccaaggaggccctggagggcaaggaaggcagcatggagaatgagattgctgtcctgcacaagatcaagcaccccaacattgtagccctggatgacatctatgagagtgggggccacctctacctcatcatgcagctggtgtcgggtggggagctctttgaccgtattgtggaaaaaggcttctacacggagcgggacgccagccgcctcatcttccaggtgctggatgctgtgaaatacctgcatgacctgggcattgtacaccgggatctcaagccagagaatctgctgtactacagcctggatgaagactccaaaatcatgatctccgactttggcctctccaagatggaggacccgggcagtgtgctctccaccgcctgtggaactccgggatacgtggcccctgaagtcctggcccagaagccctacagcaaggctgtggattgctggtccataggtgtcatcgcctacatcttgctctgcggttaccctcccttctatgacgagaatgatgccaaactctttgaacagattttgaaggccgagtacgagtttgactctccttactgggacgacatctctgactctgccaaagatttcatccggcacttgatggagaaggacccagagaaaagattcacctgtgagcaggccttgcagcacccatggattgcaggagatacagctctagataagaatatccaccagtcggtgagtgagcagatcaagaagaactttgccaagagcaagtggaagcaagccttcaatgccacggctgtggtgcggcacatgaggaaactgcagctgggcaccagccaggaggggcaggggcagacggcgagccatggggagctgctgacaccagtggctggggggccggcagctggctgttgctgtcgagactgctgcgtggagccgggcacagaactgtcccccacactgccccaccagctctagggccctggacctcgggtcatgatcctctgcgtgggagggcttgggggcagcctgctccccttccctccctgaaccgggagtttctctgccctgtcccctcctcacctgcttccctaccactcctcactgcattttccatacaaatgtttctattttattgttccttcttgtaataaagggaagataaaaccatagataaaaatataatattttaaatataggggatttatatgggtaaatatattttaaaattatctcgggggggggccgggcacccaattggccctatggggaggcgttttacatttcattggccgccgtttaacaaccgccggattggaaaaacccgggggttccccaacttaattgcctgggagcacaatcccctttttgccaggtgggggtaaatactgaaagaggccggaccattcgctcttctcaacaattgggcaacctgaatggggaagtggcaaattgtagg

SEQ ID NO: 275795 - DNA, 1579 bp, Homo sapiens
aggcgggggagagagccgccgagccgagccgagccccagctccagcaagagcgcgggcgggtggcccaggcacgcagcggtgaggaccgcggccacagctcggcgccaaccaccgcgggcctcccagccagccccgcggcggggcagccgcaggagccctggctgtggtcggggggcagtgggccatgctgggggcagtggaaggccccaggtggaagcaggcggaggacattagagacatctacgacttccgagatgttctgggcacgctctccccaggtggtggcaaagatgatcgccattagctccaggcttacatcctaccagctcaacaggagactcattctcaaagtgctagggggccttctcggaggtgatcctggcagaagataagaggacgcagaagctggtggccatcaaatgcattgccaaggaggccctggagggcaaggaaggcagcatggagaatgagattgctgtcctgcacaagatcaagcaccccaacattgtagccctggatgacatctatgagagtgggggccacctctacctcatcatgcagctggtgtcgggtggggagctctttgaccgtattgtggaaaaaggcttctacacggagcgggacgccagccgcctcatcttccaggtgctggatgctgtgaaatacctgcatgacctgggcattgtacaccgggatctcaagccagagaatctgctgtactacagcctggatgaagactccaaaatcatgatctccgactttggcctctccaagatggaggacccgggcagtgtgctctccaccgcctgtggaactccgggatacgtggcccctgaagtcctggcccagaagccctacagcaaggctgtggattgctggtccataggtgtcatcgcctacatcttgctctgcggttaccctcccttctatgacgagaatgatgccaaactctttgaacagattttgaaggccgagtacgagtttgactctccttactgggacgacatctctgactctgccaaagatttcatccggcacttgatggagaaggacccagagaaaagattcacctgtgagcaggccttgcagcacccatggattgcaggagatacagctctagataagaatatccaccagtcggtgagtgagcagatcaagaagaactttgccaagagcaagtggaagcaagccttcaatgccacggctgtggtgcggcacatgaggaaactgcagctgggcaccagccaggaggggcaggggcagacggcgagccatggggagctgctgacaccagtggctggggggccggcagctggctgttgctgtcgagactgctgcgtggagccgggcacagaactgtcccccacactgccccaccagctctagggccctggacctcgggtcatgatcctctgcgtgggagggcttgggggcagcctgctccccttccctccctgaaccgggagtttctctgccctgtcccctcctcacctgcttccctaccactcctcactgcattttccatacaaatgtttctattttattgttccttcttgtaataaagggaagataaaacca

SEQ ID NO: 275796 - DNA, 1413 bp, Homo sapiens
aggcgggggagagagccgccgagccgagccgagccccagctccagcaagagcgcgggcgggtggcccaggcacgcagcggtgaggaccgcggccacagctcggcgccaaccaccgcgggcctcccagccagccccgcggcggggcagccgcaggagccctggctgtggtcggggggcagtgggccatgctgggggcagtggaaggccccaggtggaagcaggcggaggacattagagacatctacgacttccgagatgttctgggcacgggggccttctcggaggtgatcctggcagaagataagaggacgcagaagctggtggccatcaaatgcattgccaaggaggccctggagggcaaggaaggcagcatggagaatgagattgctgtcctgcacaagatcaagcaccccaacattgtagccctggatgacatctatgagagtgggggccacctctacctcatcatgcagctggtgtcgggtggggagctctttgaccgtattgtggaaaaaggcttctacacggagcgggacgccagccgcctcatcttccaggtgctggatgctgtgaaatacctgcatgacctgggcattgtacaccgggatctcaagccagagaatctgctgtactacagcctggatgaagactccaaaatcatgatctccgactttggcctctccaagatggaggacccgggcagtgtgctctccaccgcctgtggaactccgggatacgtggcccctgaagtcctggcccagaagccctacagcaaggctgtggattgctggtccataggtgtcatcgcctacatcttgctctgcggttaccctcccttctatgacgagaatgatgccaaactctttgaacagattttgaaggccgagtacgagtttgactctccttactgggacgacatctctgactctgccaaagatttcatccggcacttgatggagaaggacccagagaaaagattcacctgtgagcaggccttgcagcacccatggattgcaggagatacagctctagataagaatatccaccagtcggtgagtgagcagatcaagaagaactttgccaagagcaagtggaagcaagccttcaatgccacggctgtggtgcggcacatgaggaaactgcagctgggcaccagccaggaggggcaggggcagacggcgagccatggggagctgctgacaccagtggctggggctctagggccctggacctcgggtcatgatcctctgcgtgggagggcttgggggcagcctgctccccttccctccctgaaccgggagtttctctgccctgtcccctcctcacctgcttccctaccactcctcactgcattttccatacaaatgtttctattttattgttccttcttgtaataaagggaagataaaacca

SEQ ID NO: 275797 - DNA, 1417 bp, Homo sapiens
aggcgggggagagagccgccgagccgagccgagccccagctccagcaagagcgcgggcgggtggcccaggcacgcagcggtgaggaccgcggccacagctcggcgccaaccaccgcgggcctcccagccagccccgcggcggggcagccgcaggagccctggctgtggtcggggggcagtgggccatgctgggggcagtggaaggccccaggtggaagcaggcggaggacattagagacatctacgacttccgagatgttctgggcacgggggccttctcggaggtgatcctggcagaagataagaggacgcagaagctggtggccatcaaatgcattgccaaggaggccctggagggcaaggaaggcagcatggagaatgagattgctgtcctgcacaagatcaagcaccccaacattgtagccctggatgacatctatgagagtgggggccacctctacctcatcatgcagctggtgtcgggtggggagctctttgaccgtattgtggaaaaaggcttctacacggagcgggacgccagccgcctcatcttccaggtgctggatgctgtgaaatacctgcatgacctgggcattgtacaccgggatctcaagccagagaatctgctgtactacagcctggatgaagactccaaaatcatgatctccgactttggcctctccaagatggaggacccgggcagtgtgctctccaccgcctgtggaactccgggatacgtggcccctgaagtcctggcccagaagccctacagcaaggctgtggattgctggtccataggtgtcatcgcctacatcttgctctgcggttaccctcccttctatgacgagaatgatgccaaactctttgaacagattttgaaggccgagtacgagtttgactctccttactgggacgacatctctgactctgccaaagatttcatccggcacttgatggagaaggacccagagaaaagattcacctgtgagcaggccttgcagcacccatggattgcaggagatacagctctagataagaatatccaccagtcggtgagtgagcagatcatgatctccgactttggcctctccaagatggaggacccgggcagtgtgctctccaccgcctgtggaactctggggggccggcagctggctgttgctgtcgagactgctgcgtggagccgggcacagaactgtcccccacactgccccaccagctctagggccctggacctcgggtcatgatcctctgcgtgggagggcttgggggcagcctgctccccttccctccctgaaccgggagtttctctgccctgtcccctcctcacctgcttccctaccactcctcactgcattttccatacaaatgtttctattttattgttccttcttgtaataaagggaagataaaacca

SEQ ID NO: 275798 - DNA, 760 bp, Homo sapiens
atgatcgagctgcaggacattcatggcttgagaatggccgacgtaggacatggattgctggtccataggtgtcatcgcctacatcttgctctgcggttaccctcccttctatgacgagaatgatgccaaactctttgaacagattttgaaggccgagtacgagtttgactctccttactgggacgacatctctgactctgccaaagatttcatccggcacttgatggagaaggacccagagaaaagattcacctgtgagcaggccttgcagcacccatggattgcaggagatacagctctagataagaatatccaccagtcggtgagtgagcagatcaagaagaactttgccaagagcaagtggaagcaagccttcaatgccacggctgtggtgcggcacatgaggaaactgcagctgggcaccagccaggaggggcaggggcagacggcgagccatggggagctgctgacaccagtggctggggggccggcagctggctgttgctgtcgagactgctgcgtggagccgggcacagaactgtcccccacactgccccaccagctctagggccctggacctcgggtcatgatcctctgcgtgggagggcttgggggcagcctgctccccttccctccctgaaccgggagtttctctgccctgtcccctcctcacctgcttccctaccactcctcactgcattttccatacaaatgtttctattttattgttccttcttgtaataaagggaagataaaacca

SEQ ID NO: 275799 - DNA, 1417 bp, Homo sapiens
aggcgggggagagagccgccgagccgagccgagccccagctccagcaagagcgcgggcgggtggcccaggcacgcagcggtgaggaccgcggccacagctcggcgccaaccaccgcgggcctcccagccagccccgcggcggggcagccgcaggagccctggctgtggtcggggggcagtgggccatgctgggggcagtggaaggccccaggtggaagcaggcggaggacattagagacatctacgacttccgagatgttctgggcacgggggccttctcggaggtgatcctggcagaagataagaggacgcagaagctggtggccatcaaatgcattgccaaggaggccctggagggcaaggaaggcagcatggagaatgagattgctgtcctgcacaagatcaagcaccccaacattgtagccctggatgacatctatgagagtgggggccacctctacctcatcatgcagctggtgtcgggtggggagctctttgaccgtattgtggaaaaaggcttctacacggagcgggacgccagccgcctcatcttccaggtgctggatgctgtgaaatacctgcatgacctgggcattgtacaccgggatctcaagccagagaatctgctgtactacagcctggatgaagactccaaaatcatgatctccgactttggcctctccaagatggaggacccgggcagtgtgctctccaccgcctgtggaactccgggatacgtggcccctgaagtcctggcccagaagccctacagcaaggctgtggattgctggtccataggtgtcatcgcctacatcttgtaagtggggcttggccacggtaggctgtggctccagagttgtcctctcgcctactttcctctcttccttcctctgctctccctctgccctcccttccttccctccctcccttccttccaccaatcaattaccagtattacttcattcaatagatactatgtttcaagcactgtgccaagcaagcactggggtaaatttagcacagcacaaaccagacaaagtgcctgccctcagggagctgactttctttctagtagggaagacagacaatcaacaagtaaataaatctacaaactgacgtcaggtgataaaaataaatactgtggagaaaaaccaagcaggaatagggagacggggtgatgccatttcagtagggaggtcagggaagggctcgctgtggaggtgatgaccgagtggtgagggagccagacattggaggtgtggggaaagagtggcataggcagaagcaatggcaagtgcaaaggccctgaggagggcaagatggcggcacatacaaggaacagaaaggataatgtagctagaacaggagtgagcaggcagggctggtagagtttataaagggggaactccttccatgg

SEQ ID NO: 275800 - DNA, 5546 bp, Homo sapiens
ggatgaggagggggaaaccgggggaaaagagggaaaagagccgggagagaggtgggcaaggacgagggcgagggcacggccgggtcctggctggccaaacgaggctcgcggaagcagcagccgccgcctgaccgcagctggattttgaagattgatccaagggactgtattaatttcaggaattgatttgaaagacactggctctgccacttaacagccatgtaaccttggatatggaagaaagtagcagtgttgccatgttggtgccagatattggggaacaggaagctatactgactgctgaaagtatcatcagtccttcattggaaattgatgaacaaagaaaaactaaaccagatccattaatccatgttatccagaagttaagcaagatagtggaaaatgaaaagtcacaaaaatgtcttttaattgggaagaaacgcccacgttcaagtgctgcaacacactctcttgaaacccaagaactttgtgagattccggctaaagtaatccagtcacctgctgctgatactagaagggctgagatgtcacaaacaaattttacccctgacactcttgcccagaatgaagggaaggctatgtcttatcagtgtagcctttgtaagtttctatcatcatccttttccgtgttaaaagatcatattaagcaacatggtcagcaaaatgaagtgatactgatgtgctcagagtgccatattacatctagaagccaggaggaacttgaagcccacgtggtgaatgaccatgacaatgatgccaatatccacacccaatccaaagcccaacagtgcgtaagcccctccagctctttgtgtcggaaaaccacagaaagaaatgaaaccattccagatatcccagtaagtgtggacaatctacagactcatactgtccaaactgcatctgtggcagaaatgggtaggaggaaatggtatgcatacgaacagtacggcatgtatcgatgcttgttttgtagttatacttgtggccagcagagaatgttgaaaacacacgcttggaaacatgctggggaggttgattgctcctatccaatctttgaaaatgaaaatgaacccctaggcctgctggattcttcagcagctgctgcgcctggtggggtcgatgcagtcgtcattgctattggagagagtgaactgagtatccacaatgggccatcagtgcaagtgcagatttgcagctcagaacagttatcatcttcatctcctttagaacagagtgcagaaagaggagtacacctaagtcagtcagttaccctggaccccaatgaggaagaaatgctagaagtgatttctgatgcagaggagaatctgattcctgatagcctgcttacatcagcacagaaaatcatcagcagcagccccaataaaaaagggcatgttaacgtgatagtggagcgattgccaagtgctgaagaaaccctttcacagaagcgcttcctcatgaacactgaaatggaagaagggaaggacctgagcctgacagaagctcagattgggcgcgaaggaatggatgatgtttatcgtgctgataaatgtactgttgatattgggggattgatcataggctggagcagttcagagaaaaaagacgagttaatgaataaaggcctggctactgatgagaatgccccaccaggccggagaaggacaaattctgagtctcttcgattacactcattagctgcagaagcccttgtcacaatgcctataagagctgcagagttgacaagagccaacctggggcactatggagatataaaccttttagatccagatactagtcaaaggcaagtagatagtacattggcagcgtactcaaaaatgatgtcgccacttaaaaactcttcagatggattaactagtcttaaccaaagcaactccaccttggtagcactcccagagggtaggcaggaattgtcagatgggcaggttaagacaggcatcagcatgtccttactcaccgtcattgaaaaattgagagaaaggacagaccaaaacgcttcagacgatgacattttgaaagagttgcaggacaacgcccagtgccaacccaacagcgatacaagtttgtccggaaacaatgtggtggaatacatcccgaatgctgaacgaccctaccgttgccgcctgtgtcactacacaagtggcaacaagggctacatcaagcagcacttacgagtccatcgacagagacagccttatcagtgtcctatctgcgagcacatagcggacaacagcaaagatttggagagtcacatgatccaccactgtaagacaagaatataccagtgcaagcagtgtgaagaatccttccattataagagtcaattgaggaaccatgagagagaacagcacagtcttccagataccttgtcaatagcaacttctaatgagccaagaatttccagtgatacagctgatggaaaatgtgtccaggaaggtatctatgtattttgttatgcaggctgcagtgacttgcacatgacataaaagtgcccttagttgtcatggttggttattttcagggcaaaagcctatattctcctccatttttgtaccatggatgtgagtgaatctgatctctgtttctgaggaaatgccaagtactgaatgaagcagatgattactaggtcctaggtgagaagccctagatagtaaggattcatcttcagttgaaacttaagagccccttagaaggtgatgtaccagcaagccagaaaagcaagccagaaaagctacaacatggaaaacaggcctcccctccctctctcggcaccagttgacctactgagaacagagcttttgcagatggtaggcccccaccccaaactttaactggggctccccgctgtgatcttattcttacccaagtatgactgccagatttcatctgcattattaaaaaaaaaaaagcacacacacagacacacaagatctttttatgtactagttaagtagcagtcaaccgagtttctggtaataagaatattagaatcaaaagatttaattagagctccatgaaaaggcggatgccacatccggagaattaaggataaagtgtactaagctgtgccgctttggttcagctcacttaaattgatatactttaaatgtctccagtgtggcacataatgtttatgggagataagacatattggggtgactttcccttttagatttgctaagaattaaagttagaaacgactacagagtgaaatgttttaccataatgtttcattaaattataccccagaaagcataactgattctagaatgcttctgaaagaactgattttgacaccactgtagcaccaaaattctcatgtcaaacagatgtcatccctgtaaaactctctgaaacaaaaggagtttatgatatagcatctgtttttgcagtagatggctgagctaaaacagttttgtttcctttttacaaaatagccctaaatgcctccttttattttaattcattatgtttccatatcccctttaaaggagacattaaaacgtctgatatgattggaccataaatccctaatgaaaggatgaagtaaatactactcagtagcaccacctgcagttaatatcagtgttggaagatgtcttttttagcacggtcctaaaaagcaaacatttcaaactgtccaaatgagttaacattaaaattcacaattttaataaaaagattaaagtgtcagctcaaaattaaaataaccacttcagactttacagtattaatgaatgtttactagattttatgttgcagcatcttttctttgtggctcatgctttttttttagggttacatgcatggatttttaaattgcctgccatgcctcttttcctccacctggctccatttgcttttttctctcagtactgtagcagttcaaatggctgcatacttatacctggatgggtactttattaactcaatattagatattttgaaatctggttgtcaggccaaagaaaaaatttttagctcacaaataaggtaataataattcatgctttgttaaaacttctttacctatttagtaaacttgttaaacaagaagagagatttgtgcctctgtgatcctcagtctctgccattcagatagcacagataccttagggcatgtttcagcttaacatttgcttggccaaaaggcatggcctgcctgtcttgagctagatactgtgttaggtgctgggagtacagtgaaaggcatcactgcccttcaggaatccaactcagtgaagaagacagaacgaggctgatgggtatgtcagcagataccgcaggagctcaaatagagccgcaagcaaagccctttcgtatggtgttactccatgaaacctaattaaattgttttttattggaaacctataatttgccaagcgctggggattcagtctaaacaaaacaagcagatccttatcctcagggaatagacagcttagtggcagggcagagattttacccagacatgcaggtaaagtacagactttgctaaaggaaaaatataggacttattaaactatgctgtgaggttctagcatttccaatttgtagatgagaaaactgagacttcaagaggcaaaataatttacccatgatcatactggtagaaagtggcagagcgaggactaagcccaagtttttgaactttaaatccaatattctttccattggaaacagttgcttgaagtagcacaggctctcattctgtgctatattaagtttttccatctgtcagttttattagttgtcattgatctgtaatatttctcacacaaaaccattatccaatatttcacacttcattttttagggtttttttaaaactgtatttggaacagtgccatttataatcaagtccaagtttttaacctaccaattaagagcaatacttagattataattatgattagtgtgtatattaacgttatagatttataccaggaaattaggacattttgttctgcttggcagtagttattagcaaaagaaaatttcaattttagaaaccgtaaatttaacttaaggattttctttgttgaaatttcagtgtgggttttcctttgtataataccacggattttacttttatgcggtgtatacaggtgttctacctaagctttcttcctgccaagagacacacagttcttcctgctctgcctttttcatgagcttccatgcttgctttgtttctgaatataaagcagagtgtgaatagcctgtggactgtatgctgacagacaagtacatgaagcgttgaatatcttcaagaaatcgttttatatgatcaagtcactcaactcgtgttgacataagcttaccccaacttgaattactcagccctgttgttgcagagtgagtttagtaacatggctacttttcgttggatccatgtctcctgcgtttcggagagctgcatattcatgtcagtcataacctttgtccctgtaacctgtcagttaactagaaagaattatacattgcatagcacttaaaaattt

SEQ ID NO: 275801 - DNA, 614 bp, Homo sapiens
gtttccagagctattttttcctaacttctgcaaaatcctcaagtcggcttgttagataaattatttaaatttgcattacgtaatagggttgcatgaacattcctctgaatttctttttacatggaatattgagaaatttttcactgccaaaaaaaaaatcattactttgtttcaccaagaaagagaaatgttttgatactatatactttcgttcttggccacagctggattttgaagattgatccaagggactgtattaatttcaggaattgatttgaaagacactggctctgccacttaacagccatgtaaccttgggtaagtcacttaaaccacactgagtgtttccttatttataagcctgtataacacccacctagcctgtcctaaagagttatgaggatcagataccactaacatgtttgatagagcctagctgtaaggagctgttactcttttcagtattgatattttgtacatttttattctcattgagaattaagatgaaaattggtgtattagagaaagcatggttttagagtgagattggcctggattcctgttcttaaaccagttaccactttgtgtctgtgagtctcaggtttctcatctgc

SEQ ID NO: 275802 - DNA, 2552 bp, Homo sapiens
ggatgaggagggggaaaccgggggaaaagagggaaaagagccgggagagaggtgggcaaggacgagggcgagggcacggccgggtcctggctggccaaacgaggctcgcggaagcagcagccgccgcctgaccgcagctggattttgaagattgatccaagggactgtattaatttcaggaattgatttgaaagacactggctctgccacttaacagccatgtaaccttggatatggaagaaagtagcagtgttgccatgttggtgccagatattggggaacaggaagctatactgactgctgaaagtatcatcagtccttcattggaaattgatgaacaaagaaaaactaaaccagatccattaatccatgttatccagaagttaagcaagatagtggaaaatgaaaagtcacaaaaatgtcttttaattgggaagaaacgcccacgttcaagtgctgcaacacactctcttgaaacccaagaactttgtgagattccggctaaagtaatccagtcacctgctgctgatactagaagggctgagatgtcacaaacaaattttacccctgacactcttgcccagaatgaagggaaggctatgtcttatcagtgtagcctttgtaagtttctatcatcatccttttccgtgttaaaagatcatattaagcaacatggtcagcaaaatgaagtgatactgatgtgctcagagtgccatattacatctagaagccaggaggaacttgaagcccacgtggtgaatgaccatgacaatgatgccaatatccacacccaatccaaagcccaacagtgcgtaagcccctccagctctttgtgtcggaaaaccacagaaagaaatgaaaccattccagatatcccagtaagtgtggacaatctacagactcatactgtccaaactgcatctgtggcagaaatgggtaggaggaaatggtatgcatacgaacagtacggcatgtatcgatgcttgttttgtagttatacttgtggccagcagagaatgttgaaaacacacgcttggaaacatgctggggaggttgattgctcctatccaatctttgaaaatgaaaatgaacccctaggcctgctggattcttcagcagctgctgcgcctggtggggtcgatgcagtcgtcattgctattggagagagtgaactgagtatccacaatgggccatcagtgcaagtgcagatttgcagctcagaacagttatcatcttcatctcctttagaacagagtgcagaaagaggagtacacctaagtcagtcagttaccctggaccccaatgaggaagaaatgctagaagtgatttctgatgcagaggagaatctgattcctgatagcctgcttacatcagcacagaaaatcatcagcagcagccccaataaaaaagggcatgttaacgtgatagtggagcgattgccaagtgctgaagaaaccctttcacagaagcgcttcctcatgaacactgaaatggaagaagggaaggacctgagcctgacagaagctcagattgggcgcgaaggaatggatgatgtttatcgtgctgataaatgtactgttgatattgggggattgatcataggctggagcagttcagagaaaaaagacgagttaatgaataaaggcctggctactgatgagaatgccccaccaggccggagaaggacaaattctgagtctcttcgattacactcattagctgcagaagcccttgtcacaatgcctataagagctgcagagttgacaagagccaacctggggcactatggagatataaaccttttagatccagatactagtcaaaggcaagtagatagtacattggcagcgtactcaaaaatgatgtcgccacttaaaaactcttcagatggattaactagtcttaaccaaagcaactccaccttggtagcactcccagagggtaggcaggaattgtcagatgggcaggttaagacaggcatcagcatgtccttactcaccgtcattgaaaaattgagagaaaggacagaccaaaacgcttcagacgatgacattttgaaagagttgcaggacaacgcccagtgccaacccaacagcgatacaagtttgtccggaaacaatgtggtggaatacatcccgaatgctgaacgaccctaccgttgccgcctgtgtcactacacaagtggcaacaagggctacatcaagcagcacttacgagtccatcgacagagacagccttatcagtgtcctatctgcgagcacatagcggacaacagcaaagatttggagagtcacatgatccaccactgtaagacaagaatataccagtgcaagcagtgtgaagaatccttccattataagagtcaattgaggaaccatgagagagaacagcacagtcttccagataccttgtcaatagcaacttctaatgagccaagaatttccagtgatacacttacgtgaacggttcgggcaggtacaagtatttgtatgcagctgagtgatgaatgatagcccatgcagagtggactaaggagaaccacacatagccag

SEQ ID NO: 275803 - DNA, 2591 bp, Homo sapiens
ggatgaggagggggaaaccgggggaaaagagggaaaagagccgggagagaggtgggcaaggacgagggcgagggcacggccgggtcctggctggccaaacgaggctcgcggaagcagcagccgccgcctgaccgcagctggattttgaagattgatccaagggactgtattaatttcaggaattgatttgaaagacactggctctgccacttaacagccatgtaaccttggatatggaagaaagtagcagtgttgccatgttggtgccagatattggggaacaggaagctatactgactgctgaaagtatcatcagtccttcattggaaattgatgaacaaagaaaaactaaaccagatccattaatccatgttatccagaagttaagcaagatagtggaaaatgaaaagtcacaaaaatgtcttttaattgggaagaaacgcccacgttcaagtgctgcaacacactctcttgaaacccaagaactttgtgagattccggctaaagtaatccagtcacctgctgctgatactagaagggctgagatgtcacaaacaaattttacccctgacactcttgcccagaatgaagggaaggctatgtcttatcagtgtagcctttgtaagtttctatcatcatccttttccgtgttaaaagatcatattaagcaacatggtcagcaaaatgaagtgatactgatgtgctcagagtgccatattacatctagaagccaggaggaacttgaagcccacgtggtgaatgaccatgacaatgatgccaatatccacacccaatccaaagcccaacagtgcgtaagcccctccagctctttgtgtcggaaaaccacagaaagaaatgaaaccattccagatatcccagtaagtgtggacaatctacagactcatactgtccaaactgcatctgtggcagaaatgggtaggaggaaatggtatgcatacgaacagtacggcatgtatcgatgcttgttttgtagttatacttgtggccagcagagaatgttgaaaacacacgcttggaaacatgctggggaggttgattgctcctatccaatctttgaaaatgaaaatgaacccctaggcctgctggattcttcagcagctgctgcgcctggtggggtcgatgcagtcgtcattgctattggagagagtgaactgagtatccacaatgggccatcagtgcaagtgcagatttgcagctcagaacagttatcatcttcatctcctttagaacagagtgcagaaagaggagtacacctaagtcagtcagttaccctggaccccaatgaggaagaaatgctagaagtgatttctgatgcagaggagaatctgattcctgatagcctgcttacatcagcacagaaaatcatcagcagcagccccaataaaaaagggcatgttaacgtgatagtggagcgattgccaagtgctgaagaaaccctttcacagaagcgcttcctcatgaacactgaaatggaagaagggaaggacctgagcctgacagaagctcagattgggcgcgaaggaatggatgatgtttatcgtgctgataaatgtactgttgatattgggggattgatcataggctggagcagttcagagaaaaaagacgagttaatgaataaaggcctggctactgatgagaatgccccaccaggccggagaaggacaaattctgagtctcttcgattacactcattagctgcagaagcccttgtcacaatgcctataagagctgcagagttgacaagagccaacctggggcactatggagatataaaccttttagatccagatactagtcaaaggcaagtagatagtacattggcagcgtactcaaaaatgatgtcgccacttaaaaactcttcagatggattaactagtcttaaccaaagcaactccaccttggtagcactcccagagggtaggcaggaattgtcagatgggcaggttaagacaggcatcagcatgtccttactcaccgtcattgaaaaattgagagaaaggacagaccaaaacgcttcagacgatgacattttgaaagagttgcaggacaacgcccagtgccaacccaacagcgatacaagtttgtccggaaacaatgtggtggaatacatcccgaatgctgaacgaccctaccgttgccgcctgtgtcactacacaagtggcaacaagggctacatcaagcagcacttacgagtccatcgacagagacagccttatcagtgtcctatctgcgagcacatagcggacaacagcaaagatttggagagtcacatgatccaccactgtaagacaagaatataccagtgcaagcagtgtgaagaatccttccattataagagtcaattgaggaaccatgagagagaacagcacagtcttccagataccttgtcaatagcaacttctaatgagccaagaatttccagtgatacagctgatggaaaatgtgtccaggaagggaataagtcttcagtccagaaacaatatagatgtgatgtgtgtgattatacaagtacaacatatgttggtgtcagaaaccacaggcgaatccataactctgataagccgtac

SEQ ID NO: 275804 - DNA, 758 bp, Homo sapiens
ctctaataagcacaccaagggattctggtgaacagactaatttggggaactgcttaggtccacattattttgtaaaggaatgattgaagaacctttttctgaatttttaaaaataagacaccaatttttttattgtagtaaaatatatgtaatatagaacttaccattttcaccatttttaaatatacaattcaatggtattaagtacaaccatcaccacgcatttccagaactttttcatcatcctaaactgaaaccgtacccattaaacaataactcctcattccctgctcctttccctcccaggccctggtaacctctataacactttctgtccctctgaatttgcctgttctaggtccctcatataagtgaagagataattgatttttaacaaaagcttaattgctttcttgcctggaggcatgggtcggagtgaaggggagcaaacattaattggtgtcttgacctgacaagtcaaggtcacattcggatttactggatttatctcaagcaatagaaaactgtgtttttaaactttggttccatggaatcatacagactccttttattctaattgtttttatcatgacctgtgtgttcacctatgaaattattcatttgaaattgttactgactagttggtgatattcaatctgattttctcatgaaaattaataagtatgtttctgaaaatctcctctcaattatgtcattctaaacaatttctgcaatgttaaggcccagcagaaaaaaaa

SEQ ID NO: 275805 - DNA, 418 bp, Homo sapiens
agaatatcacatagtattaggttggcgcaaaagtgattatggtttttgccattactgcagttacttttgcacctaagattcagtttgttgaagagattaattcacattttttgggtatgctaattatagataattcttatccttaaaacagtttcactaaaaagttctaaataatactgttttactgcctgattcagcatatgcttgaaaattatactgtacttcttaccagccctgaatttgtgctggccgtattttcctaattgggcctgattggtaaggttttcttctgtatggtcttattttttcatcagtattgtactggtgtgggattatgggttaatgtcaggtaggagagaaatgttgaagagagaatttttgtaacaggagaactcaaggttcttctaattcagatttg

SEQ ID NO: 275806 - DNA, 420 bp, Homo sapiens
actgttataggaggctggaaaaatggtgacctgggtgatgtagtggtgaacacttggtaaactgttgctgtaatttagaagatagaaaatgtacctaatgaatcttggacttgggcaagatggtttccaggcagaaggataaagtgtgagctctttcattttagctgcatatataataaggtactatacaaaagcgatgtgctcagagaaaaaccaatacagtgtaaataccatgcctctttcaaatactctgggaaagaaaaaactgaaaaagagattaagcaaatccctttggcaataagttaatcgttgaaacttcatgatgggtactgcaaatggagcctcataataccatttgttctttttgtgtattttcataattaatttttttcatgattaaaagaaaatccttcctccaca

SEQ ID NO: 275807 - DNA, 427 bp, Homo sapiens
tgtgctgcaggcaaatctgcttcctacactcacttcccaaatacctctggaggcatccaatacttcattcaaacgcactcaaggcgaagcgctcaaaccgtcactgaacatttctctggcaggttgccagtacttcattcttcttgttaatggtgacagagaaaattacacaaagcatccaggatgctgatatgccacttgcttcacagtttacttcaaagtcccctcagagttttccgaattttactttctggaacaaagaatattattggcataagcatcaagtatgcagttaatagtgagcaatttctgaatttttgagtcagaagcaatctgtcagcaagtaatagccaaaggccctgtagtaataggcttagttggcccaggcttatttctctaattcactgattctcttgcatcaaaacag

SEQ ID NO: 275808 - DNA, 380 bp, Homo sapiens
taggtatccatttgccagataaattccttgtgaggtagtgagttccctgttttggaaagggtgtgttcgcagagaccccttatcagaacagttgtaaaggtgggctttaccctgagaaacacattgggttttggcactccctcactccaaaacctcccatggctccctactgcctacaggacacatctggtcctcctgacagcccacaggccctgcgcagtctgacactgtcccttccttccaatgtccccctcaccccagccacgctggcctcttcactgaccctccccacggaagccaattccctgccgcagcgcatcggaccttgctatatcctctctagaatatcactccttgctcatccccaggtgtggatgggg

SEQ ID NO: 275809 - DNA, 134 bp, Homo sapiens
tcagagcaaacttaccaactgtcctaaatgcttctcctggatgctatccccaaaggatgtacttaataactaacttctgaaaaatgaaaataaaagcagtcatgaaggacaggagttttccctgtttttgcatt

SEQ ID NO: 275810 - DNA, 573 bp, Homo sapiens
aaaagaaaaaaaaaaaacagtctttgagtactatgttcaatttactaaaaatatctagaaaactaaagtgttcccaagggcaaatctttggtgtgacagatgtggaatgatatccacaagctgaagggtctgtcttggaaaagcattctgcagctgcttcaacaagagtactgggtgtcatttataattcatgcaagtatattgaagctttctgctgtcgtccaagaaagatggttttcaaagctacagagtgcaataatccaatattccttgtagagagtcccatatatctcatatagattttacactggagatcatttccatgctgatgacctcaagaatacaatgtgatattttcagaaaacacagatttatgctatgtgctatttctgtgggcttgggggacaaccattagatcattaagttgaaggtatatttctagtcagacttaatccacattgcagtggtcactacaaaaaaaatgtgtatctaaatgcctcaagaacttcagtttttgtgttcaacatattttgcagtggaaaatgagtttgatgatcagagtgtactcctata

SEQ ID NO: 275811 - DNA, 1306 bp, Homo sapiens
aggcgacattgactacagcaccgtgctcctcggcatgctggtgacgcaggacgtgcagctcgggctcttcatggccgtcatgccgactctcatacaggcgggcgccagtacatcttctaggtcacggagctgctggacgtctccatggagctgggctgtttcctggctggagcgctcgtctcctctcagggccccgtggtcaccgaggagatcgccacctccatcgaacccatccgcgacttcctggccatcgttttcttcgcctccatagggctccacgtgttccccacgtttgtggcgtacgagctcacggtgctggtgttcctcaccttgtcagtggtggtgatgaagtttctcctggcggcgctggtcctgtctctcattctgccgaggagcagccagtacatcaagtggatcgtctctgcggggcttgcccaggtcagcgagttttcctttgtcctggggagccgggcgcgaagagcgggcgtcatctctcgggaggtgtacctccttatactgagtgtgaccacgctcagcctcttgctcgccccggtgctgtggagagctgcaatcacgaggtgtgtgcccagaccggagagacggtccagcctctgatggctcggagatgatggaccgtggaagggaagcgtctgtggggagtgagcgcttagatggccagcagctgctccttctgggaagctcgcaccttggcaacagaacagccctctagcagagcgtcagtgcagtcgtgttatcccggcttttacagaatattcttgtcctattttagaattttccggagtagtttatttgcagtctgttgattatgtgcagtagacccgggacactgcgttttaccgatcaccttgaatgtggtgcctggatgtgccttttttttttttccctgaaattattattaattttctattgtgagtttatcagttcatagtttttttagtaaagaagcaaaattaaaaggcttttaaaaatgtacaacttcagaattataatctgttggtcaaatatttgttattaaacatttctgtaatatgaagttgtaatcctggccgtgagcttggaagcttacttttgattcttaaagcctatgttttctaaaatgagacaaatacggatgtctatttgccttttattgtaacttttaaatgaaataatttcatgtcaatttctattagatatatcacttaaaatatttggttttaaatcacaagaatatgtattctttaataaagataatttatgatcatggtataattaattgaaatttattaaaatctgtttttattaa

SEQ ID NO: 275812 - DNA, 1505 bp, Homo sapiens
aggcgacattgactacagcaccgtgctcctcggcatgctggtgacgcaggacgtgcagctcgggctcttcatggccgtcatgccgactctcatacaggcgggcgccagtacatcttctagcattgtcgtggaagttctccgaatcctggttttgattggtcagattcttttttcactagcggcggtttttcttttatgtcttgttataaagaagtatctcattggaccctattatcggaagctgcacatggaaagcaaggggaacaaagaaatcctgatcttgggaatatctgcctttatcttcttaatgttaacggtagtcacggagctgctggacgtctccatggagctgggctgtttcctggctggagcgctcgtctcctctcagggccccgtggtcaccgaggagatcgccacctccatcgaacccatccgcgacttcctggccatcgttttcttcgcctccatagggctccacgtgttccccacgtttgtggcgtacgagctcacggtgctggtgttcctcaccttgtcagtggtggtgatgaagtttctcctggcggcgctggtcctgtctctcattctgccgaggagcagccagtacatcaagtggatcgtctctgcggggcttgcccaggtcagcgagttttcctttgtcctggggagccgggcgcgaagagcgggcgtcatctctcgggaggtgtacctccttatactgagtgtgaccacgctcagcctcttgctcgccccggtgctgtggagagctgcaatcacgaggtgtgtgcccagaccggagagacggtccagcctctgatggctcggagatgatggaccgtggaagggaagcgtctgtggggagtgagcgcttagatggccagcagctgctccttctgggaagctcgcaccttggcaacagaacagccctctagcagagcgtcagtgcagtcgtgttatcccggcttttacagaatattcttgtcctattttagaattttccggagtagtttatttgcagtctgttgattatgtgcagtagacccgggacactgcgttttaccgatcaccttgaatgtggtgcctggatgtgccttttttttttttccctgaaattattattaattttctattgtgagtttatcagttcatagtttttttagtaaagaagcaaaattaaaaggcttttaaaaatgtacaacttcagaattataatctgttggtcaaatatttgttattaaacatttctgtaatatgaagttgtaatcctggccgtgagcttggaagcttacttttgattcttaaagcctatgttttctaaaatgagacaaatacggatgtctatttgccttttattgtaacttttaaatgaaataatttcatgtcaatttctattagatatatcacttaaaatatttggttttaaatcacaagaatatgtattctttaataaagataatttatgatcatggtataattaattgaaatttattaaaatctgtttttattaa

SEQ ID NO: 275813 - DNA, 1062 bp, Homo sapiens
aggcgacattgactacagcaccgtgctcctcggcatgctggtgacgcaggacgtgcagctcgggctcttcatggccgtcatgccgactctcatacaggcgggcgccagtacatcttctagcattgtcgtggaagttctccgaatcctggttttgattggtcagattcttttttcactagcggcggtttttcttttatgtcttgttataaagaagtatctcattggaccctattatcggaagctgcacatggaaagcaaggggaacaaagaaatcctgatcttgggaatatctgcctttatcttcttaatgttaacggtaagctgcaatcacgaggtgtgtgcccagaccggagagacggtccagcctctgatggctcggagatgatggaccgtggaagggaagcgtctgtggggagtgagcgcttagatggccagcagctgctccttctgggaagctcgcaccttggcaacagaacagccctctagcagagcgtcagtgcagtcgtgttatcccggcttttacagaatattcttgtcctattttagaattttccggagtagtttatttgcagtctgttgattatgtgcagtagacccgggacactgcgttttaccgatcaccttgaatgtggtgcctggatgtgccttttttttttttccctgaaattattattaattttctattgtgagtttatcagttcatagtttttttagtaaagaagcaaaattaaaaggcttttaaaaatgtacaacttcagaattataatctgttggtcaaatatttgttattaaacatttctgtaatatgaagttgtaatcctggccgtgagcttggaagcttacttttgattcttaaagcctatgttttctaaaatgagacaaatacggatgtctatttgccttttattgtaacttttaaatgaaataatttcatgtcaatttctattagatatatcacttaaaatatttggttttaaatcacaagaatatgtattctttaataaagataatttatgatcatggtataattaattgaaatttattaaaatctgtttttattaa

SEQ ID NO: 275814 - DNA, 399 bp, Homo sapiens
attaatttccacaggggcctctctgtcccctggtccctctcatagtgcctggcccatagtaggtgcctaagaaatattaggtgtgctgaaagccttaggaacttgtaatttactagcactgaatatttatgactttgtggaaaactcaagacattagcctccttccctccttcctggagagagacagtaggaaaaatcaggtctattagctgatcccattaataacagtaaacatttgtgagccattgatctacactgtctcataaaattctcacatagctctgtgagtaactaccgctatcatcaccattttacagaagaggaaactgagactcaatttgttagtgaaagtgcccaaagttcacaacactaataaatattccagccaaaattaagacc

SEQ ID NO: 275815 - DNA, 333 bp, Homo sapiens
gagggagagcatcaggaaaaatagctaatgcatgctgggcttaatacttaggtgatggattgataggtgcagcaaaccaccatggcacacgtttacctatgtaacaaaaggcacatgtaccccagaacttaaaaaataccatgttccttcacactgcaggacctaagtacatgttgttcctttacctggagtatactgactttttaagcttagtttaattatctcctcctgctcaaagttcatataccccctcaatagtcatgttctaaagaaagcattctctatgggtcagtctctctattaagcattttagtggcaccacctccttcgtaa

SEQ ID NO: 275816 - DNA, 623 bp, Homo sapiens
tcattttacatggatgccgattgcgcctcactcatgttctccttaaacccatcctttttgtgcaaagctactgcttcctgatgtccataactcaaggcattttttttttcgcttggtgtagtttctgaaatgtgattatttaatgtttgccaagatgtttggaatagagtaactttcaactaatcaattgattgtgactttcttcttttgtagtttttgtttttaaaattgctttctgtcaaacccatctataattcccccagaatatatttatatggactaaggcttaccaaaaataaggaaaatcggagaaactgccaccgccaggaggagccaaggggacatgatgactaaatgtaatctggtttcatggaggggctacctagaaaaaagacattaagggaagactaaggaaacttgaataaagtatgggctctccttaataatagtgtaacaaattcattgtaacaaatgccccatactaacgtaagatgtgaataatcagggaaactggatgtgggacatatgggaactccactatcttcaaaatttttctgtaaatgtagaactgttctaaaacaataaagactataaaaaaataataaagactattagaaaaaaaa

SEQ ID NO: 275817 - DNA, 455 bp, Homo sapiens
ccttctctaaccttgtttgtaaatctaccaaacctcacctcaaacagtgttctccttaaacccatcctttttgtgcaaagctactgcttcctgatgtccataactcaaggcattttttttttcgcttggtgtagtttctgaaatgtgattatttaatgtttgccaagatgtttggaatagagtaactttcaactaatcaattgattgtgactttcttcttttgtagtttttgtttttaaaattgctttctgtcaaacccatctataattcccccagaatatatttatatggactaaggcttaccaaaaataaggaaaatcggagaaactgccaccgccaggaggagccaaggggacatgatgactaaatgtaatctggtttcatggaggggctacctagaaaaaagacattaagggaagactaaggaaacttgaataaagtatgggctctcctta

SEQ ID NO: 275818 - DNA, 689 bp, Homo sapiens
gggcgacaagagcaaaactccatctcaaaataaaataaaataaatcaggaacagtaagaactgccgttcattgagtgcttattacatgctgtcacattgctgagcagtttacacacgttgtctctattcatcctcctgcaaccctaacaggtgggacccctcttagcctcattttattgatgaggaaaccaaggctcggagaggttaaggaacttcctgcagctcacgtagttagaaactggcgaagctgattggatctaggcctgtgtgatcctgagcctacactcaggaccgttctgatcctgaccagtacttactgatttggggtctgagaagacagtaatgagcaagggcccccagagaagttttctgaccttcacaaagccctgctgagatcttgacctctgttcttaagaggtggatcttgcctcagttatgctcagccatttcattacacaggaagacctcattcttccttacattgcaatttattgttttttaaagaaactggccttgtattgtggaaataacattggaaaatggagattaaaatgggtaatggaaataacaatcagtaatggcttaagaacagaagcttgattggggaaaagtcttccgaatagaaagatgatcaagtgggaagaaaataaagtggaactttgagtttgaaatggctcactcatgcctgt

SEQ ID NO: 275819 - DNA, 249 bp, Homo sapiens
ctagaactgggaatataatgatgaaataggaagtcatagtctttgccctcaccaagcttccagcaggcaggtggaggagggagacagacaattccacagtaagtgcggataagggaattacagggtttcataggaatgtaaggatgggtacataagccagacctgctgaatcagggaaagcttcccagaggaaatggcatctaaactgagatctaaaagctgaagaggaattgggacaattaaaatagg

SEQ ID NO: 275820 - DNA, 254 bp, Homo sapiens
gcaatccacccgccttggcatcccaaaatgctgggattataggcatgaaccactgcgcctggccctcagcctcttaaaaagaggaatccgcctctgctgtcactcattatctaccccactgccaccccagatattccacagatggggagccagatgccggcgtgggccaaaggcctttccctttgacccccagcccccatcccacccacccaataaaacaaagaagcaaagagaaagaaacaacgctttcctac

SEQ ID NO: 275821 - DNA, 530 bp, Homo sapiens
tgggctgcaggtggctacagtcccatgattccatggatttcagacccctccaaagcacagggctcagtgcttatccaagtctgagggccccccataaccacatcttccccagcagatgttctttgcttcaggcagtcatcaaagttccacttcaaagagttgctaaccaaataagcccacaatcttccttttttgttgttttgaataagtaatgcctttacacatatgaaattaaaaagagaggccgggcatggtggctcacgcctgtaatcccagcactttgggagggcgaggtgggcagattgcccgaggtcaggagatcgagaccagccaggccaacgtggtgaaaccctgtctctgctaaaaatacaaaaatcagctgggcgtggtggtgggggcctgtaatcccagctacttgggaggccgaggtaggagaatcgcttcaacctgggaggcagaggttgcagtgagccaagattgcaccactgcactccagcctgggggacagtgtgacagactgtctcaaaaaa

SEQ ID NO: 275822 - DNA, 204 bp, Homo sapiens
gcatgtgtgtaggcagcggatacaagaaatcaccaggtcacttggactgtcacttccctccccccaaccaaactgaaactctttaaatcaaatacctcatgaattctccatgtgacaggctccaacaatttattcaggttcttctcgaggaaagctggtcattccctacttttgctaacacctttcgctggcctacagcacatg

SEQ ID NO: 275823 - DNA, 444 bp, Homo sapiens
ttaccagtgactccaaaatctcttatttgcagcctaaacttctttccagaactccaggtatgaaagtctaatggcttaatatttctgcctagatacttagtaggcatttcaaagtgaacatagagatgtgtcaaagttaacatagtcaagagaataatcttgattccatctttactcctgttccacatcctgttcctcaaaattattttacccaattttatctcagcaaatggtactgtgcttacctagatgctcaagccaaaatataattttcatccttcattcctctttattcctatttcatcatatccaatccatgagagagtcttgtcaactttatccctcaaacatatcccaaatctgtccactgctctcatatctataatagtcccttactgaaggcactgtcatcaagccctgtttcctggactcctgcaatagcat

SEQ ID NO: 275824 - DNA, 428 bp, Homo sapiens
tcagcttctttccttccttctttcctctctccctaccccctctcttttcctccttttttccttcctccttcattctcatcccttcctccttttttggtccctccctctatctctctgtcctcctttctcctcttccttctttctgtctctctgtaatactacttcatagatggtgttttgtacttctatcaggaagatcataatgtctttctctcttcttgaaagcttagcagtcattaatattcagtaactagattaatttattgggattgaaaaatgatattttaattcaaacattccttcatttattagttagaatacttctattttttggttatccagtggtattgtatgaataggaaaggcaggataaaatatttgaatcttttttttcaatgaacatttataaactcataaacttaaacata

SEQ ID NO: 275825 - DNA, 379 bp, Homo sapiens
tgttaacaaataggtacagggattgataacattaaaaaatatatatacttccttatagagggaaaaacaatcagaatagatagaatcttttagatcaattttacacaaagaataccaaaaaatttaacaacaaaaatgatctcattcaagaggattcagttcacatcctttcctagggtcaaccaaatgactaatgtcaaatccccaaagcacataggtaaaaaaatcttttctccaaaaagaacaaagacatagaatttcaatttcgaaaaatttcctattttctacttttcaataaagttttactgttacatttaacttcccagcagcacagtagagaagtaaacacattctcatgtagaatatgaaacttaaaaat

SEQ ID NO: 275826 - DNA, 217 bp, Homo sapiens
agctggaacacagggggcaagggaggaaagttacacaagataaggctggatgaggaaggtagaggtgagaccatgcaaagcctgaggtcatggtaaggagtttggtcttcattctttgaataataccaagagatagcaggattttaatctaggggtgtagggttataggggtgtaggtgtgtgtgtgtgtgtgtgtgtgtctgtgcgtgcgtgcacg

SEQ ID NO: 275827 - DNA, 2498 bp, Homo sapiens
ataggaggacagtgtgggactttcccaattctacctgaccaaaaaatgagaaattaattttatgataggagaagagatttaaaaaaatgatagaagaggatggaagccaggcacagtggctcacgcctgtaatcccagcactctggaagtacaggcacatactaccaagcccagttcgttattttaagtttttgtagagacaggggtcttactatgttgcccagactggtcttgaactcctgtcaagtgagcctcccacctcagcctcccaaagtgctatgattacaggtgtgagcctccatgcttggatgagatgttgtttttaatgtttttggttttttggttttgttgttttgtttttttgagacagggtctcactctgtggcccaggctggagtgcagtggcaccataatggctcactgcagcctcgacctcccaaggctcaggtgatcctcttgcctcagccaccccttccccggccaccaagtagctgggactatgggcttgtgccaccatgcctggctaatttttttatttttagtagagatggggttttaccacgttggccaggctagtgtccaactcctgacctccaaacggctaatttttgtatttttagtagagacagggttttgccacattgcccaggctggtgttgaactcctgggctcaaatgatccacctgccttggcctcccaaagtgctgggattacaggcgtgagccactgcacccggccctttgtagtgtttttaactaaagaatttgtagagttgcccaggccaggaagcctggtggctctaaagggtaatagaccttgtcagtaacagataaggagtggtaagaggacattactcatattgaagatgaagaccagactttgctgcttcacaggccatgcgctgggttgggccacttcagctccactccattcgttttcctttcctaacttgacaatcagctcactcaccctcccttagtgcctccagtgcctactcctgtcactccaatgtcaacccattgggagttgaggcctgtcactccaatgtcaacccgtgggctgttactttgcgtcatatgatgctgtgagaggccttgctggaatgtcctagggaatccctagtagcagtggctattagtcttctagaaaagaactattgctgctgccttgtgcacatgccccaccttctgggcaagtgggcagcattgcgctcatgaggggctttgcattcttagccaagggcaataaactgggtgggtgatctggcccaaacttgcccctaggctctgctagccctgaatcagcaggcttcagagacgagggtgggtgttataaaagccagtctgtaaagggtaaattccaaatcttgtgccttgttataccaatccttcctgattcccgtttaaaccaactactctatttctgtgctgcctacattttcaatcctcccaagcattagcaaattcctgaaatttcctcatttggtaggccttccataggagtcagctatggacttccataggagttggcagctaaaaccagactgtgagcttctgtctccgttctgatttttgctgcacctcccaggggacagtccccacatgattacaaaagccaggtgccctcatcacccgttacccctgacctgtccacttgttttgaataaaccttcattctccaagcagatccccaaacttccttgtccttgttacacgtctacctcacaacctcacaattcaacaacaggtaaatacctggattcactgatttctttactgtccttctctgagggttgggaaggtgggggctagaaaaggctcataatttttaaactcttgggaattaaacttgggaatttctattcctacagtgttttctctgggatttttagctcactgatcgccctagaatagtgtgaactctccagataggtcctgctgtgataggccaggggagtaggctgtgcagtgacggcttagggtaataagtaatggttggaggacaccagcataggagcagagtttagaacttaagaggacaagaaagctgctcagtggctggcgtatagctgtgaaggtaaccaaacaccaaagagggagtctgtcatttttataaggctggaagcgaatgttccttttctaccttaacatacagtttagggggttgcaccaagacaaagtttccaggctggagggtaatacatatccagcgcgagtgaagtccccactccaacatataccctttttgggtgggtaaacacctctttgcatgtggacagaaaatgtttatacttaaacagacatattttgcatatttttatctggagacttcttctagttttatactcttcccacatctatgccaatgccaccattctaaaacttacactccttttctacccctggtcttttccttgtccttccctacaacttggtagaggtccattttgtcttacttcacacttttttttttttaaataaaacacaaaagtctaaatc

SEQ ID NO: 275828 - DNA, 2043 bp, Homo sapiens
tgagacggagtctcgctctgtcgcccaggctggagtgcagtggcgtgatcttggctcactgaaacctccatctcctgggttcaagcagttctcctgcctcagcctcctgagtagctgggattacaggtgcctgccaccatgcctggctaatttttgtatttttagtagagacagggttttgccacattgcccaggctggtgttgaactcctgggctcaaatgatccacctgccttggcctcccaaagtgctgggattacaggcgtgagccactgcacccggccctttgtagtgtttttaactaaagaatttgtagagttgcccaggccaggaagcctggtggctctaaagggtaatagaccttgtcagtaacagataaggagtggtaagaggacattactcatattgaagatgaagaccagactttgctgcttcacaggccatgcgctgggttgggccacttcagctccactccattcgttttcctttcctaacttgacaatcagctcactcaccctcccttagtgcctccagtgcctactcctgtcactccaatgtcaacccattgggagttgaggcctgtcactccaatgtcaacccgtgggctgttactttgcgtcatatgatgctgtgagaggccttgctggaatgtcctagggaatccctagtagcagtggctattagtcttctagaaaagaactattgctgctgccttgtgcacatgccccaccttctgggcaagtgggcagcattgcgctcatgaggggctttgcattcttagccaagggcaataaactgggtgggtgatctggcccaaacttgcccctaggctctgctagccctgaatcagcaggcttcagagacgagggtgggtgttataaaagccagtctgtaaagggtaaattccaaatcttgtgccttgttataccaatccttcctgattcccgtttaaaccaactactctatttctgtgctgcctacattttcaatcctcccaagcattagcaaattcctgaaatttcctcatttggtaggccttccataggagtcagctatggacttccataggagttggcagctaaaaccagactgtgagcttctgtctccgttctgatttttgctgcacctcccaggggacagtccccacatgattacaaaagccaggtgccctcatcacccgttacccctgacctgtccacttgttttgaataaaccttcattctccaagcagatccccaaacttccttgtccttgttacacgtctacctcacaacctcacaattcaacaacaggtaaatacctggattcactgatttctttactgtccttctctgagggttgggaaggtgggggctagaaaaggctcataatttttaaactcttgggaattaaacttgggaatttctattcctacagtgttttctctgggatttttagctcactgatcgccctagaatagtgtgaactctccagataggtcctgctgtgataggccaggggagtaggctgtgcagtgacggcttagggtaataagtaatggttggaggacaccagcataggagcagagtttagaacttaagaggacaagaaagctgctcagtggctggcgtatagctgtgaaggtaaccaaacaccaaagagggagtctgtcatttttataaggctggaagcgaatgttccttttctaccttaacatacagtttagggggttgcaccaagacaaagtttccaggctggagggtaatacatatccagcgcgagtgaagtccccactccaacatataccctttttgggtgggtaaacacctctttgcatgtggacagaaaatgtttatacttaaacagacatattttgcatatttttatctggagacttcttctagttttatactcttcccacatctatgccaatgccaccattctaaaacttacactccttttctacccctggtcttttccttgtccttccctacaacttggtagaggtccattttgtcttacttcacacttttttttttttaaataaaacacaaaagtctaaatc

SEQ ID NO: 275829 - DNA, 2418 bp, Homo sapiens
ataggaggacagtgtgggactttcccaattctacctgaccaaaaaatgagaaattaattttatgataggagaagagatttaaaaaaatgatagaagaggatggaagccaggcacagtggctcacgcctgtaatcccagcactctggaagtacaggcacatactaccaagcccagttcgttattttaagtttttgtagagacaggggtcttactatgttgcccagactggtcttgaactcctgtcaagtgagcctcccacctcagcctcccaaagtgctatgattacaggtgtgagcctccatgcttggatgagatgttgtttttaatgtttttggttttttggttttgttgttttgtttttttgagacagggtctcactctgtggcccaggctggagtgcagtggcaccataatggctcactgcagcctcgacctcccaaggctcaggtgatcctcttgcctcagccaccccttccccggccaccaagtagctgggactatgggcttgtgccaccatgcctggctaatttttttatttttagtagagatggggttttaccacgttggccaggctagtgtccaactcctgacctccaaacggctaatttttgtatttttagtagagacagggttttgccacattgcccaggctggtgttgaactcctgggctcaaatgatccacctgccttggcctcccaaagtgctgggattacaggcgtgagccactgcacccggccctttgtagtgtttttaactaaagaatttgtagagttgcccaggccaggaagcctggtggctctaaagggtaatagaccttgtcagtaacagataaggagtggtaagaggacattactcatattgaagatgaagaccagactttgctgcttcacaggccatgcgctgggttgggccacttcagctccactccattcgttttcctttcctaacttgacaatcagctcactcaccctcccttagtgcctccagtgcctactcctgtcactccaatgtcaacccattgggagttgaggcctgtcactccaatgtcaacccgtgggctgttactttgcgtcatatgatgctgtgagaggccttgctggaatgtcctagggaatccctagtagcagtggctattagtcttctagaaaagaactattgctgctgccttgtgcacatgccccaccttctgggcaagtgggcagcattgcgctcatgaggggctttgcattcttagccaagggcaataaactgggtgggtgatctggcccaaacttgcccctaggctctgctagccctgaatcagcaggcttcagagacgagggtgggtgttataaaagccagtctgtaaagggtaaattccaaatcttgtgccttgttataccaatccttcctgattcccgtttaaaccaactactctatttctgtgctgcctacattttcaatcctcccaagcattagcaaattcctgaaatttcctcatttggtaggccttccataggagtcagctatggacttccataggagttggcagctaaaaccagactgtgagcttctgtctccgttctgatttttgctgcacctcccaggggacagtccccacatgattacaaaagccaggtgccctcatcacccgttacccctgacctgtccacttgttttgaataaaccttcattctccaagcagatccccaaacttccttgtccttgttacacgtctacctcacaacctcacaattcaacaacaggtaaatacctggattcactgatttctttactgtccttctctgagggttgggaaggtgggggctagaaaaggctcataatttttaaactcttgggaattaaacttgggaatttctattcctacagtgttttctctgggatttttagctcactgatcgccctagaatagtgtgaactctccagataggtcctgctgtgataggccaggggagtaggctgtgcagtgacggcttagggtaataagtaatggttggaggacaccagcataggagcagagtttagaacttaagaggacaagaaagctgctcagtggctggcgtatagctgtgaaggtaaccaaacaccaaagagggagtctgtcatttttataaggctggaagcgaatgttccttttctaccttaacatacagtttagggggttgcaccaagacaaagtttccaggctggagggtaatacatatccagcgcgagtgaagtccccactccaacatataccctttttgggtgggtaaacacctctttgcatgtggacagaaaatgtttatacttaaacagacatattttgcatatttttatctggagacttcatcacagtgtttactacttattgacccacagtctacgccatattcgacgaccaggtatcaaaccgtacgctccgtttccttctcagc

SEQ ID NO: 275830 - DNA, 1172 bp, Homo sapiens
ccactcccctctcctctgcctcacagaactcctgattctgtcttctttctctctatatatatatattttaaaatgtttaaaccaactactctatttctgtgctgcctacattttcaatcctcccaagcattagcaaattcctgaaatttcctcatttggtaggccttccataggagtcagctatggacttccataggagttggcagctaaaaccagactgtgagcttctgtctccgttctgatttttgctgcacctcccaggggacagtccccacatgattacaaaagccaggtgccctcatcacccgttacccctgacctgtccacttgttttgaataaaccttcattctccaagcagatccccaaacttccttgtccttgttacacgtctacctcacaacctcacaattcaacaacaggtaaatacctggattcactgatttctttactgtccttctctgagggttgggaaggtgggggctagaaaaggctcataatttttaaactcttgggaattaaacttgggaatttctattcctacagtgttttctctgggatttttagctcactgatcgccctagaatagtgtgaactctccagataggtcctgctgtgataggccaggggagtaggctgtgcagtgacggcttagggtaataagtaatggttggaggacaccagcataggagcagagtttagaacttaagaggacaagaaagctgctcagtggctggcgtatagctgtgaaggtaaccaaacaccaaagagggagtctgtcatttttataaggctggaagcgaatgttccttttctaccttaacatacagtttagggggttgcaccaagacaaagtttccaggctggagggtaatacatatccagcgcgagtgaagtccccactccaacatataccctttttgggtgggtaaacacctctttgcatgtggacagaaaatgtttatacttaaacagacatattttgcatatttttatctggagacttcttctagttttatactcttcccacatctatgccaatgccaccattctaaaacttacactccttttctacccctggtcttttccttgtccttccctacaacttggtagaggtccattttgtcttacttcacacttttttttttttaaataaaacacaaaagtctaaatc

SEQ ID NO: 275831 - DNA, 1525 bp, Homo sapiens
  misc_feature (1460)..(1460): n is a, c, g, or t
  misc_feature (1516)..(1516): n is a, c, g, or t
  misc_feature (1523)..(1523): n is a, c, g, or t
ataggaggacagtgtgggactttcccaattctacctgaccaaaaaatgagaaattaattttatgataggagaagagatttaaaaaaatgatagaagaggatggaagccaggcacagtggctcacgcctgtaatcccagcactctggaagtacaggcacatactaccaagcccagttcgttattttaagtttttgtagagacaggggtcttactatgttgcccagactggtcttgaactcctgtcaagtgagcctcccacctcagcctcccaaagtgctatgattacaggtgtgagcctccatgcttggatgagatgttgtttttaatgtttttggttttttggttttgttgttttgtttttttgagacagggtctcactctgtggcccaggctggagtgcagtggcaccataatggctcactgcagcctcgacctcccaaggctcaggtgatcctcttgcctcagccaccccttccccggccaccaagtagctgggactatgggcttgtgccaccatgcctggctaatttttttatttttagtagagatggggttttaccacgttggccaggctagtgtccaactcctgacctccaaacggctaatttttgtatttttagtagagacagggttttgccacattgcccaggctggtgttgaactcctgggctcaaatgatccacctgccttggcctcccaaagtgctgggattacaggcgtgagccactgcacccggccctttgtagtgtttttaactaaagaatttgtagagttgcccaggccaggaagcctggtggctctaaagggtaatagaccttgtcagtaacagataaggagtggtaagaggacattactcatattgaagatgaagaccagactttgctgcttcacaggccatgcgctgggttgggccacttcagctccactccattcgttttcctttcctaacttgacaatcagctcactcaccctcccttagtgcctccagtgcctactcctgtcactccaatgtcaacccattgggagttgaggcctgtcactccaatgtcaacccgtgggctgttactttgcgtcatatgatgctgtgagaggccttgctggaatgtcctagggaatccctagtagcagtggctattagtcttctagaaaagaactattgctgctgccttgtgcacatgccccaccttctgggcaagtgggcagcattgcgctcatgaggggctttgcattcttagccaagggcaataaactgggtgggtgatctggcccaaacttgcccctaggctctgctagccctgaatcagcaggcttcagagacgagggtgggtgttataaaagccagtctgtaaagggtaaattccaaatcttgtgccttgttataccaatccttcctgattcccgtttaaaccaactactctatttctgtgctgcctacattttcaatcctccctcatccgctnatccatgccctcatccgcttatccaatgggggatcctggagattcccatagaggcngcctccngt

SEQ ID NO: 275832 - DNA, 189 bp, Homo sapiens
gcctttattttattttttagagatggtcttgctgtgtcacccaggctggagtgcagtgatgcagtcgtagtctactacagtcttgaattcctgggcccaagggttcttcccacctaagcctcccaagtagctggaagtacaggcacatactaccaagcccagttcgttattttaagtttttgtagagac

SEQ ID NO: 275833 - DNA, 1377 bp, Homo sapiens
gctgatcttgaactcctgcacctgcctcagcctcccaaagtgttgggattacaggtgtgagacactgcgcctggctatattttactatttggaaatcacaatgcatcttaaaattgatggcttcttgcaaccactttcaaccaggtgcctgtcatgatttagtgctagcatcaaggcaggttagttatgaagaaatagagtgtgtgtttatatactcacacagttagaaatcgacccttttaaaaattatttctttttgaaaataatgtcagttccatcagaactaatgcattgataactaaatgtctgtggttccttgtcataggtctacacctgacctctctattttgtgcacataggggattcgtaatatcactgttcagtcagtcattcaccatctagtgatcatcattctacatgattgcactttttcaaaggcataaaaagccaacagttgcactcttaataatcaactgtaacacaaagcagagtactttgggagttttaacaggatatattattggtaactggctattatgccactccctctgggtgccacatttgcctgttaaccaagaaatgtagacatggtgccttatcccaacatttctgaaattatatctcaaggaatcaccagtgcttactagtacttgacaatgaaggaggattttacagttaaagaagcttataaagtagcatctactaaatcccctcctaaggaacaagcaaaagcacctcaccagcttatcaaaagactaaagagaagtgaaaaaaaaaaaaagacggccgggcgcggtggctcatgcctgtaatcccagaactttgggaagccgaggcgggcggatcacgaggtcaggagatcaagaccatcctggctaacacggtgaaaccccgtctctactaaaaatagaaaaaattagccgggcgtggtggcgggcgcctgtggtcccagctactcggggaggctgaggcaggagaatggcgtgaacccgggaggcagagcttgcagtgagccgagattgcgccactgcactccagcctgggcgacagagcgagactccgtctcaaaaaaataaaaataaaaaaagactaaggagtattctagtgaagaaaatggttgaactttgtttaaactggtgtatggcaaacttcactgttgaaatacttattcccatgacctattatctttgtaggtgggtgaaattgcattgggaactgctgctataaccaaaagagaatttcagtcaccatgtctggttgttagctatgatggaatggcagcatcatggtctcagttatgagtgaaaatctttgttgtagctaagtagtggtgcctcctgagttttattaaatgccgtttcactatctttttctgca

SEQ ID NO: 275834 - DNA, 864 bp, Homo sapiens
cctcttggccgtcgggacttgtactgttggtgactccgtctccttagacggtggagcctgcgtgacccagaaaggccgcctcgggacccagaccaggatttccatcagctcccctggctcgcaggccttctgacttctgactcaccatcagctctcctggatccagcttgccaatggcagatcgtgggactccttgccctctaatcgcatgaaacaatgcccacaagagaaaataaaagcagtcagaggagaatggagaatttcccctattccccagcatgtggagccatggactctgccttctcccagtcaagatggggcaggtctcactatgttgcccattctggtcttgaactcttggactcaagcaatcctcccacctcggacttccaaagtgctggaatcacaggcttgagataccatgcccagccaatttattgtggttgattccagatcctggctactgtgcatagtgctgcagtcaacatgggagtgccgatatctcttcaatatactgatttccttttccttgggtatctacctaacaagatggtgagctccttagagggaagtatagtacatatttcctccatgtctccagtacccaacacagtgcctgacgttgagagggctcttaataagtgtttgtgaaagactggtagagcaatgccctatgaaacaagaagctggataacactgtaaggactcagaaggagagaggagtgtggtctacactgcacatctctgccaagctgggcacgggatttgaagttccacaccactgagccaaaacacatcaagacccctccccaacccggggatcggtggtaagcacacatcctattccagcagtgatggccccgg

SEQ ID NO: 275835 - DNA, 655 bp, Homo sapiens
tccccgttacctgcgggcggcggcgccgggcccggaggcctgctgctcctcctccttctcccgccaggctggggcggcgaggcggcggcggcggcggcccggggggagggggcggagcgcggctcgctgcctctctcctcccccgggaggctcaggggcccctatctcgggccgccgcgcctaggcccgtgagcagcctgtggtggggcatggcggcacagccaccggcgtgcccgcgaaaagggcacactagccagctgttttgccacgagagtacaccgaacaaaggagacagggttatttataacctgacacgtctaccctactgctgtgtgtggtttccattgcctggaataggacctgaaattctgtatttgtcccaactggctagcaacttagaactttctaaaagagacaaaagcagaggagaacaaaggaaggaggcagtaacttgtggaatgctgagaaaggcctcgggacccagaccaggatttccatcagctcccctggctcgcaggccttctgacttctgactcaccatcagctctcctggatccagcttgccaatggcagatcgtgggactccttgccctctaatcgcatgaaacaatgcccacagtatgtctcctattaaataaatatatatctaatctct

SEQ ID NO: 275836 - DNA, 331 bp, Homo sapiens
cctcttggccgtcgggacttgtactgttggtgactccgtctccttagacggtggagcctgcgtgacccagaaaggcctttttgtagggaggtcgaaatagaaacacttcagcccctcttcggcgagggaggttagttggtaaggtgcccattgttcacccatggaaacaggcctgccaagggccgccccgcagacagcacttgcctcggtgacctggcaggacgtgcggttcttgagatgagtggagaaacggactcccaggtccctctcgttcttccaacacagggacagctagagctgctccaaaaatataccctacttcttccacaac

SEQ ID NO: 275837 - DNA, 383 bp, Homo sapiens
ctgtgaggatgtttctggaagagattagcacttgaatcagtagattaagtagagatcaccctcaccaacatgggtgagtgtcattcaatccattgaggacctggatagaacaaaaaggtgaaggaagggtgcatttgttctctctgcttgaggtgggacatccatcttcttccaccctcagacagctgtgctcctgattctcaggcctcgggacccagaccaggatttccatcagctcccctggctcgcaggccttctgacttctgactcaccatcagctctcctggatccagcttgccaatggcagatcgtgggactccttgccctctaatcgcatgaaacaatgcccacagtatgtctcctattaaataaatatatatcta

SEQ ID NO: 275838 - DNA, 174 bp, Homo sapiens
acccagaccaggatttccatcagctcccctggctcgcaggccttctgacttctgactcaccatcagctctcctggatccagcttgccaatggcagatcgtgggactccttgccctctaatcgcatgaaacaatgcccacagtatgtctcctattaaataaatatatatctaatc

SEQ ID NO: 275839 - DNA, 869 bp, Homo sapiens
tccccgttacctgcgggcggcggcgccgggcccggaggcctgctgctcctcctccttctcccgccaggctggggcggcgaggcggcggcggcggcggcccggggggagggggcggagcgcggctcgctgcctctctcctcccccgggaggctcaggggcccctatctcgggccgccgcgcctaggcccgtgagcagcctgtggtggggcatggcggcacagccaccggcgtgcccgcgaaaagggcacactagccagctgttttgccacgagagtacaccgaacaaaggagacagggttatttataacctgacacgtctaccctactgctgtgtgtggtttccattgcctggaataggacctgaaattctgtatttgtcccaactggctagcaacttagaactttctaaaagagacaaaagcagaggagaacaaaggaaggaggcagtaacttgtggaatgctgagaaaggcctcgggacccagaccaggatttccatcagctcccctggctcgcaggccttctgacttctgactcaccatcagctctcctggatccagcttgccaatggcagatcgtgggactccttgccctctaatcgcatgaaacaatgcccacaagagaaaataaaagcagtcagaggagaatggagaatttcccctattccccagcatgtggagccatggactctgccttctcccagtcaagatggggcaggtctcactatgttgcccattctggtcttgaactcttggactcaagcaatcctcccacctcggacttccaaagtgctggaatcacaggcttgagataccatgcccagccaatttattgtggttaagtatatataatagaatttaccattttaag

SEQ ID NO: 275840 - DNA, 391 bp, Homo sapiens
agtcgccttgtcttagttcacaggcttgtattgcaggactggcttctgttatatagcagggctcacatactctctcctacagggatgtaggtggtattcagactagttccttttcctgctgattatactacaggatgtgggttatccagagcagagtgcattggtcgaagttgcaagagctctcagagagcttccataggtttggagacccatacgattcccacaggtgggccccttgagcctcagcaaccaggacagagggccactgccccacggccactttggcctccatctgtaacaaaatagtcaagtaaccctgttggatctagggagaagccctttcccaacactgggtgctagctttacccaacgttacccaacccacttcacc

SEQ ID NO: 275841 - DNA, 505 bp, Homo sapiens
ttcatattcaagagcttcgctttcctaaacaaatccttagcttctataccagactagccatttcttagaaatgggatcatcttgatttgcacagcaacctcaataagacctcaatagtccagcctcctcttcccaagtttcaggctttatttacgcgacttgggtgaggtatataggatgggcgtgccgtggctcacgcctgtaatcccagcactttgggaggctaaggcaggtggatcacttgaagttaggagtttgagaccagcctggccaacatgctgaaacccgtctctactaaaaatacaaaaattagctgggcgtggtggcaggcacctgtagtcccagctactcaggaggctgaggcaggagaattgcttgaacccggggagcaagagattgcagtgatcacaccactgcatttttctttttttaattttgggaaaagacacacataaatttatttatttgtttatttatcttaattgagacagggtcttgctccatc

SEQ ID NO: 275842 - DNA, 434 bp, Homo sapiens
ctgattatgcaggacaaaaacataattctccttatggatgttattgtcactgtgccacactgccataatggtagtgttcagaaaaaaatatggctgaaaattcatataacattcaaatgttgtagattcagaactatttcctttgtagacattttaatattcatgctgcttttagctcagtttttactgttctgctaaaggaatgcattggtctctccctctgcctcagtgtgatagcaggcccaatctaatgtttatagtcatagtgtagaattatgtatttaggagtttttggaggttattaatcatttccttcagagttctaattttctaattccatagcctgcttcagtccttatcttttccatatctttatagggtttgattaacctccgattctagaaacttggaccttgcagtctagtttttcttgt

SEQ ID NO: 275843 - DNA, 892 bp, Homo sapiens
agcgcgcgacctccggcgccattttgtagagaaacaagcggagttaaccgaagagggggtcgaggagagccggagtcggggacccaggagtttcctgtgtccagcgctgccggagccgcctgaggtgccatgtttcagaacagagtaagacccctggtaaagaagaactgaagatattatacagataccagatatagcctaattacaaagaaagcattaacctgcctctgaggtgactaaaggggaataatggtgattttgcgccgggctcggccgcctgcttccgccccaaccagcaatgaatcttgactcgctctcgctggccttgtctcaaatcagctacctggtggacaatttaaccaagaaaaattaccgagccagccagcaggaaatacagcatattgtgaatcggcacggtcctgaggcagacaggcatttattacgctgcctattttcgcatgtggatttcagtggcgatggtaaaagcagtggcaaagatttccatcagactcagtttctgattcaggagtgtgcgttgctgattacaaagccaaattttatctcgacgctgtcctatgccattgataatccattgcactatcagaagagtttaaagcctgcaccccacttatttgcccagctgagtaaagtgctcaaattaagcaaagtacaagaggtaatttttggccttgccctgttgaattcttccagctcagatcttagaggtttcgctgcccagtttatcaaacagaagcttccagatcttctgcgttcttacattgacgcagacgtcagtggaaatcaagaaggtggcttccaagatatagcaatagaggtcctacacctcctcctctcccatctcctctttgggcagaagggagcctttggagtt

SEQ ID NO: 275844 - DNA, 310 bp, Homo sapiens
agcgcgcgacctccggcgccattttgtagagaaacaagcggagttaaccgaagagggggtcgaggagagccggagtcggggacccaggagtttcctgtgtccagcgctgccggagccgcctgaggtgaccagcacccatgcagaaactacctagaagttgccaagctatcagtcaactcagcatacaaaaagaaacttaccattctaaggatcttagaagttgtatgccaggaaatgggatgaagaccaaatgtatatctcacaataaatattacagtaatgttgaagtaattatttgaaatataaaagt

SEQ ID NO: 275845 - DNA, 1162 bp, Homo sapiens
agcgcgcgacctccggcgccattttgtagagaaacaagcggagttaaccgaagagggggtcgaggagagccggagtcggggacccaggagtttcctgtgtccagcgctgccggagccgcctgagatggagtcttgctctgttgcccaggcttgagagcagtggtgtgatctcggctcactgcaacgtccgcctcccaggttcaagtgattctcctccctcagcctcccgagtagctgggattacaggcgcgtgccaccacggctgggtgaccagcacccatgcagaaactacctagaagttgccaagctatcagtcaactcagcatacaaaaagaaacttaccattctaaggatcttagaagttgtatgccaggaaatgggatgaagaccaaatgtgccatgtttcagaacagagtaagacccctggtaaagaagaactgaagatattatacagataccagatatagcctaattacaaagaaagcattaacctgcctctgaggtgactaaaggggaataatggtgattttgcgccgggctcggccgcctgcttccgccccaaccagcaatgaatcttgactcgctctcgctggccttgtctcaaatcagctacctggtggacaatttaaccaagaaaaattaccgagccagccagcaggaaatacagcatattgtgaatcggcacggtcctgaggcagacaggcatttattacgctgcctattttcgcatgtggatttcagtggcgatggtaaaagcagtggcaaagatttccatcagactcagtttctgattcaggagtgtgcgttgctgattacaaagccaaattttatctcgacgctgtcctatgccattgataatccattgcactatcagaagagtttaaagcctgcaccccacttatttgcccagctgagtaaagtgctcaaattaagcaaagtacaagaggtaatttttggccttgccctgttgaattcttccagctcagatcttagaggtttcgctgcccagtttatcaaacagaagcttccagatcttctgcgttcttacattgacgcagacgtcagtggaaatcaagaaggtggcttccaagatatagcaatagaggtcctacacctcctcctctcccatctcctctttgggcagaagggagcctttggagtt

SEQ ID NO: 275846 - DNA, 1005 bp, Homo sapiens
agaaacctggcatttcttatcaacagtggttgagctaccttactatctttttagagtcattagtaacattttaggtactaacacagagacgatggtagtttaaccctattctcttctaattattaatttgcaactagttgtgatcaattagttgtaaacaccactgcgcctggaccagcctcctttttccttttaatttaaaaatctggatttgtgtgtgtgtgtttttttaaacaggtgccatgtttcagaacagagtaagacccctggtaaagaagaactgaagatattatacagataccagatatagcctaattacaaagaaagcattaacctgcctctgaggtgactaaaggggaataatggtgattttgcgccgggctcggccgcctgcttccgccccaaccagcaatgaatcttgactcgctctcgctggccttgtctcaaatcagctacctggtggacaatttaaccaagaaaaattaccgagccagccagcaggaaatacagcatattgtgaatcggcacggtcctgaggcagacaggcatttattacgctgcctattttcgcatgtggatttcagtggcgatggtaaaagcagtggcaaagatttccatcagactcagtttctgattcaggagtgtgcgttgctgattacaaagccaaattttatctcgacgctgtcctatgccattgataatccattgcactatcagaagagtttaaagcctgcaccccacttatttgcccagctgagtaaagtgctcaaattaagcaaagtacaagaggtaatttttggccttgccctgttgaattcttccagctcagatcttagaggtttcgctgcccagtttatcaaacagaagcttccagatcttctgcgttcttacattgacgcagacgtcagtggaaatcaagaaggtggcttccaagatatagcaatagaggtcctacacctcctcctctcccatctcctctttgggcagaagggagcctttggagtt

SEQ ID NO: 275847 - DNA, 204 bp, Homo sapiens
tattttttgtatattaacagctttgtggaatctttaccacagtcaattttagaagattttcattgccacccaaaagaaagtccccatcccttagctataactccacaatctttgattctctctagcctgagacaactattgatctactttctgtctttatagagttgcatattccagacatttcacgtaaatgtaatcatgcat

SEQ ID NO: 275848 - DNA, 500 bp, Homo sapiens
acattctcatatcacacactcccttttctgtgcacttctaaagcagttattttcggaacctctttttgctcttaatcatgtagagacttttcattttcctaaatatatcatacctaaacaaataactcatagaggtactgtgggttatggtttgccatttgaaccatgcatcaaccttctggagaatcttttaaagtatatacatttttccagagtaaaattaatttttttctaaaacacgtgaagtagtttttattaatatattaatagttgtatatatttatgggatgcacgtgatattttgatttgtgcacatacaatgtgtaatgatcaaatcatggtaattgggatatgcatcacctcaaacatttatcatttctttgtgttgggaacattctaaatcttctagttattttgaaatatacaacaaattcttgttaactgtagttgccctactgtgttattgattagctataataaataagttctagtgttactga

SEQ ID NO: 275849 - DNA, 679 bp, Homo sapiens
tctctctctctctctctgtctctctctctctctatatatatataaaacttgaattcatactgatgtctccaaatgtaatccagtaccccagggatcattctagtctttccttattgcttatctctctccaagagtgagatcctgtctcctgccatatactagccatttacttagttattcaacccttgcatacagtttcataattattaacccatacttcccactttcacctatttgtaatgtttgtttatggcatctttcatcagacagatatttgaaatttaatatagtttaatcatcagtcttttcctttaagctcttgagttttatatcttacataagaaagctttctcacccaccactaccaccagattataaaaatattttagtttcattttatatttaaatattaaatctatctagattttatttggggttatataaaatgcaaatataaccttttttttcaaatggctatctgaagatcctaagtgcttattattatcagtcaacccattcctcactgctttgcaatacatgggtctgtttctagactctatattctactggtctatttctgtgccaatttgagatcattataatttatgtaaccttaaaatatgttctgatatttaatagagaaagtctctactattgatctttttcaaaaatgaaaaaa

SEQ ID NO: 275850 - DNA, 187 bp, Homo sapiens
acaagtatgtctgtgttcaccactcctgttttacatagtattgtaaattctagccactggaattagtcaagaaaaagaaaatgcatacaggttgcaaaggcagaaataaagctgtcttgttttgcaggtgacatgattgttatgtagaaaatctcaaggaaatgacaaataaatttcctagaacctg

SEQ ID NO: 275851 - DNA, 458 bp, Homo sapiens
acagtatgagcaggcgtcgtagccaaatgaagttggatctaacaacagccgcccagctttaggacttccaaattacactaaacctttcactttgtttgttcatgaatgtaataatcaggaacacggtgctaaacataggaccactgcatactatagcctgcaattaggcccagtctctaaggcatatcctaattgtttaaaagcagtagcagcagccaagctggtagaagcttcatcagatctggttttaggaaatgaacttaatttgcaagtcccacacgctgtggaaagtctattaaattccaatcaaacccagcatttttcagtgagtagactaacatcttatgaattacttctcctatctccttcttatcttcatctaaaaggctgtaatctacttaatgctgctactctgttatctctgcctgatgatggtgaagaccacaacagtgatgaga

SEQ ID NO: 275852 - DNA, 313 bp, Homo sapiens
ctctccaatggcaggagagttgtactcagtgatttaccccccagggcctaggagcaattcctgacacctggaagatgctcactaaatatttgttgaatgactaagtgaactataggtaaaaatactgactttagtgattgttatgtggtggcatttgttccctctctgagcccacctaggatatgaactatatgggcttcagggtctgagttttgtgattcaggaaactgaaagtggaaggtgttagaagattgtagcctctgctcctgtggggttcttggaagtaagactctccctgggcacccgtgacttg

SEQ ID NO: 275853 - DNA, 342 bp, Homo sapiens
tgaacaaataaacttattgttccatctttcctaccgtatccttctccatagcacttaccacctcacatgccgaattttttgcttgtttgtcttatattcctacgtgcaaacttgtccaacccatagcccgcaggctgcatgcaccccaggatggctttgaatggggcacaacacaaatttgtaaactttcttaaaacattgtgagatttatgtgagatttatgcatggacctttttttttttttttttttagcccatcagctattgttagtgttggtgtattttatgtgtggcccaagacaattcttcgtctttcattatggcccagggaagccaaaagatt

SEQ ID NO: 275854 - DNA, 698 bp, Homo sapiens
ggcccgttccaatggcaactctgccaaggcgcctatgagagcctcttggcttttacctggtctgcgagaaatcaaactttgggcacaagtcatgaagccgacaagcccgggagacacagtgtcagaattacaaggaacactacaaggcctgttagagaagaaagggtagaatcccgagaatgttttccccacagtgctgataaggagagaccactatcccatctactgctacagctctggagacagagctctcccacctgtcatatagaacacaaggaccaatctgcagagaaagagcatccaaacctgatccagtggacactggggaaaaactcaccacagctgagtgtggaaaaacaaggccaacacacacatctctgcacagatacatctcccataaagaaactaaagtgttaatttacagggcactgttgcagacccacttcagctggaagctaggaacatggacaaggagcctctctaccaccaagggagagagaggaatgtgctcttgtcctggcattgcatccacaggaggggcaggaaattctttgaaggtcagtaaccccataccccaattaacagtgcttaagtgtgaggctccctcagaacatcagagatatcctcactccctcacccctgccaccaggctaagaagcatggagcaaaaaaaaaaaaaaaaaaaacagaacaaaaca

SEQ ID NO: 275855 - DNA, 739 bp, Homo sapiens
ggcccgttccaatggcaactctgccaaggcgcctatgagagcctcttggcttttacctggtctgcgagaaatcaaactttgggcacaagtcatgaagccgacaagcccgggagacacagtgtcagaattacaaggtgagatcagccgcccggccaagctatcttctcgctagcaggaacactacaaggcctgttagagaagaaagggtagaatcccgagaatgttttccccacagtgctgataaggagagaccactatcccatctactgctacagctctggagacagagctctcccacctgtcatatagaacacaaggaccaatctgcagagaaagagcatccaaacctgatccagtggacactggggaaaaactcaccacagctgagtgtggaaaaacaaggccaacacacacatctctgcacagatacatctcccataaagaaactaaagtgttaatttacagggcactgttgcagacccacttcagctggaagctaggaacatggacaaggagcctctctaccaccaagggagagagaggaatgtgctcttgtcctggcattgcatccacaggaggggcaggaaattctttgaaggtcagtaaccccataccccaattaacagtgcttaagtgtgaggctccctcagaacatcagagatatcctcactccctcacccctgccaccaggctaagaagcatggagcaaaaaaaaaaaaaaaaaaaacagaacaaaaca

SEQ ID NO: 275856 - DNA, 1085 bp, Homo sapiens
ggcccgttccaatggcaactctgccaaggcgcctatgagagcctcttggcttttacctggtctgcgagaaatcaaactttgggcacaagtcatgaagccgacaagcccgggagacacagtgtcagaattacaaggaacactacaaggcctgttagagaagaaagggtagaatcccgagaatgttttccccacagtgctgataaggagagaccactatcccatctactgctacagctctggagacagagctctcccacctgtcatatagaacacaaggaccaatctgcagagaaagagcatccaaacctgatccagtggacactggggaaaaactcaccacagctgagtgtggaaaaacaaggccaacacacacatctctgcacagatacatctcccataaagaaactaaagtgttaatttacagggcactgttgcagacccacttcagctggaagctaggaacatggacaaggagcctctctaccaccaagggagagagaggaatgtgctcttgtcctggcattgcatccacaggaggggcaggaaattctttgaaggtcccgcatctggggctcgatctcgtgcagaggagcatttccgaagacactggccgctcccacaatggctccgaagaccccagcgaccagcgggttcatgagtttgttggggctgtccactcggtaccagctgcgcagggatgtcaggacaaagaaacaagttgcctggttccagccctgcttcagcacggggcctgtggggccccggtaagtcccggtgttcccgcacaatctcctaaccctgtggaagaatcccctgtacttggatttggagaggtctggccatggattaacttcaccttgatggtctccatgggacataggaccaccacggcctcggccacgctagctcactggccgcaccgctgcccgccttgctgttcaccagtccctgggcatcccgcatctggttgctgaggaacgcctgacgccgccttgtggatgaagccgcagagcagggagctgaggctgcggcccaggcccaggctgccttggctgcgactgtgtgcctgcaggccccatgcccgg

SEQ ID NO: 275857 - DNA, 703 bp, Homo sapiens
ggcccgttccaatggcaactctgccaaggcgcctatgagagcctcttggcttttacctggtctgcgagaaatcaaactttgggcacaagtcatgaagccgacaagcccgggagacacagtgtcagaattacaaggtgagatcagccgcccggccaagctatcttctcgctagcaggtcccgcatctggggctcgatctcgtgcagaggagcatttccgaagacactggccgctcccacaatggctccgaagaccccagcgaccagcgggttcatgagtttgttggggctgtccactcggtaccagctgcgcagggatgtcaggacaaagaaacaagttgcctggttccagccctgcttcagcacggggcctgtggggccccggtaagtcccggtgttcccgcacaatctcctaaccctgtggaagaatcccctgtacttggatttggagaggtctggccatggattaacttcaccttgatggtctccatgggacataggaccaccacggcctcggccacgctagctcactggccgcaccgctgcccgccttgctgttcaccagtccctgggcatcccgcatctggttgctgaggaacgcctgacgccgccttgtggatgaagccgcagagcagggagctgaggctgcggcccaggcccaggctgccttggctgcgactgtgtgcctgcaggccccatgcccgg

SEQ ID NO: 275858 - DNA, 529 bp, Homo sapiens
ggaccctcttaattctgccatcagtgcagctcttccagatagagctttggagccaaacccttctgatgatccaagggcaagcacagtcttcttgcaaaaatctcaaacagatggtgagacgacactgttttttccaccaagaagacgactgaaaactctctgtcataatgagtgtattatagaaagcatttagagaaacttacattggtttaaaattttcaacttttcatatattcacttgtcctattttaatgtgtgaaatacttctctttagttgttactgtgtgagtgaaaacatgtaaactttctgtttatacattttgctaccttttggcaacaccatttgtcatgtgatttaagagtagtcatagatttatctttattcataattttttattcatattttttgtctttcgccctttttcccttgctccaaagagttcattttaatgatgaatgatagaatttaggcttcagcttgatctttatttaaacaaataaaaaaaccatttgttcatcaatggggatt

SEQ ID NO: 275859 - DNA, 895 bp, Homo sapiens
agaccacagggaagacatggcacaatgggacagatggatgtgatggccacaatgcacagaccaggccacagagctcgagggatatgggaaggggccttttggcatttctgcactggaatcatgtgagacaagggtggccgggtgctctggaggtgctggggtggtcccctcacggcccctctgagcttactctgtcttccacactttgttgagcagcttcctcacctcatcatagatgataaacactatggccacatgcaggcagacccggcccaggcaggcaatagtgcccttgtagaaggtcttgtgcccttccctcaggatttgcagccacagtcccatgtgttctgcatttgtgcacctccaggtcccgcatctggggctcgatctcgtgcagaggagcatttccgaagacactggccgctcccacaatggctccgaagaccccagcgaccagcgggttcatgagtttgttggggctgtccactcggtaccagctgcgcagggatgtcaggacaaagaaacaagttgcctggttccagccctgcttcagcacggggcctgtggggccccggtaagtcccggtgttcccgcacaatctcctaaccctgtggaagaatcccctgtacttggatttggagaggtctggccatggattaacttcaccttgatggtctccatgggacataggaccaccacggcctcggccacgctagctcactggccgcaccgctgcccgccttgctgttcaccagtccctgggcatcccgcatctggttgctgaggaacgcctgacgccgccttgtggatgaagccgcagagcagggagctgaggctgcggcccaggcccaggctgccttggctgcgactgtgtgcctgcaggccccatgcccgg

SEQ ID NO: 275860 - DNA, 1126 bp, Homo sapiens
ggcccgttccaatggcaactctgccaaggcgcctatgagagcctcttggcttttacctggtctgcgagaaatcaaactttgggcacaagtcatgaagccgacaagcccgggagacacagtgtcagaattacaaggtgagatcagccgcccggccaagctatcttctcgctagcaggaacactacaaggcctgttagagaagaaagggtagaatcccgagaatgttttccccacagtgctgataaggagagaccactatcccatctactgctacagctctggagacagagctctcccacctgtcatatagaacacaaggaccaatctgcagagaaagagcatccaaacctgatccagtggacactggggaaaaactcaccacagctgagtgtggaaaaacaaggccaacacacacatctctgcacagatacatctcccataaagaaactaaagtgttaatttacagggcactgttgcagacccacttcagctggaagctaggaacatggacaaggagcctctctaccaccaagggagagagaggaatgtgctcttgtcctggcattgcatccacaggaggggcaggaaattctttgaaggtcccgcatctggggctcgatctcgtgcagaggagcatttccgaagacactggccgctcccacaatggctccgaagaccccagcgaccagcgggttcatgagtttgttggggctgtccactcggtaccagctgcgcagggatgtcaggacaaagaaacaagttgcctggttccagccctgcttcagcacggggcctgtggggccccggtaagtcccggtgttcccgcacaatctcctaaccctgtggaagaatcccctgtacttggatttggagaggtctggccatggattaacttcaccttgatggtctccatgggacataggaccaccacggcctcggccacgctagctcactggccgcaccgctgcccgccttgctgttcaccagtccctgggcatcccgcatctggttgctgaggaacgcctgacgccgccttgtggatgaagccgcagagcagggagctgaggctgcggcccaggcccaggctgccttggctgcgactgtgtgcctgcaggccccatgcccgg

SEQ ID NO: 275861 - DNA, 938 bp, Homo sapiens
ggcccgttccaatggcaactctgccaaggcgcctatgagagcctcttggcttttacctggtctgcgagaaatcaaactttgggcacaagtcatgaagccgacaagcccgggagacacagtgtcagaattacaaggtgagatcagccgcccggccaagctatcttctcgctagcagatgaagctgctttggtggaaggtgctaaaaagctgggctttgtacagtgagaacaccatattcggtcatcatagaagcaatagagctttggagccaaacccttctgatgatccaagggcaagcacagtcttcttgcaaaaatctcaaacagatggtatctactaagcattttactaaaaagtacagctcgtgttcaaccatatacctagatgacagcacagccagccagcctcatcttacaatcatagtaaaatcgaatgagcttgaaagacagtttttgcagctaattgactataacgtcgaagtttctggaagtgtttatgccaagtactattttgatcttcgatccttggcaaaggacaatagcttgcattttccagtttatcttctcaacaaagaaagggcacagaacctggaagctatttcaaggatggaagacgccaaaatcttttatagtgaaggtccttcagcgctgataatttcattaatcttcagcgctctaaagccattaactcttgaaggaagaaatgaggggctatatcatgtgaacccctcatcaaaaaagttcggaaaatattacctctcatgctcaacaactagaaaagttagtattttcaaaagaagaaaaatctcaaagttgagaggcttgtgggcaactaggattgcactccacaggaaaaaaatgggatcgttgcagtgcaacaactctcgtacactcttctgtctttttaaacgtaaacaggtataaaaactactccaaagt

SEQ ID NO: 275862 - DNA, 175 bp, Homo sapiens
gaaatactatcttcacaatttgaaagtctcagtattctaaacatatagcctgactgaaagaaatgttctgtcccgctgggcgtgttgcctcacgcctgtaatcctagcacttttggaggccaaggcggacggatcacctgaggtcgggagttcgagaccagcctgaccaacacag

SEQ ID NO: 275863 - DNA, 290 bp, Homo sapiens
agactgataataaaggtggatgcgaccatggattctacataatggggattgctgaagtaatattccactggtttggatgttccaatactttgtctagcctggacaacaaagcaagactctgtcccaaaaaaacatttttaaaaattttttgcatacatatagtaaagtgtactctttatgatgtttagttctatgggttttgacagatgcatagagtcagatatataccccacagtaccatactgaacagttctatcaccctaaaaaatcccttatagtggcccctttgt

SEQ ID NO: 275864 - DNA, 134 bp, Homo sapiens
cacacagttatttagaatatagaccaacaagatatttttcagggaggaatactttatcacaatattgttcagaattaccagcacatggtgataataaaaaaacttggctttttattgttgtaaaatgtacataa

SEQ ID NO: 275865 - DNA, 377 bp, Homo sapiens
agttgtcaaggatgaagccccactttctggcttgaagtataggtggtgctattcctagaggaagaccagaggagagaagcaacaggcttagccctatcaagattggcatgcctatgggatatcagagtggagatgtggagtaggatgttggatccatggatgtatagctcaggagaaagttcaaaaatggagatacagatttgataaccatggttatgggtaagatcaccgagagagtgtatagaagacaggaggacctacaatagcaccaaaaaacacaaacaagaaagaagcagaggaagacaatgccacaaaagagactacggagggaaaaacagtaggagaaaaaattagaaagtgggccgggtgcgatggct

SEQ ID NO: 275866 - DNA, 432 bp, Homo sapiens
tgtgccctaaacgaagggggcctcaagttacgacttctcaaggcagtgacatcttcctcaattggtatgagtagctgccaggcaacaagtacgtataagagtgtcccatattctggctgctgtgatggctcatgcctgtagtcccagctacttgggagcctgaggcaggaggtttgcttgagcccaggagtttgaggctgcagtgagctatgatcccaccactgcactccagcctgtgcaacagagtgagaccctgtctcttaaaaatatataaaaataaacaagtcccaaattctcaaaatcactggatcacatcagtcctttttatactctgtatttgtgtgggagtaaaaatatgagatcatgttgggatgttcacatcgtaagcaagactgaattgtcaagtagattgcggctcactcatttatttct

SEQ ID NO: 275867 - DNA, 517 bp, Homo sapiens
cgatatccaggggaaaagctttccaaataaaggaaatagatgtccaacaactctgagatgagatcaatactggtatattcagggagcagcaagaggcccatgtggccagtacactatgaagagtattaggagataaaaagaggaaaatagagaatcatcagggaactggattatggagcaccttggaggttatgagaaaccatgaaggctttgagctttggcatgacaggataacttacatttttattttttttttagaatgacacaacctactagaatgaaaatagagtgaaggtaggctagtcctgaaataaggaaactgattagaaggcattgcaataatcaaggataaagatggtgccttggaccagggcagtggtggtggtgacaggtaatcaaagattgggtctaatttgaagaaacctcaatcaaatcctactgaagttaattagatttgcaagactattgtgtttttgagagaatgagaaaaatcacatagcttcagtctcttcacctt

SEQ ID NO: 275868 - DNA, 501 bp, Homo sapiens
gctgaaagtcaactgataatatatgcaaggctttgtttctgggctctctattgtattacattttatttcctgtcatgccagtatcacattgttttttattgtagctttgtattaagttttgaaatcaggaagtgtgagtcctccaactttgttctttttcaagattgttttggctatttggggtcacttgccattccatatgaagttcaggatagtcctttttttctttttttctttgaagcaggatctcactctgtcacccaggctggagtgccatggcacaaactcagctcactgcagcttcgacctcatgggctcaagcgacccttccatctcagcttcctgagtagctgggactacaggttcgtggcaccacgcccagttaagggtttttctatatgtacaaaaaacaccattaagattttgataggtattgaatctgtagataactttgggtagtattgtcaccttaacaatatgaagtcttcccatccatgaaca

SEQ ID NO: 275869 - DNA, 3313 bp, Homo sapiens
accggggggcggggggccggggtgagcgctaagatggccgccccggctcgggctgttttcagatgcttcaagtgttgtgaacagagacttgtttggattatgcatttctcagctagactaaataaatgctagcaatggatacgtgcaaacatgttgggcagctgcagcttgctcaagaccattccagcctcaaccctcagaaatggcactgtgtggactgcaacacgaccgagtccatttgggcttgccttagctgctcccatgttgcctgtggaagatatattgaagagcatgcactcaagcactttcaagaaagcagtcatcctgttgcattggaggtgaatgagatgtacgttttttgttacctttgtgatgattatgttctgaatgataacgcaactggagacctgaagttactacgacgtacattaagtgccatcaaaagtcaaaattatcactgcacaactcgtagtgggaggtttttacggtccatgggtacaggtgatgattcttatttcttacatgacggtgcccaatctctgcttcaaagtgaagatcaactgtatactgctctttggcacaggagaaggatactaatgggtaaaatctttcgaacatggtttgaacaatcacccattggaagaaaaaagcaagaagaaccatttcaggaaaaaatagtagtaaaaagagaagtaaagaaaagacggcaggaattggagtatcaagttaaagcagaattggaaagtatgcctccaagaaagagtttacgtttacaagggctcgctcagtcgaccataatagaaatagtttctgttcaggtgccagcacaaacgccagcatcaccagcaaaagataaagtactctctacctcagaaaatgaaatatctcaaaaagtcagtgactcctcagttaaacgaaggccaatagtaactcctggtgtaacaggattgagaaatttgggaaatacttgctatatgaattctgttcttcaggtgttgagtcatttacttatttttcgacaatgttttttaaagcttgatctgaaccaatggctggctatgactgctagcgagaagacaagatcttgtaagcatccaccagtcacagatacagtagtatatcaaatgaatgaatgtcaggaaaaagatacaggttttgtttgctccagacaatcaagtctgtcatcaggactaagtggtggagcatcaaaaggtagaaagatggaacttattcagccaaaggagccaacttcacagtacatttctctttgtcatgaattgcatactttgttccaagtcatgtggtctggaaagtgggcgttggtctcaccatttgctatgctacactcagtgtggagactcattcctgcctttcgtggttacgcccaacaagacgctcaggaatttctttgtgaacttttagataaaatacaacgtgaattagagacaactggtaccagtttaccagctcttatccccacttctcaaaggaaactcatcaaacaagttctgaatgttgtaaataacatttttcatggacaacttcttagtcaggttacatgtcttgcatgtgacaacaaatcaaataccatagaacctttctgggacttgtcattggagtttccagaaaggtatcaatgcagtggaaaagatattgcttcccagccatgtctggttactgaaatgttggccaaatttacagaaactgaagctttagaaggaaaaatctacgtatgtgaccagtgtaactcaaagcgtagaaggttttcctccaaaccagttgtactcacagaagcccagaaacaacttatgatatgccacctacctcaggttctcagactgcacctcaaacgattcaggtggtcaggacgtaataaccgagagaagattggtgttcatgttggctttgaggaaatcttaaacatggagccctattgctgcagggagaccctgaaatccctcagaccagaatgctttatctatgacttgtccgcggtggtgatgcaccatgggaaaggatttggctcagggcactacactgcctactgctataattctgaaggagggttctgggtacactgcaatgattccaaactaagcatgtgcactatggatgaagtatgcaaggctcaagcttatatcttgttttatacccaacgagttactgagaatggacattctaaacttttgcctccagagctcctgttggggagccaacatcccaatgaagacgctgatacctcgtctaatgaaatccttagctgatccaaagacaatggggttttcttcctgtgatttatatatatactttttaaaagactgatgtaccattttaaacttcattttttcttgtgaatcagtgtatactacatttatacattttatatctaacaattttttttttttacaaagtataaatgtatatatcaactgaaggtaactacttttttcatatttggagttttaaacttttggtgtttacctcagactgatgttacctcttttatatttttatgtcttaattggctcggatgatgaacttgtgcaatcttctaccaacaaagttcaagtggcatcattttatatacatgtatctttttcaggtattttctatacaaattcttaatagatggaaaattagactctactttggtcactaatagtctttcatttgtatattgaagttaccttgccccttggagttattgaagtgacatgtcaaggtatcacctaaatattcttcagtcacactcactggtatttctgaggctttgtgtgttaacaggccttgtaattgacattattttggttaatgtaaccccaaaattgctttagtaattgctctttggcatagtcaaactataaatgaaaatggcagctttacaaatagtatatttaagtgaactctggaactatggacatgaaaaaaatgatggctgggatttatgatttttgtctggcagcaaacaggtttgtccagaagtctaataattaagcagtcataaaaagtctgaatttagtaaaccagtgtatgatgttattcaaatagtttaccttgggtatgagttcattttataatgtctgatgacattagatctcttaaaactttatgtattttttttagttcaaaggaatagagtcttgaagagaaaaaattatagggcagaaaagataagtgttcaaaattggcaactggactattattatgtctagcatctcattctaaataactaaagcttgatttactcttgctaggattatgtgactactaggtaggagcctcttaaaacactggccctgagcattaaaaaaaa

SEQ ID NO: 275870 - DNA, 410 bp, Homo sapiens
tactactactaaattcgcggccgcgtcgacggctgggatttatgatttttgtctggcagcaaacaggtttgtccagaagtctaataattaagcagtcataaaaagtctgaatttagtaaaccagtgtatgatgttattcaaatagtttaccttgggtatgagttcattttataatgtctgatgacattagatctcttaaaactttatgtattttttttagttcaaaggaatagagtcttgaagagaaaaaattatagggcagaaaagataagtgttcaaaattggcaactggactattattatgtctagcatctcattctaaataactaaagcttgatttactcttgctaggattatgtgactactaggtaggagcctcttaaaacactggccctgagcattaaaaaaaa

SEQ ID NO: 275871 - DNA, 3367 bp, Homo sapiens
accggggggcggggggccggggtgagcgctaagatggccgccccggctcgggctgccaactgtcaagtctgttcggcctcagagtatgttatagagccatgaattaaagttttcagatgcttcaagtgttgtgaacagagacttgtttggattatgcatttctcagctagactaaataaatgctagcaatggatacgtgcaaacatgttgggcagctgcagcttgctcaagaccattccagcctcaaccctcagaaatggcactgtgtggactgcaacacgaccgagtccatttgggcttgccttagctgctcccatgttgcctgtggaagatatattgaagagcatgcactcaagcactttcaagaaagcagtcatcctgttgcattggaggtgaatgagatgtacgttttttgttacctttgtgatgattatgttctgaatgataacgcaactggagacctgaagttactacgacgtacattaagtgccatcaaaagtcaaaattatcactgcacaactcgtagtgggaggtttttacggtccatgggtacaggtgatgattcttatttcttacatgacggtgcccaatctctgcttcaaagtgaagatcaactgtatactgctctttggcacaggagaaggatactaatgggtaaaatctttcgaacatggtttgaacaatcacccattggaagaaaaaagcaagaagaaccatttcaggaaaaaatagtagtaaaaagagaagtaaagaaaagacggcaggaattggagtatcaagttaaagcagaattggaaagtatgcctccaagaaagagtttacgtttacaagggctcgctcagtcgaccataatagaaatagtttctgttcaggtgccagcacaaacgccagcatcaccagcaaaagataaagtactctctacctcagaaaatgaaatatctcaaaaagtcagtgactcctcagttaaacgaaggccaatagtaactcctggtgtaacaggattgagaaatttgggaaatacttgctatatgaattctgttcttcaggtgttgagtcatttacttatttttcgacaatgttttttaaagcttgatctgaaccaatggctggctatgactgctagcgagaagacaagatcttgtaagcatccaccagtcacagatacagtagtatatcaaatgaatgaatgtcaggaaaaagatacaggttttgtttgctccagacaatcaagtctgtcatcaggactaagtggtggagcatcaaaaggtagaaagatggaacttattcagccaaaggagccaacttcacagtacatttctctttgtcatgaattgcatactttgttccaagtcatgtggtctggaaagtgggcgttggtctcaccatttgctatgctacactcagtgtggagactcattcctgcctttcgtggttacgcccaacaagacgctcaggaatttctttgtgaacttttagataaaatacaacgtgaattagagacaactggtaccagtttaccagctcttatccccacttctcaaaggaaactcatcaaacaagttctgaatgttgtaaataacatttttcatggacaacttcttagtcaggttacatgtcttgcatgtgacaacaaatcaaataccatagaacctttctgggacttgtcattggagtttccagaaaggtatcaatgcagtggaaaagatattgcttcccagccatgtctggttactgaaatgttggccaaatttacagaaactgaagctttagaaggaaaaatctacgtatgtgaccagtgtaactcaaagcgtagaaggttttcctccaaaccagttgtactcacagaagcccagaaacaacttatgatatgccacctacctcaggttctcagactgcacctcaaacgattcaggtggtcaggacgtaataaccgagagaagattggtgttcatgttggctttgaggaaatcttaaacatggagccctattgctgcagggagaccctgaaatccctcagaccagaatgctttatctatgacttgtccgcggtggtgatgcaccatgggaaaggatttggctcagggcactacactgcctactgctataattctgaaggagggttctgggtacactgcaatgattccaaactaagcatgtgcactatggatgaagtatgcaaggctcaagcttatatcttgttttatacccaacgagttactgagaatggacattctaaacttttgcctccagagctcctgttggggagccaacatcccaatgaagacgctgatacctcgtctaatgaaatccttagctgatccaaagacaatggggttttcttcctgtgatttatatatatactttttaaaagactgatgtaccattttaaacttcattttttcttgtgaatcagtgtatactacatttatacattttatatctaacaattttttttttttacaaagtataaatgtatatatcaactgaaggtaactacttttttcatatttggagttttaaacttttggtgtttacctcagactgatgttacctcttttatatttttatgtcttaattggctcggatgatgaacttgtgcaatcttctaccaacaaagttcaagtggcatcattttatatacatgtatctttttcaggtattttctatacaaattcttaatagatggaaaattagactctactttggtcactaatagtctttcatttgtatattgaagttaccttgccccttggagttattgaagtgacatgtcaaggtatcacctaaatattcttcagtcacactcactggtatttctgaggctttgtgtgttaacaggccttgtaattgacattattttggttaatgtaaccccaaaattgctttagtaattgctctttggcatagtcaaactataaatgaaaatggcagctttacaaatagtatatttaagtgaactctggaactatggacatgaaaaaaatgatggctgggatttatgatttttgtctggcagcaaacaggtttgtccagaagtctaataattaagcagtcataaaaagtctgaatttagtaaaccagtgtatgatgttattcaaatagtttaccttgggtatgagttcattttataatgtctgatgacattagatctcttaaaactttatgtattttttttagttcaaaggaatagagtcttgaagagaaaaaattatagggcagaaaagataagtgttcaaaattggcaactggactattattatgtctagcatctcattctaaataactaaagcttgatttactcttgctaggattatgtgactactaggtaggagcctcttaaaacactggccctgagcattaaaaaaaa

SEQ ID NO: 275872 - DNA, 1840 bp, Homo sapiens
caggctgtacgcccggagtacgggatcaacaagttctgaatgttgtaaataacatttttcatggacaacttcttagtcaggttacatgtcttgcatgtgacaacaaatcaaataccatagaacctttctgggacttgtcattggagtttccagaaaggtatcaatgcagtggaaaagatattgcttcccagccatgtctggttactgaaatgttggccaaatttacagaaactgaagctttagaaggaaaaatctacgtatgtgaccagtgtaactcaaagcgtagaaggttttcctccaaaccagttgtactcacagaagcccagaaacaacttatgatatgccacctacctcaggttctcagactgcacctcaaacgattcaggtggtcaggacgtaataaccgagagaagattggtgttcatgttggctttgaggaaatcttaaacatggagccctattgctgcagggagaccctgaaatccctcagaccagaatgctttatctatgacttgtccgcggtggtgatgcaccatgggaaaggatttggctcagggcactacactgcctactgctataattctgaaggagggttctgggtacactgcaatgattccaaactaagcatgtgcactatggatgaagtatgcaaggctcaagcttatatcttgttttatacccaacgagttactgagaatggacattctaaacttttgcctccagagctcctgttggggagccaacatcccaatgaagacgctgatacctcgtctaatgaaatccttagctgatccaaagacaatggggttttcttcctgtgatttatatatatactttttaaaagactgatgtaccattttaaacttcattttttcttgtgaatcagtgtatactacatttatacattttatatctaacaattttttttttttacaaagtataaatgtatatatcaactgaaggtaactacttttttcatatttggagttttaaacttttggtgtttacctcagactgatgttacctcttttatatttttatgtcttaattggctcggatgatgaacttgtgcaatcttctaccaacaaagttcaagtggcatcattttatatacatgtatctttttcaggtattttctatacaaattcttaatagatggaaaattagactctactttggtcactaatagtctttcatttgtatattgaagttaccttgccccttggagttattgaagtgacatgtcaaggtatcacctaaatattcttcagtcacactcactggtatttctgaggctttgtgtgttaacaggccttgtaattgacattattttggttaatgtaaccccaaaattgctttagtaattgctctttggcatagtcaaactataaatgaaaatggcagctttacaaatagtatatttaagtgaactctggaactatggacatgaaaaaaatgatggctgggatttatgatttttgtctggcagcaaacaggtttgtccagaagtctaataattaagcagtcataaaaagtctgaatttagtaaaccagtgtatgatgttattcaaatagtttaccttgggtatgagttcattttataatgtctgatgacattagatctcttaaaactttatgtattttttttagttcaaaggaatagagtcttgaagagaaaaaattatagggcagaaaagataagtgttcaaaattggcaactggactattattatgtctagcatctcattctaaataactaaagcttgatttactcttgctaggattatgtgactactaggtaggagcctcttaaaacactggccctgagcattaaaaaaaa

SEQ ID NO: 275873 - DNA, 1629 bp, Homo sapiens
  misc_feature (282)..(282): n is a, c, g, or t
  misc_feature (290)..(290): n is a, c, g, or t
agtaatcaagactgtggttctgacataaggaaggacatagacaatacaattgaggatccaaaaataaatccacacatttacaggcaactgatttttagcaagggtgccaagacattcagtggggagagaaccatcttgtcaacaaatggtgcagggacaattggatatccacaggtaaaagaattaatttggacccctatctcaggcattatacagaaactaacctaaacaaatcaaataccaaacaataatctgaaactataaaactcttagacacataantaaaaatnttctgacattggattaggcaatggtgtgatacctgaagtacaagcaacaagagaaaaaaatagataaaattgaacttaatattaaacttggcctggtgccgaattcggcacgagccaaactaagcatgtgcactatggatgaagtatgcaaggctcaagcttatatcttgttttatacccaacgagttactgagaatggacattctaaacttttgcctccagagctcctgttggggagccaacatcccaatgaagacgctgatacctcgtctaatgaaatccttagctgatccaaagacaatggggttttcttcctgtgatttatatatatactttttaaaagactgatgtaccattttaaacttcattttttcttgtgaatcagtgtatactacatttatacattttatatctaacaattttttttttttacaaagtataaatgtatatatcaactgaaggtaactacttttttcatatttggagttttaaacttttggtgtttacctcagactgatgttacctcttttatatttttatgtcttaattggctcggatgatgaacttgtgcaatcttctaccaacaaagttcaagtggcatcattttatatacatgtatctttttcaggtattttctatacaaattcttaatagatggaaaattagactctactttggtcactaatagtctttcatttgtatattgaagttaccttgccccttggagttattgaagtgacatgtcaaggtatcacctaaatattcttcagtcacactcactggtatttctgaggctttgtgtgttaacaggccttgtaattgacattattttggttaatgtaaccccaaaattgctttagtaattgctctttggcatagtcaaactataaatgaaaatggcagctttacaaatagtatatttaagtgaactctggaactatggacatgaaaaaaatgatggctgggatttatgatttttgtctggcagcaaacaggtttgtccagaagtctaataattaagcagtcataaaaagtctgaatttagtaaaccagtgtatgatgttattcaaatagtttaccttgggtatgagttcattttataatgtctgatgacattagatctcttaaaactttatgtattttttttagttcaaaggaatagagtcttgaagagaaaaaattatagggcagaaaagataagtgttcaaaattggcaactggactattattatgtctagcatctcattctaaataactaaagcttgatttactcttgctaggattatgtgactactaggtaggagcctcttaaaacactggccctgagcattaaaaaaaa

SEQ ID NO: 275874 - DNA, 2817 bp, Homo sapiens
agcggggggacttcaggaaagcagtttccaggaggtgagagtttaagccaaacctgaaagaggttgatttgtaatgatttgcaggggggcactggaggcagccgccaggacttttcacttaggagatcagcatttgccctgatggaaactgggcgatcctgcagggactgacctctgagttatccaaaggccgacctggggaaagactgattttgaggttttaatagttttcagatgcttcaagtgttgtgaacagagacttgtttggattatgcatttctcagctagactaaataaatgctagcaatggatacgtgcaaacatgttgggcagctgcagcttgctcaagaccattccagcctcaaccctcagaaatggcactgtgtggactgcaacacgaccgagtccatttgggcttgccttagctgctcccatgttgcctgtggaagatatattgaagagcatgcactcaagcactttcaagaaagcagtcatcctgttgcattggaggtgaatgagatgtacgttttttgttacctttgtgatgattatgttctgaatgataacgcaactggagacctgaagttactacgacgtacattaagtgccatcaaaagtcaaaattatcactgcacaactcgtagtgggaggtttttacggtccatgggtacaggtgatgattcttatttcttacatgacggtgcccaatctctgcttcaaagtgaagatcaactgtatactgctctttggcacaggagaaggatactaatgggtaaaatctttcgaacatggtttgaacaatcacccattggaagaaaaaagcaagaagaaccatttcaggaaaaaatagtagtaaaaagagaagtaaagaaaagacggcaggaattggagtatcaagttaaagcagaattggaaagtatgcctccaagaaagagtttacgtttacaagggctcgctcagtcgaccataatagaaatagtttctgttcaggtgccagcacaaacgccagcatcaccagcaaaagataaagtactctctacctcagaaaatgaaatatctcaaaaagtcagtgactcctcagttaaacgaaggccaatagtaactcctggtgtaacaggattgagaaatttgggaaatacttgctatatgaattctgttcttcaggtgttgagtcatttacttatttttcgacaatgttttttaaagcttgatctgaaccaatggctggctatgactgctagcgagaagacaagatcttgtaagcatccaccagtcacagatacagtagtatatcaaatgaatgaatgtcaggaaaaagatacaggttttgtttgctccagacaatcaagtctgtcatcaggactaagtggtggagcatcaaaaggtagaaagatggaacttattcagccaaaggagccaacttcacagtacatttctctttgtcatgaattgcatactttgttccaagtcatgtggtctggaaagtgggcgttggtctcaccatttgctatgctacactcagtgtggagactcattcctgcctttcgtggttacgcccaacaagacgctcaggaatttctttgtgaacttttagataaaatacaacgtgaattagagacaactggtaccagtttaccagctcttatccccacttctcaaaggaaactcatcaaacaagttctgaatgttgtaaataacatttttcatggacaacttcttagtcaggttacatgtcttgcatgtgacaacaaatcaaataccatagaacctttctgggacttgtcattggagtttccagaaaggtatcaatgcagtggaaaagatattgcttcccagccatgtctggttactgaaatgttggccaaatttacagaaactgaagctttagaaggaaaaatctacgtatgtgaccagtgtaactcaaagcgtagaaggttttcctccaaaccagttgtactcacagaagcccagaaacaacttatgatatgccacctacctcaggttctcagactgcacctcaaacgattcaggtggtcaggacgtaataaccgagagaagattggtgttcatgttggctttgaggaaatcttaaacatggagccctattgctgcagggagaccctgaaatccctcagaccagaatgctttatctatgacttgtccgcggtggtgatgcaccatgggaaaggatttggctcagggcactacactgcctactgctataattctgaaggagggttctgggtacactgcaatgattccaaactaagcatgtgcactatggatgaagtatgcaaggctcaagcttatatcttgttttatacccaacgagttactgagaatggacattctaaacttttgcctccagagctcctgttggggagccaacatcccaatgaagacgctgatacctcgtctaatgaaatccttagctgatccaaagacaatggggttttcttcctgtgatttatatatatactttttaaaagactgatgtaccattttaaacttcattttttcttgtgaatcagtgtatactacatttatacattttatatctaacaattttttttttttacaaagtataaatgtatatatcaactgaaggtaactacttttttcatatttggagttttaaacttttggtgtttacctcagactgatgttacctcttttatatttttatgtcttaattggctcggatgatgaacttgtgcaatcttctaccaacaaagttcaagtggcatcattttatatacatgtatctttttcaggtattttctatacaaattcttaatagatggaaaattagactct
